United States Patent Application Publication US 2017/0114356 A1 - sequence listing, part 60

SEQ ID NO: 81115 - DNA, 1556 bp, Zea Mays
gcagttttgcctgtggtcaatggtcgtcgcttcattggtcaaaccttgagagccccggttcagcaatcgcagttccacaaggcggcgatggacggcggcggggtcgatacggccacgacggcggcctggatggagaagcaccggcacatgtacgagcgggccacccggcacccgttcaccgtctccatccgcgacggtaccgtcgacatgtctgccttcaagcgctggctgaaaattgaagtggctaagctttgaccttttcatgtctgattcttggttcgtggtgtcgggcatcgagatctgtacatcaatctaaatactaccaagaagtcttggagttgctaccaagttaacaaaaattagtgtgcacggctatgaaattgagtgactagttgcgtgattcgagtcagaggtgtttctgggagaactgtgaatttaaaattgaacctgaaagcgtgaaggcaaacgatctttatcggcatatactgatactgcgtctgtgaagatcttgtgtttccagtggactagtcactctgaatgttgttattctgctgttgcttcctgttgacaaaaataactccagaatagaattggctcttagttgacactgtccaattatgatagtataaagtgatgaaggatcttgttcagagaactgtgcaaaaaagaactcaactgagtcaactcctaagccaggactatctgtttgtaagggaatttgttgcattcatagcaagtgtactgctcaaatgctgcaagcaagaagacagctcggacatggaaatcatcctgggtggagtagcgtctatcagcgacgagatctcttggttcaagaacgaagctactgtatggggcgtcgatctagcaagtgtttcccccttaaaagccaatctagagtaccacaggtttctccggagctttactgagccagagattagctatgctgttgctgtaactaccttctggacgatcgaaaccgtgtaccaggacagctttggtttctgcatacaagacggcaacaagacgccgccggagctcctgggcacctgccagagatggggcagcgccgggttcagacagtactgccagtctctgcagagcatcgtggatcgttgcttggctaacgcaccggctgatgctgtccagagtgctgaagaggccttcgtccgggtactcgagctggaaattggtttctgggatatgagctcttctcggtcctaattaccagcgtgttctctgagtccaaacatctacgcaaataatcgaacgaaataaatggtgcttcgggctcagacccaggttttccccatgtcaccttattcctatctttggttttcgcgtgacagtactttccgctgccggttcagaaaggactgatatgatgctgccatgtgggatccgatcagatttgctgcatgcacaggtgaaactccatcttacactcaatttttgtaagcatgctataacaaaaaaaactagacgttgtagagagattctacaagtagattaaggtaatttgttgttgtttggattggctccatgtagcacaaagtgac

SEQ ID NO: 81116 - DNA, 1785 bp, Zea Mays
gcagttttgcctgtggtcaatggtcgtcgcttcattggtcaaaccttgagagccccggttcagcaatcgcagttccacaaggcggcgatggacggcggcggggtcgatacggccacgacggcggcctggatggagaagcaccggcacatgtacgagcgggccacccggcacccgttcaccgtctccatccgcgacggtaccgtcgacatgtctgccttcaagcgctggctgaaaattgaagtggctaagctttgaccttttcatgtctgattcttggttcgtggtgtcgggcatcgagatctgtacatcaatctaaatactaccaagaagtcttggagttgctaccaagttaacaaaaattagtgtgcacggctatgaaattgagtgactagttgcgtgattcgagtcagaggtgtttctgggagaactgtgaatttaaaattgaacctgaaagcgtgaaggcaaacgatctttatcggcatatactgatactgcgtctgtgaagatcttgtgtttccagtggactagtcactctgaatgttgttattctgctgttgcttcctgttgacaaaaataactccagaatagaattggctcttagttgacactgtccaattatgatagtataaagtgatgaaggatcttgttcagagaactgtgcaaaaaagaactcaactgagtcaactcctagttgagcatagtattctgtaatttttttttaaaagttactctatatgatcttgggttctttttctagttgaaagcattttggttggtcataattacagctgtctacacaatgatcaatatgtgctggctaattttctttccgtgattttcttaaataaatttcattttggttatgagtaccatgaggggagaaaaaaaataaacagactggtttcttcgtcatatgcagagccaggactatctgtttgtaagggaatttgttgcattcatagcaagtgtactgctcaaatgctgcaagcaagaagacagctcggacatggaaatcatcctgggtggagtagcgtctatcagcgacgagatctcttggttcaagaacgaagctactgtatggggcgtcgatctagcaagtgtttcccccttaaaagccaatctagagtaccacaggtttctccggagctttactgagccagagattagctatgctgttgctgtaactaccttctggacgatcgaaaccgtgtaccaggacagctttggtttctgcatacaagacggcaacaagacgccgccggagctcctgggcacctgccagagatggggcagcgccgggttcagacagtactgccagtctctgcagagcatcgtggatcgttgcttggctaacgcaccggctgatgctgtccagagtgctgaagaggccttcgtccgggtactcgagctggaaattggtttctgggatatgagctcttctcggtcctaattaccagcgtgttctctgagtccaaacatctacgcaaataatcgaacgaaataaatggtgcttcgggctcagacccaggttttccccatgtcaccttattcctatctttggttttcgcgtgacagtactttccgctgccggttcagaaaggactgatatgatgctgccatgtgggatccgatcagatttgctgcatgcacaggtgaaactccatcttacactcaatttttgtaagcatgctataacaaaaaaaactagacgttgtagagagattctacaagtagattaaggtaatttgttgttgtttggattggctccatgtagcacaaagtgac

SEQ ID NO: 81117 - DNA, 1015 bp, Zea Mays
gcagttttgcctgtggtcaatggtcgtcgcttcattggtcaaaccttgagagccccggttcagcaatcgcagttccacaaggcggcgatggacggcggcggggtcgatacggccacgacggcggcctggatggagaagcaccggcacatgtacgagcgggccacccggcacccgttcaccgtctccatccgcgacggtaccgtcgacatgtctgccttcaagcgctggctgagccaggactatctgtttgtaagggaatttgttgcattcatagcaagtgtactgctcaaatgctgcaagcaagaagacagctcggacatggaaatcatcctgggtggagtagcgtctatcagcgacgagatctcttggttcaagaacgaagctactgtatggggcgtcgatctagcaagtgtttcccccttaaaagccaatctagagtaccacaggacagctttggtttctgcatacaagacggcaacaagacgccgccggagctcctgggcacctgccagagatggggcagcgccgggttcagacagtactgccagtctctgcagagcatcgtggatcgttgcttggctaacgcaccggctgatgctgtccagagtgctgaagaggccttcgtccgggtactcgagctggaaattggtttctgggatatgagctcttctcggtcctaattaccagcgtgttctctgagtccaaacatctacgcaaataatcgaacgaaataaatggtgcttcgggctcagacccaggttttccccatgtcaccttattcctatctttggttttcgcgtgacagtactttccgctgccggttcagaaaggactgatatgatgctgccatgtgggatccgatcagatttgctgcatgcacaggtgaaactccatcttacactcaatttttgtaagcatgctataacaaaaaaaactagacgttgtagagagattctacaagtagattaaggtaatttgttgttgtttggattggctccatgtagcacaaagtgac

SEQ ID NO: 81118 - DNA, 1078 bp, Zea Mays
gcagttttgcctgtggtcaatggtcgtcgcttcattggtcaaaccttgagagccccggttcagcaatcgcagttccacaaggcggcgatggacggcggcggggtcgatacggccacgacggcggcctggatggagaagcaccggcacatgtacgagcgggccacccggcacccgttcaccgtctccatccgcgacggtaccgtcgacatgtctgccttcaagcgctggctgagccaggactatctgtttgtaagggaatttgttgcattcatagcaagtgtactgctcaaatgctgcaagcaagaagacagctcggacatggaaatcatcctgggtggagtagcgtctatcagcgacgagatctcttggttcaagaacgaagctactgtatggggcgtcgatctagcaagtgtttcccccttaaaagccaatctagagtaccacaggtttctccggagctttactgagccagagattagctatgctgttgctgtaactaccttctggacgatcgaaaccgtgtaccaggacagctttggtttctgcatacaagacggcaacaagacgccgccggagctcctgggcacctgccagagatggggcagcgccgggttcagacagtactgccagtctctgcagagcatcgtggatcgttgcttggctaacgcaccggctgatgctgtccagagtgctgaagaggccttcgtccgggtactcgagctggaaattggtttctgggatatgagctcttctcggtcctaattaccagcgtgttctctgagtccaaacatctacgcaaataatcgaacgaaataaatggtgcttcgggctcagacccaggttttccccatgtcaccttattcctatctttggttttcgcgtgacagtactttccgctgccggttcagaaaggactgatatgatgctgccatgtgggatccgatcagatttgctgcatgcacaggagtacgctgggatgaacatcgacacatatctaatcagatcttatatttccgtgggggtctggagaaaatttgctcggaagccaaacatgttaagacctaagcatgtgttaccc

SEQ ID NO: 81119 - DNA, 1511 bp, Zea Mays
atgcttgcgctgatggttgcgatgagatcacgcaacaagtcgctggcttgcttgatctggtcaaaattgccttccagctcgatgttctttaggttgtggttagactcgtggtcgcggatggatagcttgacgcttgtaactctgcttagtgttgaccccacccttgtcgattatgccaccggccagagaggcgtccaaactgatctttcaatatatgagataaaataaaatacacaaacatctaaatcgtatattcaggcatattagagtaacaatataaacaaagcataataccatataataaaatgatatttgaatctactcttacaaatacttcgaacactaaaaaagaatttccatttaattcaaacaccaccttgtaacatgtctatactaaatgcaccaaagcaagagtggaatgaacattgatatgtatggtactcatctaacatcttaattaagtaaccagaggggaaaaggcaagttgatctagtgagatatattgaaacagagaagcttatatatcacgatttagtgttactattcaagtattccatatatctttggcatataaaatgaaacttccagataattgatttgttgtaagaagagtgaaaaaagatacaggttaccgttctgatgttatttcgggtaggttaagactataacctgaaaaacttggtgcaaggctttgatttgcttgatagaccagtttgaaatgactctgtgtctgtagcataaaattaattacattttctcatgcgttagaagtttgcattgtagttatcctacagaaaatagttattatacagtcgaaaaaagattgataaggtttctacacagataaataccatgtgtctgcatgtttcttcttgttcattgaactgatgaactgccaaattgaatttttattaatattcaagatccacaaggtggcttcattcccatatatgcttcagattactatttcttccgtaaaaaactgtctctttttaacagaatacatctacaactgtctgtttttaacaaaatacatgtaaatgatgtttccagacttttagttctagaactaattttactgtaccaaaattgtcgtgaggcacatacaagttgggagatttctccttgctggttgaactggtgaattgtccaattacatcgatcaagattcaagaggcaaaaggtgctttgacttccatatatgcttcaaattaccatttcttctctaaataactttcctcttttcaacaacatacatctagatgagccccatactattacactatctgaactctactatgagtattaaactatttttactacattactattttatgaggcacgtagtcctaactatatttgggaacacgcaggctttgtcaccattatgtacttacttagtactaatgtttttacttaagaggggtaagtttctcaaataagaatatgttattgtgctccttacctgttagcactggtgaagttttttatcagtagctagaaaaaatgtg

SEQ ID NO: 81120 - DNA, 996 bp, Zea Mays
aaattcaagggtattcaatgaatatccattattttttgcaaaaaaatttcgatatatacatgtatgtagtgtatatacatggaaatagaaaatcaatcaaataaatgaagaaattctgctaatttgaaccaaaatatctccttcctacatctcatacctaactagctcaatagattctcgtggcccatgtggccatgagacccaacgaagtgacaaagtccaccttattacctcatagcaaaaaatctctaaactatattgtagtcgcaccacgacagagccaccaaagcgccagccgccaagtcatggtcgtgtcttgccgccccatgtgcccacatggagacactagcacttttgtcgcgccaccgcgtcatcgctaggtgcccatacctaactggctaattgttgtcgtcgcgttgcacctgacctcattgctgtaccgaccgtcgtctgaggcttcgatccgtcgcagtcagggcaccatcacgtgcaagtacaaaccgccatggggcagggtcccatcatgtcaatgtccaagctcgcctggctggtggccacccgatcgtgacctctcctgcttgaccgcttccagtacttggctcttcctccatggacgccgatgacttggctccatcacagcctgccatctcttcctcctcttgtctcccttgtccgctactgctagaacgaagcgctctgtaaacgtttcagtggctcaagaggagggaaacaaacgagttaagaaggtgacaggaataatcggcatgagagaagagggggcgttgggcagtctttgaagcaggaccttgtggcgctctctgcagttggagggaggcgaggggcgaggagaatccaggcgcgtgtgctgagaggggcaagcctgtttctgtttatatagagggccatacgaggaggagagatcacacacagctggggcaacagcacaggatgggatcgcctgccttctccctccgaaggtaggagtgcgcagttagc

SEQ ID NO: 81121 - DNA, 1520 bp, Zea Mays
atccaggcatccacacacgcggccgagccaattccgctggagaggagtacacgcctcattacgcccatccacgtgctcgcctcgccccatcgcggacctttcctcggcggcgtcgccatctcatcggcggcgggcgtgcggccggtggccggagcccttaggcgatggcgacctcgtctgtggcggcggacatggagctggaccggccaaacctggaggactacctcccgcccgactcgctcccgcaggaggcgccccggaatctccatctgcgcgatctgctggacatctcgccggtgctcaccgaggcagcgggtgccattgtcgatgactccttcacacggtgctttaagtcaaattctccagagccatggaattggaacatatatctgttccccttatggtgctttggtgtagtaataagatatggaatactcttcccactgaggtccttaacgcttgcaataggatggttagcattttttgctgccttttttcctgtccatttcctattgaaagggcaagacaagttgagaagtaaaattgagaggaagttggttgaaatgatgtgcagtgtttttgttgcttcatggactggagttatcaagtatcatggaccacgcccaagcacacgacctcatcaggtattcgttgcaaaccatacatcgatgatagatttcattattctggagcaaatgacagcatttgctgtcatcatgcagaagcatcctggatgggttggatttattcagaagactatcttggaaagtgtcggttgcatctggtttaatcgtaatgatctccgggaccgtgaagttacggcacggaagttacgtgatcatgttcaacaaccagacaacaatcctctgttgatttttccggaaggaacttgtgtgaacaaccagtacacggtcatgttcaagaagggtgcctttgagcttggctgcgctgtatgtccaatagctatcaagtacaataaaatatttgttgatgccttttggaacagcaatcttttacaatgcacttggtccggctgatgacatcatgggctgttgtgtgtgatgtttggtacttacctcctcaatatctgagggagggagagacggcaattgcatttgctgagagagtaagggacatgatagctgctagagctggactaaagaaggttccttgggatggctatctgaaacacaaccgtcctagtcccaaacacactgaagagaaacaacgcatatttgccgaatctgtcttgatgagactggaggagaaatgaagggacgtaaagccgtacaagtgcacttcgttagggttttacatgcagctaccttgtaattcggttggcttccagaaaaaaaaaagtcagtgattaacaccgaagcattgtgctctcgtgagatgctgtgttggtcttaatatattgacggtactgtaccatggtttaaatgtgattattgaagcaatgtgaatggattagctggctaagaaaggaagtaaattgaattgtttgaatttgcagtgtg

SEQ ID NO: 81122 - DNA, 1507 bp, Zea Mays
atccaggcatccacacacgcggccgagccaattccgctggagaggagtacacgcctcattacgcccatccacgtgctcgcctcgccccatcgcggacctttcctcggcggcgtcgccatctcatcggcggcgggcgtgcggccggtggccggagcccttaggcgatggcgacctcgtctgtggcggcggacatggagctggaccggccaaacctggaggactacctcccgcccgactcgctcccgcaggaggcgccccggaatctccatctgcgcgatctgctggacatctcgccggtgctcaccgaggcagcgggtgccattgtcgatgactccttcacacggtgctttaagtcaaattctccagagccatggaattggaacatatatctgttccccttatggtgctttggtgtagtaataagatatggaatactcttcccactgaggatggttagcattttttgctgccttttttcctgtccatttcctattgaaagggcaagacaagttgagaagtaaaattgagaggaagttggttgaaatgatgtgcagtgtttttgttgcttcatggactggagttatcaagtatcatggaccacgcccaagcacacgacctcatcaggtattcgttgcaaaccatacatcgatgatagatttcattattctggagcaaatgacagcatttgctgtcatcatgcagaagcatcctggatgggttggatttattcagaagactatcttggaaagtgtcggttgcatctggtttaatcgtaatgatctccgggaccgtgaagttacggcacggaagttacgtgatcatgttcaacaaccagacaacaatcctctgttgatttttccggaaggaacttgtgtgaacaaccagtacacggtcatgttcaagaagggtgcctttgagcttggctgcgctgtatgtccaatagctatcaagtacaataaaatatttgttgatgccttttggaacagtaagaagcaatcttttacaatgcacttggtccggctgatgacatcatgggctgttgtgtgtgatgtttggtacttacctcctcaatatctgagggagggagagacggcaattgcatttgctgagagagtaagggacatgatagctgctagagctggactaaagaaggttccttgggatggctatctgaaacacaaccgtcctagtcccaaacacactgaagagaaacaacgcatatttgccgaatctgtcttgatgagactggaggagaaatgaagggacgtaaagccgtacaagtgcacttcgttagggttttacatgcagctaccttgtaattcggttggcttccagaaaaaaaaaagtcagtgattaacaccgaagcattgtgctctcgtgagatgctgtgttggtcttaatatattgacggtactgtaccatggtttaaatgtgattattgaagcaatgtgaatggattagctggctaagaaaggaagtaaattgaattgtttgaatttgcagtgtg

SEQ ID NO: 81123 - DNA, 1227 bp, Zea Mays
gatatatttccagcgttatgatctgtcaggactccttcacacggtgctttaagtcaaattctccagagccatggaattggaacatatatctgttccccttatggtgctttggtgtagtaataagatatggaatactcttcccactgaggtccttaacgcttgcaataggatggttagcattttttgctgccttttttcctgtccatttcctattgaaagggcaagacaagttgagaagtaaaattgagaggaagttggttgaaatgatgtgcagtgtttttgttgcttcatggactggagttatcaagtatcatggaccacgcccaagcacacgacctcatcaggtattcgttgcaaaccatacatcgatgatagatttcattattctggagcaaatgacagcatttgctgtcatcatgcagaagcatcctggatgggttggatttattcagaagactatcttggaaagtgtcggttgcatctggtttaatcgtaatgatctccgggaccgtgaagttacggcacggaagttacgtgatcatgttcaacaaccagacaacaatcctctgttgatttttccggaaggaacttgtgtgaacaaccagtacacggtcatgttcaagaagggtgcctttgagcttggctgcgctgtatgtccaatagctatcaagtacaataaaatatttgttgatgccttttggaacagtaagaagcaatcttttacaatgcacttggtccggctgatgacatcatgggctgttgtgtgtgatgtttggtacttacctcctcaatatctgagggagggagagacggcaattgcatttgctgagagagtaagggacatgatagctgctagagctggactaaagaaggttccttgggatggctatctgaaacacaaccgtcctagtcccaaacacactgaagagaaacaacgcatatttgccgaatctgtcttgatgagactggaggagaaatgaagggacgtaaagccgtacaagtgcacttcgttagggttttacatgcagctaccttgtaattcggttggcttccagaaaaaaaaaagtcagtgattaacaccgaagcattgtgctctcgtgagatgctgtgttggtcttaatatattgacggtactgtaccatggtttaaatgtgattattgaagcaatgtgaatggattagctggctaagaaaggaagtaaattgaattgtttgaatttgcagtgtg

SEQ ID NO: 81124 - DNA, 914 bp, Zea Mays
ctccgataaaacatgttcatggtatcattatgtattcgttgcaaaccatacatcgatgatagatttcattattctggagcaaatgacagcatttgctgtcatcatgcagaagcatcctggatgggttggatttattcagaagactatcttggaaagtgtcggttgcatctggtttaatcgtaatgatctccgggaccgtgaagttacggcacggaagttacgtgatcatgttcaacaaccagacaacaatcctctgttgatttttccggaaggaacttgtgtgaacaaccagtacacggtcatgttcaagaagggtgcctttgagcttggctgcgctgtatgtccaatagctatcaagtacaataaaatatttgttgatgccttttggaacagtaagaagcaatcttttacaatgcacttggtccggctgatgacatcatgggctgttgtgtgtgatgtttggtacttacctcctcaatatctgagggagggagagacggcaattgcatttgctgagagagtaagggacatgatagctgctagagctggactaaagaaggttccttgggatggctatctgaaacacaaccgtcctagtcccaaacacactgaagagaaacaacgcatatttgccgaatctgtcttgatgagactggaggagaaatgaagggacgtaaagccgtacaagtgcacttcgttagggttttacatgcagctaccttgtaattcggttggcttccagaaaaaaaaaagtcagtgattaacaccgaagcattgtgctctcgtgagatgctgtgttggtcttaatatattgacggtactgtaccatggtttaaatgtgattattgaagcaatgtgaatggattagctggctaagaaaggaagtaaattgaattgtttgaatttgcagtgtg

SEQ ID NO: 81125 - DNA, 1577 bp, Zea Mays
gtcagcttcttcgttgtgctcctctgctatgctgttgctgggatccataggtgttcaaatccgctagctttctgccaggtggcactgaggaagtttaatctgactacccacaaggttttaccagaaatgttgttcgttgtattttggtgaaatgggtttgataacagctactgatagggatatcatcttagaggggcttgatcagatagagaggctgatccaagaaggcaaatttgagtggaggaaggaccgggaggatgtgcatatgaacattgaagcggctctaattgaaagggttggtgagccagccaagaagttgcatactgctaggagccgcaatgaccaaattgtgacggatctaaggctatggtgccgtgatgctattgacaggattttgattcgtatcaagcagcttcaggtgtctctggttattttggcttcaaaatatgttgatttaatagtcccaggttatacccatctgcaaagggcgcagcctgttctgctgccacatcttctcttatcatatgttgaacagttggagcgtgatgctggtcggctggtcaactgcagggagcgaatgaatttctgtcctcttggtgcttgtgctttggctggaactggacttcccattgataggtttcaaactgctaaagatttgaaatttacagctccaatgaagaatagcattgatgcagtatcagaccgtgattttgtacttgagtttcttgctgccaattcgattgctgctgtccatctttcgcgaattggtgaagaatgggttctttgggcatcagaggaatttgggtttctgataccaagtgacaaagtttcaactggaagcagcattatgccccagaagaaaaatccagacccaatggagcttgttcgtgggaaatctgctagggttgttggagacctcatgactgttctaaccctctgtaaaggccttccacaggcctacaaccgtgaccttcaggaagacaaggaacccttgtttgatagtgtgaaagctgtattaggaatgcttgaagtatgcacagagtttgctcaaaatatctcttttaattcaaaaagaatacaaagttcacttccagctggttatctggatgcaacgacgctggcggattatctcgtgaagaagggagtccctttcagaacttctcacgagatagttggaaggtctgttgctctatgcgtctccaagaactgtcagctagctgagcttgaattggctgacctaaaatctgtccatcctgtatttgaggatgacgtctatgaatacctgggggttgaaaacgctgtaaacaagttcatatcctatggctctactggttcagaacaagtgaaaaagcagcttgaggattggcgcatccagctcggggtgagctcataagggttggcatggttcaagaaataagctcgcaaattagtgcttgcgatttttgaaggtgtatgttgacgtcgtgaactttttctgtgtgtttgttcatacatttcgaaaactggaatgaatgatgtaaacatgttggacaccttgagcctcttttatatattattattgcactgtgttttatttt

SEQ ID NO: 81126 - DNA, 941 bp, Zea Mays
cttaactttatacttccaagcacttcgatttggtggtgccaaaggaatcattgatgcagtatcagaccgtgattttgtacttgagtttcttgctgccaattcgattgctgctgtccatctttcgcgaattggtgaagaatgggttctttgggcatcagaggaatttgggtttctgataccaagtgacaaagtttcaactggaagcagcattatgccccagaagaaaaatccagacccaatggagcttgttcgtgggaaatctgctagggttgttggagacctcatgactgttctaaccctctgtaaaggccttccacaggcctacaaccgtgaccttcaggaagacaaggaacccttgtttgatagtgtgaaagctgtattaggaatgcttgaagtatgcacagagtttgctcaaaatatctcttttaattcaaaaagaatacaaagttcacttccagctggttatctggatgcaacgacgctggcggattatctcgtgaagaagggagtccctttcagaacttctcacgagatagttggaaggtctgttgctctatgcgtctccaagaactgtcagctagctgagcttgaattggctgacctaaaatctgtccatcctgtatttgaggatgacgtctatgaatacctgggggttgaaaacgctgtaaacaagttcatatcctatggctctactggttcagaacaagtgaaaaagcagcttgaggattggcgcatccagctcggggtgagctcataagggttggcatggttcaagaaataagctcgcaaattagtgcttgcgatttttgaaggtgtatgttgacgtcgtgaactttttctgtgtgtttgttcatacatttcgaaaactggaatgaatgatgtaaacatgttggacaccttgagcctcttttatatattattattgcactgtgttttatttt

SEQ ID NO: 81127 - DNA, 1119 bp, Zea Mays
aggcaaccagatcacacgcgcctgactaaccgctccgatccgtcgatgagcagcgagctgagcagtgagcaccgcacgttcctagctactgatgcggaggagagtaactgtagtatggtactacatgttaatggattttatacaggccgacccgaggccggtacgtcgtactcctgcccaaaattaaacaggggggggggggggggcagagagacaacgtggtcgctagcgaggccgcgagagcggacggtggtgcggcctcgcgccacggcgcccactttgccgggcgcgcccacgtgcccgcgccagcagccacacgtacggccgcgcgccgccgtggccgtggccgtgccggcccgctagctactcgctctcgctccgctccccccacttaccgtccgcccaggtaacggagcatccggtcggttacgtgtacgcgctagcgtactctactccgtgtacccgcgagcccggccgctgctactatattatggccggccgtggcgtggcctcgctattagccagcgagctgaggcctgaggagcgagcacagccgagtcacccggccggccgcccgcacgcacggacaccaacaactcccttggacgcacccgatcgaccctgctgcctgctagccgtgcgcagtagtgggagcgagcacgagtgagagtgggcagcgagaacatacgccgcccccggccggtgtgactggtggtggcgtcgcgcgcgcgatggggagggcgccgtgctgcgagaaggtggggctcaagcgcgggaggtggacgaaggaggaggaccagatactcgccaactacatcgcagagcacggcgagggatcctggaggtcgctgcccaagaatgcagggctgctccgctgcggcaagagctgccgcctgcggtggatcaactaccttcgggccgacgtcaagagggggaacatctccaaggaggaagaggacgtcatcatcaagctccacgccacccttggaaacagaccttgatcgtctgatgctgatggacggacggtcgaattggatcgctcaccggccggcctcgcctgttgaatgccatcatgaaaatttgtcacttggcattgatcgcgacgcgactagcggcagg

SEQ ID NO: 81128 - DNA, 3237 bp, Zea Mays
ggaggagttccgcctcggcctccgcaacggccagatcctctgcggcgcgcttaaccgggtccacctgggtgccgtcccgaaggtggtcgtaaacacggcggcggactccgtgctccaggccgacggcgcggcgctgtcggcgttccagtacttcgagaacgtgcgcaacttcctggtggcggcgcaggagatcggcctgccgtgcttcgaggcctccgatttggagcagggagggaagagcgccagggtggtgaactgcgtcctcgcgctgaagtcatactgtgactggaagcaatgcggtggcaccgggccgtggaagtacggggggaatcttaagccatcagtgtccggcaagtccttcgggaggaagaactctgagccgttccagaggagccaatcgatcaatgaaggtgaagtgccctatgaggaagctgggttcaatggctacgctcattttgattccagcgacatgtcaacatggcgcccccttaaaatgttggtcagtgcagttttgtccgacaaaaggccagatgaagttccacagctcttggagtccatgctgagcaaacttgttgaagaatttgaaaatcgtctaaacagccaaaatgaactggtcaaagcggctctaaaaaatggtattgataacaccagatccttttcaaaatcaaaggttctggttgagaccactcctaatactagtgggagaaagatggatacagcagatatttactgtaaccataaacaaacaaaaaaagtagcatcaagtgaattggcactgaagcaatattcaattctacaacaacagtcaaagaatgttgaggaacttaagagtgatttaataaatacaagggatggtatggagtatatgcaaatgaagtacgctgaggatctcaaccttcttggaaggcacctgtttagcttggctcatgctgcttctggttatcacaaagttcttgaagaaaatagaaaactatacaaccaggtgcaggatcttaaaggaagtattagggtatattgtagggtgcgtccctttttgccgggacaagcaagtccgtccactgtggcttccattgacgagggcaacataacccttgtcatcccttccaagtctggaaaggaagtacggaaaacttttagcttcaataaggtttttggctcatcagcgacacaagatgaggtgttcttggatactcaaccccttattcgctcggttcttgatggatacaatgtatgtatctttgcatatggccaaactggatcagggaagacatacacgatgagtgggcccaaaaacatgactgagcaaacccaaggtgtcaactatcgggcacttggtgatctatttaagcttgctgaacaaaggaagagaaccttcatttatgatattgctgtgcaaatgattgagatttacaatgaacaagtcagggacctccttgtcactgacggtctcaacaaaaaattagagattcggaataactctcaaaatgggctaaatgtgccagatgcaagtcttgttcgtgtggcatcaacaatggatgtcatggaattgatgaatgttgggcacaagaatcgtgctgttggtgccactgcactaaatgacaggagtagtcgttcccacagttgtttaactgttcatgttaagggaagggatctgacatcagggacaatccttcgcggttgcatgcatttagttgatcttgctggcagtgaacgggttgataaatcagaggtcactggagaaaggttaaaagaagcacagcatataaacaaatcattgtcagccttaggggatgtaattgcttcgcttgcccaaaagaattcacatgtaccttacaggaatagtaaattaacacaacttctccaagattcacttggaggtcaggccaaaaccttgatgtttgttcatataagcccagaaagtgatgctgtaggagaaaccatcagcaccttgaagtttgccgagcgtgtgtcaactgttgaacttggtgctgctcaactaaataaagaatctggagaagttagagagcttaagattgctcaacttaaatcagcattagctgcaaaagatttaggatcggagcaaatcatcagtcatgacactgaggcatttaacataaagatgccttcgcctggtttttcaattaagcgacagggtagctgtgatctactgtctacccaaactaacttcagacaaccattggatgctgttggaaacatagaggctagagccaatcctacactgaggcaaaagaaaccaagctttgacctccaggatttattaacagcaaatgattctccttcatggccagatagcaatttgagggtaaattttcagacgggagatgaaagagaagtaattggtggggactggatagataaggtatgagggagaagcagtaccagaggaataacacaagacaaaaggatgaccatgagtatgaagagcaaaggtctcgattttactctaccaatactgatgattctgatgacattgacatggcaacaagtgattcctcagaatcagatgcgctatggcagcagctcaatgtccaaagcatggataactctattagtttgagcggttcaaaggttaagaaaccacaaataaagcttagagatggttcagatgccaggacaccaatccattctcaaataccatcagcgtcaagaaaagttgcaaacggttcaaacagatctgttaggcagcctttaagcagaagcgacagcagaaggctttcatcaaatggaagacaatctggtgcaaagtagggacttacaatgatcgtgtgcattttttgcctttttctcagtgtttgtcacgagagattgtgaggatgttcttgagtacagcaatgagtgacaataaacccgattgattgtgtcagtgtggtgagttgtgatctcaacaactggtgtgtgaggccattaacctttttttttccttattggccttcaggctatgttgagttatagctagttctttgtatctgttcataatataaatttatataatgaaaagaaagcaaatcgattgatcaaaagctggtgcctaataatttctgtacttaaatgcttgaaatttctcttttgatcatggctccttgcaatgtccctcgattcttggtttcttgctacatcctatggactggcctttgctgcaattctgttcaatcaatatatgatttccatggtccacccttccatgaacgaatgaagttatgataacaacattttgtg

SEQ ID NO: 81129 - DNA, 3256 bp, Zea Mays
ggaggagttccgcctcggcctccgcaacggccagatcctctgcggcgcgcttaaccgggtccacctgggtgccgtcccgaaggtggtcgtaaacacggcggcggactccgtgctccaggccgacggcgcggcgctgtcggcgttccagtacttcgagaacgtgcgcaacttcctggtggcggcgcaggagatcggcctgccgtgcttcgaggcctccgatttggagcagggagggaagagcgccagggtggtgaactgcgtcctcgcgctgaagtcatactgtgactggaagcaatgcggtggcaccgggccgtggaagtacggggggaatcttaagccatcagtgtccggcaagtccttcgggaggaagaactctgagccgttccagaggagccaatcgatcaatgaaggtgaagtgccctatgaggaagctgggttcaatggctacgctcattttgattccagcgacatgtcaacatggcgcccccttaaaatgttggtcagtgcagttttgtccgacaaaaggccagatgaagttccacagctcttggagtccatgctgagcaaacttgttgaagaatttgaaaatcgtctaaacagccaaaatgaactggtcaaagcggctctaaaaaatggtattgataacaccagatccttttcaaaatcaaaggttctggttgagaccactcctaatactagtgggagaaagatggatacagcagatatttactgtaaccataaacaaacaaaaaaagtagcatcaagtgaattggcactgaagcaatattcaattctacaacaacagtcaaagaatgttgaggaacttaagagtgatttaataaatacaagggatggtatggagtatatgcaaatgaagtacgctgaggatctcaaccttcttggaaggcacctgtttagcttggctcatgctgcttctggttatcacaaagttcttgaagaaaatagaaaactatacaaccaggtgcaggatcttaaaggaagtattagggtatattgtagggtgcgtccctttttgccgggacaagcaagtccgtccactgtggcttccattgacgagggcaacataacccttgtcatcccttccaagtctggaaaggaagtacggaaaacttttagcttcaataaggtttttggctcatcagcgacacaagatgaggtgttcttggatactcaaccccttattcgctcggttcttgatggatacaatgtatgtatctttgcatatggccaaactggatcagggaagacatacacgatgagtgggcccaaaaacatgactgagcaaacccaaggtgtcaactatcgggcacttggtgatctatttaagcttgctgaacaaaggaagagaaccttcatttatgatattgctgtgcaaatgattgagatttacaatgaacaagtcagggacctccttgtcactgacggtctcaacaaaaaattagagattcggaataactctcaaaatgggctaaatgtgccagatgcaagtcttgttcgtgtggcatcaacaatggatgtcatggaattgatgaatgttgggcacaagaatcgtgctgttggtgccactgcactaaatgacaggagtagtcgttcccacagttgtttaactgttcatgttaagggaagggatctgacatcagggacaatccttcgcggttgcatgcatttagttgatcttgctggcagtgaacgggttgataaatcagaggtcactggagaaaggttaaaagaagcacagcatataaacaaatcattgtcagccttaggggatgtaattgcttcgcttgcccaaaagaattcacatgtaccttacaggaatagtaaattaacacaacttctccaagattcacttggaggtcaggccaaaaccttgatgtttgttcatataagcccagaaagtgatgctgtaggagaaaccatcagcaccttgaagtttgccgagcgtgtgtcaactgttgaacttggtgctgctcaactaaataaagaatctggagaagttagagagcttaaggcgcagattgctcaacttaaatcagcattagctgcaaaagatttaggatcggagcaaatcatcagtcatgacactgaggcatttaacataaagatgccttcgcctggtttttcaattaagcgacagggtagctgtgatctactgtctacccaaactaacttcagacaaccattggatgctgttggaaacatagaggctagagccaatcctacactgaggcaaaagaaaccaagctttgacctccaggatttattaacagcaaatgattctccttcatggccagatagcaatttgagggtaaattttcagacgggagatgaaagagaagtaattggtggggactggatagataagagatatcattcaggtatgagggagaagcagtaccagaggaataacacaagacaaaaggatgaccatgagtatgaagagcaaaggtctcgattttactctaccaatactgatgattctgatgacattgacatggcaacaagtgattcctcagaatcagatgcgctatggcagcagctcaatgtccaaagcatggataactctattagtttgagcggttcaaaggttaagaaaccacaaataaagcttagagatggttcagatgccaggacaccaatccattctcaaataccatcagcgtcaagaaaagttgcaaacggttcaaacagatctgttaggcagcctttaagcagaagcgacagcagaaggctttcatcaaatggaagacaatctggtgcaaagtagggacttacaatgatcgtgtgcattttttgcctttttctcagtgtttgtcacgagagattgtgaggatgttcttgagtacagcaatgagtgacaataaacccgattgattgtgtcagtgtggtgagttgtgatctcaacaactggtgtgtgaggccattaacctttttttttccttattggccttcaggctatgttgagttatagctagttctttgtatctgttcataatataaatttatataatgaaaagaaagcaaatcgattgatcaaaagctggtgcctaataatttctgtacttaaatgcttgaaatttctcttttgatcatggctccttgcaatgtccctcgattcttggtttcttgctacatcctatggactggcctttgctgcaattctgttcaatcaatatatgatttccatggtccacccttccatgaacgaatgaagttatgataacaacattttgtg

SEQ ID NO: 81130 - DNA, 3222 bp, Zea Mays
ggaagagcgccagggtggtgaactgcgtcctcgcgctgaagtcatactgtgactggaagcaatgcggtggcaccgggccgtggaagtacggggggaatcttaagccatcagtgtccggcaagtccttcgggaggaagaactctgagccgttccagaggagccaatcgatcaatgaaggtgaagtgccctatgaggaagctgggttcaatggctacgctcattttgattccagcgacatgtcaacatggcgcccccttaaaatgttggtcagtgcagttttgtccgacaaaaggccagatgaagttccacaggtatactaatttgcttcactactttttgtaagttacctgttcaatggacttatataatcgcttttattgttttttatcctatgggattaccagttccatgatgtttttattctgttgtttgtatgcagctcttggagtccatgctgagcaaacttgttgaagaatttgaaaatcgtctaaacagccaaaatgaactggtcaaagcggctctaaaaaatggtattgataacaccagatccttttcaaaatcaaaggttctggttgagaccactcctaatactagtgggagaaagatggatacagcagatatttactgtaaccataaacaaacaaaaaaagtagcatcaagtgaattggcactgaagcaatattcaattctacaacaacagtcaaagaatgttgaggaacttaagagtgatttaataaatacaagggatggtatggagtatatgcaaatgaagtacgctgaggatctcaaccttcttggcacctgtttagcttggctcatgctgcttctggttatcacaaagttcttgaagaaaatagaaaactatacaaccaggtgcaggatcttaaaggaagtattagggtatattgtagggtgcgtccctttttgccgggacaagcaagtccgtccactgtggcttccattgacgagggcaacataacccttgtcatcccttccaagtctggaaaggaagtacggaaaacttttagcttcaataaggtttttggctcatcagcgacacaagatgaggtgttcttggatactcaaccccttattcgctcggttcttgatggatacaatgtatgtatctttgcatatggccaaactggatcagggaagacatacacgatgagtgggcccaaaaacatgactgagcaaacccaaggtgtcaactatcgggcacttggtgatctatttaagcttgctgaacaaaggaagagaaccttcatttatgatattgctgtgcaaatgattgagatttacaatgaacaagtcagggacctccttgtcactgacggtctcaacaaaaaattagagattcggaataactctcaaaatgggctaaatgtgccagatgcaagtcttgttcgtgtggcatcaacaatggatgtcatggaattgatgaatgttgggcacaagaatcgtgctgttggtgccactgcactaaatgacaggagtagtcgttcccacagttgtttaactgttcatgttaagggaagggatctgacatcagggacaatccttcgcggttgcatgcatttagttgatcttgctggcagtgaacgggttgataaatcagaggtcactggagaaaggttaaaagaagcacagcatataaacaaatcattgtcagccttaggggatgtaattgcttcgcttgcccaaaagaattcacatgtaccttacaggaatagtaaattaacacaacttctccaagattcacttggaggtcaggccaaaaccttgatgtttgttcatataagcccagaaagtgatgctgtaggagaaaccatcagcaccttgaagtttgccgagcgtgtgtcaactgttgaacttggtgctgctcaactaaataaagaatctggagaagttagagagcttaaggcgcagattgctcaacttaaatcagcattagctgcaaaagatttaggatcggagcaaatcatcagtcatgacactgaggcatttaacataaagatgccttcgcctggtttttcaattaagcgacagggtagctgtgatctactgtctacccaaactaacttcagacaaccattggatgctgttggaaacatagaggctagagccaatcctacactgaggcaaaagaaaccaagctttgacctccaggatttattaacagcaaatgattctccttcatggccagatagcaatttgagggtaaattttcagacgggagatgaaagagaagtaattggtggggactggatagataaggttgtagtgaacaacaataattcagtcggtgactgggagggtgacaatgcagctttacctgacttcttttaccagagatatcattcaggtatgagggagaagcagtaccagaggaataacacaagacaaaaggatgaccatgagtatgaagagcaaaggtctcgattttactctaccaatactgatgattctgatgacattgacatggcaacaagtgattcctcagaatcagatgcgctatggcagcagctcaatgtccaaagcatggataactctattagtttgagcggttcaaaggttaagaaaccacaaataaagcttagagatggttcagatgccaggacaccaatccattctcaaataccatcagcgtcaagaaaagttgcaaacggttcaaacagatctgttaggcagcctttaagcagaagcgacagcagaaggctttcatcaaatggaagacaatctggtgcaaagtagggacttacaatgatcgtgtgcattttttgcctttttctcagtgtttgtcacgagagattgtgaggatgttcttgagtacagcaatgagtgacaataaacccgattgattgtgtcagtgtggtgagttgtgatctcaacaactggtgtgtgaggccattaacctttttttttccttattggccttcaggctatgttgagttatagctagttctttgtatctgttcataatataaatttatataatgaaaagaaagcaaatcgattgatcaaaagctggtgcctaataatttctgtacttaaatgcttgaaatttctcttttgatcatggctccttgcaatgtccctcgattcttggtttcttgctacatcctatggactggcctttgctgcaattctgttcaatcaatatatgatttccatggtccacccttccatgaacgaatgaagttatgataacaacattttgtg

SEQ ID NO: 81131 - DNA, 3089 bp, Zea Mays
ggaagagcgccagggtggtgaactgcgtcctcgcgctgaagtcatactgtgactggaagcaatgcggtggcaccgggccgtggaagtacggggggaatcttaagccatcagtgtccggcaagtccttcgggaggaagaactctgagccgttccagaggagccaatcgatcaatgaaggtgaagtgccctatgaggaagctgggttcaatggctacgctcattttgattccagcgacatgtcaacatggcgcccccttaaaatgttggtcagtgcagttttgtccgacaaaaggccagatgaagttccacaggtatactaatttgcttcactactttttgtaagttacctgttcaatggacttatataatcgcttttattgttttttatcctatgggattaccagttccatgatgtttttattctgttgtttgtatgcagctcttggagtccatgctgagcaaacttgttgaagaatttgaaaatcgtctaaacagccaaaatgaactggtcaaagcggctctaaaaaatggtattgataacaccagatccttttcaaaatcaaaggttctggttgagaccactcctaatactagtgggagaaagatggatacagcagatatttactgtaaccataaacaaacaaaaaaagtagcatcaagtgaattggcactgaagcaatattcaattctacaacaacagtcaaagaatgttgaggaacttaagagtgatttaataaatacaagggatggtatggagtatatgcaaatgaagtacgctgaggatctcaaccttcttggaaggcacctgtttagcttggctcatgctgcttctggttatcacaaagttcttgaagaaaatagaaaactatacaaccaggtgcaggatcttaaaggaagtattagggtatattgtagggtgcgtccctttttgccgggacaagcaagtccgtccactgtggcttccattgacgagggcaacataacccttgtcatcccttccaagtctggaaaggaagtacggaaaacttttagcttcaataaggtttttggctcatcagcgacacaagatgaggtgttcttggatactcaaccccttattcgctcggttcttgatggatacaatgtatgtatctttgcatatggccaaactggatcagggaagacatacacgatgatgcaagtcttgttcgtgtggcatcaacaatggatgtcatggaattgatgaatgttgggcacaagaatcgtgctgttggtgccactgcactaaatgacaggagtagtcgttcccacagttgtttaactgttcatgttaagggaagggatctgacatcagggacaatccttcgcggttgcatgcatttagttgatcttgctggcagtgaacgggttgataaatcagaggtcactggagaaaggttaaaagaagcacagcatataaacaaatcattgtcagccttaggggatgtaattgcttcgcttgcccaaaagaattcacatgtaccttacaggaatagtaaattaacacaacttctccaagattcacttggaggtcaggccaaaaccttgatgtttgttcatataagcccagaaagtgatgctgtaggagaaaccatcagcaccttgaagtttgccgagcgtgtgtcaactgttgaacttggtgctgctcaactaaataaagaatctggagaagttagagagcttaaggcgcaggtttatttttgctgttatgttatgctatcatatttcttactgccctttctctattcaacatattcatgttctctgttcatgcttagattgctcaacttaaatcagcattagctgcaaaagatttaggatcggagcaaatcatcagtcatgacactgaggcatttaacataaagatgccttcgcctggtttttcaattaagcgacagggtagctgtgatctactgtctacccaaactaacttcagacaaccattggatgctgttggaaacatagaggctagagccaatcctacactgaggcaaaagaaaccaagctttgacctccaggatttattaacagcaaatgattctccttcatggccagatagcaatttgagggtaaattttcagacgggagatgaaagagaagtaattggtggggactggatagataaggttgtagtgaacaacaataattcagtcggtgactgggagggtgacaatgcagctttacctgacttcttttaccagagatatcattcaggtatgagggagaagcagtaccagaggaataacacaagacaaaaggatgaccatgagtatgaagagcaaaggtctcgattttactctaccaatactgatgattctgatgacattgacatggcaacaagtgattcctcagaatcagatgcgctatggcagcagctcaatgtccaaagcatggataactctattagtttgagcggttcaaaggttaagaaaccacaaataaagcttagagatggttcagatgccaggacaccaatccattctcaaataccatcagcgtcaagaaaagttgcaaacggttcaaacagatctgttaggcagcctttaagcagaagcgacagcagaaggctttcatcaaatggaagacaatctggtgcaaagtagggacttacaatgatcgtgtgcattttttgcctttttctcagtgtttgtcacgagagattgtgaggatgttcttgagtacagcaatgagtgacaataaacccgattgattgtgtcagtgtggtgagttgtgatctcaacaactggtgtgtgaggccattaacctttttttttccttattggccttcaggctatgttgagttatagctagttctttgtatctgttcataatataaatttatataatgaaaagaaagcaaatcgattgatcaaaagctggtgcctaataatttctgtacttaaatgcttgaaatttctcttttgatcatggctccttgcaatgtccctcgattcttggtttcttgctacatcctatggactggcctttgctgcaattctgttcaatcaatatatgatttccatggtccacccttccatgaacgaatgaagttatgataacaacattttgtg

SEQ ID NO: 81132 - DNA, 2211 bp, Zea Mays
ctgagctggggctgaccagtgactgcactggccggtgattttgcacgaaccaccctgttttacgctaaaatctcgatacgatcctgcaccttctcactctctgatcagctgattaaaatcctcgtccccttttgccgtccctctgttcacggccctcgccaaatccccaaaatccaagcgcgtcgccgacggcattgcgtcgccattgcctccaaatccgtgtgcgactcgcgtgatcccagatcccgctcgccgtatcccccgcagtgacctctgaccagagcattttccgcgcggaaaatgccgccgtttcggccggctcttggaagggcgcttcttctgtaggaccgcggcgcgaggctgcgatggcgttcgccgccagcgagggaaatctttccccggcgctgcccctggccactctgatcggccgcgagctccgcggcgacggtaccgagcgcccgcacgtgcgctacggccactctggcttcgccaagcgcggcgaggactacttcctcgtcaagcccgactgcctccgcgtccccggagacccttcctcctctttctccgtcttcgctgtattcgacggccacaatggcgtgtcggcggcggtgttcagcaaggagaaattgctggagcacgtgatgagcgcggtgcccgagggcatcagtcgcgaggactggctacaggcgctgccgcgcgcgctcgtcgcaggattcgtcaagacagacattgacttccagcgcaagggtgagacgtcaggaacgacggcgacacttgttgtggttgatgggttcacggtcactgtggcgtcggtgggagattctaggtgcattctggatacacagggaggcgaggtctcattgctgactgtggatcaccggctagaggagaatgcagaggagcgtgagcgcgtcacagcgagtggaggagaggtcagccggcttaatctctgtggtggacaggaggtgggtcctctccgatgctggccaggtggattgtgcctttcaaggtcaattggggatactgatgtcggcgagttcattgtaccgattccacatgtcaagcaagtgaagctcccaaatactggtggaagactaataattgcatcagatggaatatgggacgctctgtcctcagagagtgctgctcaggcgtgccggggattacgtgcagaactggctgcaaaacttgttgttaagcaagctctgaagacaagtgggctgaaagatgacaccacatgtgtggttgtcgacatcatcccatctgatcattgttcaacaccaccagcattgtctccaaagaaaaatcagaacaagttgaagcatcttatttttggtaaaaggtctcatagttctgttggaaagctcagcaaatctgcttcattgggttcagtggaagaaatattcgaggagggatctgcaatgttggaagaaaggtacagttggatgttccagtcctggtgtcctgggaattccattctatgttctcatttcctacactggcacaacctgttctttcatggcattgccattttccctttgtactatttcgatgccttggttgggaagtaattttccaccaaaagcaaatctgcctccatttcgctgtgcaatctgccaagtggaccaagagccattcgaaggtttaatgacggacaatgtaggtggctgctgctcaaccccatcaacaccatggggtggtccttatctttgctcaggctgtaggaaaaagaaggacgcgatggaaggtaaacgatcgaatcgttcaacgacgtgcaggtgaaggttctgataggaatcactgggactgggtcctgtgatcctgtcatgcaagcttgcaaagtagtctccgatttcggttttctgctccttgtaaaaagagaagaataaaccgtctgtcgtttgattgaagtattgttcggtgaaaactaactgcactccagcctgatctgagaaaaaccggggtactaataacaagcctgatttctattgacatcccctatcaaactttcgtttgctctgagaggatagctgacagaactttgaggctgtagttttgtgaacccttagcatgtagagggaaatgagtagcttaacaatgttttatagaacgatggtgtggcttctcattgttgctttagaatgtattttgtgtttgtggagctaaagacccaaatgttttttttacttgatcgaatttggcttgggtttt

SEQ ID NO: 81133 - DNA, 658 bp, Zea Mays
gaaacagaggtaatagaagcagtgcagaaggaaattggcaggattgaagagacacaagcatggtcttcatctcattcaattcatggtctactccagttgaaaaaatgcagattgctgagaattcagcagctgaccgtgttgaggtaccaacagatggtgctagtgaatgggaaattgatgtaaagcttctcaagtttgggaataaagtagcatcaggatcatatggtgacctttaccggggtacatattgcagtcaagatgttgctattaaagtgctgaaacctgagagaataaatgcagacatgcaacgtgaatttgctcagcaaaatgggcctagatttgaacttcaaatgcaggatgtaactggatgaatgcaccacatttatgataaaaatcaccccatagtttgcttccgtgacactgcttttttatgtactactttgctgggcctgaaagctgggaacaaaaaacaaaagtatgaaagatcagcgaaaggaaaattgctacttcaactgaggctctctgtcgtggatatcctaccaaatttgcttcttacttccattactgtcgctcactgcgtttcgaagatgcaccggactatcagtacctgaagagattgttcagagacctttttattcgggaaggtttttagtttgat

SEQ ID NO: 81134 - DNA, 1467 bp, Zea Mays
tcaaaggtgaggttagggtttttttcaccaaaccagcgaggcagctaccgttttgtcgccatagcactcccgccgaccccctcgccgccgccgggaatggagaccagcaccaagaagcttagcagccttcgtatcacctccctggacgacgatgacgacgagaccgagatcccgcaccagccccctcaagcaggcctctccaccgctgaagcggattatgaggacgacgacgatgaggaggaagaagccgaagtgactcttggtgtccttagcaaaccgaagcacccaggcctcctcctccgccacttgttccccagcaaggccggtggcatcccggcgtggctagacccggtgaacttgccgtcgggaaagtccagctactgtggtttctgtggcgagcctctgcagttcgtcctccagatttatgcaccaattgaagataatgtagcagccttccaccgaacgctgttcatgttcatgtgcccatccatggcatgcttgcttcgagatcaacatgaacaatggaagcacaagtacgggaatccatgtagaagcgtgaagattttccggtgccaattgccacggaataatgccttctactcagctcaacctccaaagcatgatggctctgacaaaccactctgtccaggagctcctgtatgccactggtgtggtacctggaaaggtgataaaatatgtagtagctgcaagaaaagcaaggtactgttctgagaaacatcaggcactgcattggcgaactggtcataaaaatgattgcctccagataataagttctgctgcttcaaattcagttctgccagctgtaggaatagttcctgctagcatttcttggccagaatttgagataaaaatagactacgaaggtacttttgattctgatagtggtgatgaaaacaactcgaagtcattggtgatgcaaagacatgggaaacttgatgctatgatgcagtcgtggatggaccatttcgaggctgatgctgacaacaaatgctgggcgtcttttcaagaacgggtctcaagagcaccaaatcaagtgttgaggtattgtcgagaaccaaatgctaaacctctatgggccttatctttcgggtgcccgtcagatgctgatatcccatcatgtagctactgtagaggtccattatgctatgaatttcaggtaatgccacaattgctttatttctttggtgttggaaatcaaccagactcgcttgattgggcaacaattgttgtctacacatgtcaagggtcatgtgaccaaactgttagctacaaagaggaatttgcttgggttcagttgtaccctacaacaaccacgaggcggtaataatgtttacctattcctcggagtaactactgtccaattctgcaggtgtaaaaagatttgcagaaagtcagaaaaacaattcagtaaatacacccactggtagaattggagattgggatgct

SEQ ID NO: 81135 - DNA, 751 bp, Zea Mays
tttttttcaccaaaccagcgaggcagctaccgttttgtcgccatagcactcccgccgaccccctcgccgccgccgggaatggagaccagcaccaagaagcttagcagccttcgtatcacctccctggacgacgatgacgacgagaccgagatcccgcaccagccccctcaagcaggcctctccaccgctgaagcggattatgaggacgacgacgatgaggaggaagaagccgaagtgactcttggtgtccttagcaaaccgaagcacccaggcctcctcctccgccacttgttccccagcaaggccggtggcatcccggcgtggctagacccggtgaacttgccgtcgggaaagtccagctactgtggtttctgtggcgagcctctgcagttcgtcctccagatttatgcaccaattgaagataatgtagcagccttccaccgaacgctgttcatgttcatgtgcccatccatggcatgcttgcttcgagatcaacatgaacaatggaagcacaagtacgggaatccatgtagaagcgtgaagattttccggtgccaattgccacggaataatgccttctactcagctcaacctccaaagcatgatggctctgacaaaccactctgtccaggagctcctgtatgccactggtgtggtacctggaaaggtgataaaatatgtagtagctgcaagaaaagcaaggtactgttctgagaaacatcagattgatggctcttgattgctgtttctc

SEQ ID NO: 81136 - DNA, 1442 bp, Zea Mays
tttttttcaccaaaccagcgaggcagctaccgttttgtcgccatagcactcccgccgaccccctcgccgccgccgggaatggagaccagcaccaagaagcttagcagccttcgtatcacctccctggacgacgatgacgacgagaccgagatcccgcaccagccccctcaagcaggcctctccaccgctgaagcggattatgaggacgacgacgatgaggaggaagaagccgaagtgactcttggtgtccttagcaaaccgaagcacccaggcctcctcctccgccacttgttccccagcaaggccggtggcatcccggcgtggctagacccggtgaacttgccgtcgggaaagtccagctactgtggtttctgtggcgagcctctgcagttcgtcctccagatttatgcaccaattgaagataatgtagcagccttccaccgaacgctgttcatgttcatgtgcccatccatggcatgcttgcttcgagatcaacatgaacaatggaagcacaagtacgggaatccatgtagaagattttccggtgccaattgccacggaataatgccttctactcagctcaacctccaaagcatgatggctctgacaaaccactctgtccaggagctcctgtatgccactggtgtggtacctggaaaggtgataaaatatgtagtagctgcaagaaaagcaaggtactgttctgagaaacatcaggcactgcattggcgaactggtcataaaaatgattgcctccagataataagttctgctgcttcaaattcagttctgccagctgtaggaatagttcctgctagcatttcttggccagaatttgagataaaaatagactacgaaggtacttttgattctgatagtggtgatgaaaacaactcgaagtcattggtgatgcaaagacatgggaaacttgatgctatgatgcagtcgtggatggaccatttcgaggctgatgctgacaacaaatgctgggcgtcttttcaagaacgggtctcaagagcaccaaatcaagtgttgaggtattgtcgagaaccaaatgctaaacctctatgggccttatctttcgggtgcccgtcagatgctgatatcccatcatgtagctactgtagaggtccattatgctatgaatttcaggtaatgccacaattgctttatttctttggtgttggaaatcaaccagactcgcttgattgggcaacaattgttgtctacacatgtcaagggtcatgtgaccaaactgttagctacaaagaggaatttgcttgggttcagttgtaccctacaacaaccacgaggcggtaataatgtttacctattcctcggagtaactactgtccaattctgcaggtgtaaaaagatttgcagaaagtcagaaaaacaattcagtaaatacacccactggtagaattggagattgggatgct

SEQ ID NO: 81137 - DNA, 1334 bp, Zea Mays
tttttttcaccaaaccagcgaggcagctaccgttttgtcgccatagcactcccgccgaccccctcgccgccgccgggaatggagaccagcaccaagaagcttagcagccttcgtatcacctccctggacgacgatgacgacgagaccgagatcccgcaccagccccctcaagcaggcctctccaccgctgaagcggattatgaggacgacgacgatgaggaggaagaagccgaagtgactcttggtgtccttagcaaaccgaagcacccaggcctcctcctccgccacttgttccccagcaaggccggtggcatcccggcgtggctagacccggtgaacttgccgtcgggaaagtccagctactgtggtttctgtggcgagcctctgcagttcgtcctccagatttatgcaccaattgaagataatgtagcagccttccaccgaacgctgttcatgttcatgtgcccatccatggcatgcttgcttcgagatcaacatgaacaatggaagcacaagtacgggaatccatgtagaagcgtgaagattttccggtgccaattgccacggaataatgccttctactcagctcaacctccaaagcatgatggctctgacaaaccactctgtccaggagctcctgtatgccactggtgtggtacctggaaaggtgataaaatatgtagtagctgcaagaaaagcaaggtactgttctgagaaacatcaggcactgcattggcgaactggtcataaaaatgattgcctccagataataagttctgctgcttcaaattcagttctgccagctgtaggaatagttcctgctagcatttcttggccagaatttgagataaaaatagactacgaaggtacttttgattctgatagtggtgatgaaaacaactcgaagtcattggtgatgcaaagacatgggaaacttgatgctatgatgcagtcgtggatggaccatttcgaggctgatgctgacaacaaatgctgggcgtcttttcaagaacgggtctcaagagcaccaaatcaagtgttgaggtaatgccacaattgctttatttctttggtgttggaaatcaaccagactcgcttgattgggcaacaattgttgtctacacatgtcaagggtcatgtgaccaaactgttagctacaaagaggaatttgcttgggttcagttgtaccctacaacaaccacgaggcggtaataatgtttacctattcctcggagtaactactgtccaattctgcaggtgtaaaaagatttgcagaaagtcagaaaaacaattcagtaaatacacccactggtagaattggagattgggatgct

SEQ ID NO: 81138 - DNA, 1719 bp, Zea Mays
tttttttcaccaaaccagcgaggcagctaccgttttgtcgccatagcactcccgccgaccccctcgccgccgccgggaatggagaccagcaccaagaagcttagcagccttcgtatcacctccctggacgacgatgacgacgagaccgagatcccgcaccagccccctcaagcaggcctctccaccgctgaagcggattatgaggacgacgacgatgaggaggaagaagccgaagtgactcttggtgtccttagcaaaccgaagcacccaggcctcctcctccgccacttgttccccagcaaggccggtggcatcccggcgtggctagacccggtgaacttgccgtcgggaaagtccagctactgtggtttctgtggcgagcctctgcagttcgtcctccagatttatgcaccaattgaagataatgtagcagccttccaccgaacgctgttcatgttcatgtgcccatccatggcatgcttgcttcgagatcaacatgaacaatggaagcacaagtacgggaatccatgtagaagcgtgaagattttccggtgccaattgccacggaataatgccttctactcagctcaacctccaaagcatgatggctctgacaaaccactctgtccaggagctcctgtatgccactggtgtggtacctggaaaggtgataaaatatgtagtagctgcaagaaaagcaaggtactgttctgagaaacatcaggcactgcattggcgaactggtcataaaaatgattgcctccagataataagttctgctgcttcaaattcagttctgccagctgtaggaatagttcctgctagcatttcttggccagaatttgagataaaaatagactacgaaggtacttttgattctgatagtggtgatgaaaacaactcgaagtcattggtgatgcaaagacatgggaaacttgatgctatgatgcagtcgtggatggaccatttcgaggctgatgctgacaacaaatgctgggcgtcttttcaagaacgggtctcaagagcaccaaatcaagtgttgaggtattgtcgagaaccaaatgctaaacctctatgggccttatctttcgggtgcccgtcagatgctgatatcccatcatgtagctactgtagaggtccattatgctatgaatttcaggtaatgccacaattgctttatttctttggtgttggaaatcaaccagactcgcttgattgggcaacaattgttgtctacacatgtcaagggtcatgtgaccaaactgttagctacaaagaggaatttgcttgggttcagttgtaccctacaacaaccacgaggcggtaataatgtttacctattcctcggagtaactactgtccaattctgcaggtctattggtcgtgcagggagttttaagcatcttccgaccgtggcccaatgcttggtgctcgttacagtgcctttgatccatttaggcactatccttgggcccacgaatacgtgatggcaaatagttgcatacttccatttttgtggtgggccaccattttcggtttaattgtcatcatcacatcattaaaaagctttgttgttttttgttatctaaaaggatcattggtctcagaaggtgctcgcattcatgtaaacatttccttcatcggctaaagttttgatgttggttttgattttaaatggaacattattatgttaatattccagtggtgttttcaccccca

SEQ ID NO: 81139 - DNA, 1753 bp, Zea Mays
tttttttcaccaaaccagcgaggcagctaccgttttgtcgccatagcactcccgccgaccccctcgccgccgccgggaatggagaccagcaccaagaagcttagcagccttcgtatcacctccctggacgacgatgacgacgagaccgagatcccgcaccagccccctcaagcaggcctctccaccgctgaagcggattatgaggacgacgacgatgaggaggaagaagccgaagtgactcttggtgtccttagcaaaccgaagcacccaggcctcctcctccgccacttgttccccagcaaggccggtggcatcccggcgtggctagacccggtgaacttgccgtcgggaaagtccagctactgtggtttctgtggcgagcctctgcagttcgtcctccagatttatgcaccaattgaagataatgtagcagccttccaccgaacgctgttcatgttcatgtgcccatccatggcatgcttgcttcgagatcaacatgaacaatggaagcacaagtacgggaatccatgtagaagcgtgaagattttccggtgccaattgccacggaataatgccttctactcagctcaacctccaaagcatgatggctctgacaaaccactctgtccaggagctcctgtatgccactggtgtggtacctggaaaggtgataaaatatgtagtagctgcaagaaaagcaaggtactgttctgagaaacatcaggcactgcattggcgaactggtcataaaaatgattgcctccagataataagttctgctgcttcaaattcagttctgccagctgtaggaatagttcctgctagcatttcttggccagaatttgagataaaaatagactacgaaggtacttttgattctgatagtggtgatgaaaacaactcgaagtcattggtgatgcaaagacatgggaaacttgatgctatgatgcagtcgtggatggaccatttcgaggctgatgctgacaacaaatgctgggcgtcttttcaagaacgggtctcaagagcaccaaatcaagtgttgaggtattgtcgagaaccaaatgctaaacctctatgggccttatctttcgggtgcccgtcagatgctgatatcccatcatgtagctactgtagaggtccattatgctatgaatttcaggtaatgccacaattgctttatttctttggtgttggaaatcaaccagactcgcttgattgggcaacaattgttgtctacacatgtcaagggtcatgtgaccaaactgttagctacaaagaggaatttgcttgggttcagttgtaccctacaacaaccacgaggcgggaattgacaggaatcataggcaagtgcatacctcctttgggtactggaattttgagataggatgtggcttcaatgtttccaggtctattggtcgtgcagggagttttaagcatcttccgaccgtggcccaatgcttggtgctcgttacagtgcctttgatccatttaggcactatccttgggcccacgaatacgtgatggcaaatagttgcatacttccatttttgtggtgggccaccattttcggtttaattgtcatcatcacatcattaaaaagctttgttgttttttgttatctaaaaggatcattggtctcagaaggtgctcgcattcatgtaaacatttccttcatcggctaaagttttgatgttggttttgattttaaatggaacattattatgttaatattccagtggtgttttcaccccca

SEQ ID NO: 81140 - DNA, 720 bp, Zea Mays
tttttttcaccaaaccagcgaggcagctaccgttttgtcgccatagcactcccgccgaccccctcgccgccgccgggaatggagaccagcaccaagaagcttagcagccttcgtatcacctccctggacgacgatgacgacgagaccgagatcccgcaccagccccctcaagcaggcctctccaccgctgaagcggattatgaggacgacgacgatgaggaggaagaagccgaagtgactcttggtgtccttagcaaaccgaagcacccaggcctcctcctccgccacttgttccccagcaaggccggtggcatcccggcgtggctagacccggtgaacttgccgtcgggaaagtccagctactgtggtttctgtggcgagcctctgcagttcgtcctccagatttatgcaccaattgaagataatgtagcagccttccaccgaacgctgttcatgttcatgtgcccatccatggcatgcttgcttcgagatcaacatgaacaatggaagcacaagtacgggaatccatgtagaagcgtgaagattttccggtgccaattgccacggaataatgccttctactcagctcaacctccaaagcatgatggctctgacaaaccactctgtccaggagctcctgtatgccactggtgtggtacctggaaaggtgataaaatatggacttgtacccagcaaacaaacgttgcagtgctttgctgg

SEQ ID NO: 81141 - DNA, 2520 bp, Zea Mays
tttttttcaccaaaccagcgaggcagctaccgttttgtcgccatagcactcccgccgaccccctcgccgccgccgggaatggagaccagcaccaagaagcttagcagccttcgtatcacctccctggacgacgatgacgacgagaccgagatcccgcaccagccccctcaagcaggcctctccaccgctgaagcggattatgaggacgacgacgatgaggaggaagaagccgaagtgactcttggtgtccttagcaaaccgaagcacccaggcctcctcctccgccacttgttccccagcaaggccggtggcatcccggcgtggctagacccggtgaacttgccgtcgggaaagtccagctactgtggtttctgtggcgagcctctgcagttcgtcctccagatttatgcaccaattgaagataatgtagcagccttccaccgaacgctgttcatgttcatgtgcccatccatggcatgcttgcttcgagatcaacatgaacaatggaagcacaagtacgggaatccatgtagaagcgtgaagattttccggtgccaattgccacggaataatgccttctactcagctcaacctccaaagcatgatggctctgacaaaccactctgtccaggagctcctgtatgccactggtgtggtacctggaaaggtgataaaatatgtagtagctgcaagaaaagcaaggtactgttctgagaaacatcaggcactgcattggcgaactggtcataaaaatgattgcctccagataataagttctgctgcttcaaattcagttctgccagctgtaggaatagttcctgctagcatttcttggccagaatttgagataaaaatagactacgaaggtacttttgattctgatagtggtgatgaaaacaactcgaagtcattggtgatgcaaagacatgggaaacttgatgctatgatgcagtcgtggatggaccatttcgaggctgatgctgacaacaaatgctgggcgtcttttcaagaacgggtctcaagagcaccaaatcaagtgttgaggtattgtcgagaaccaaatgctaaacctctatgggccttatctttcgggtgcccgtcagatgctgatatcccatcatgtagctactgtagaggtccattatgctatgaatttcaggtaatgccacaattgctttatttctttggtgttggaaatcaaccagactcgcttgattgggcaacaattgttgtctacacatgtcaagggtcatgtgaccaaactgttagctacaaagaggaatttgcttgggttcagttgtaccctacaacaaccacgaggcggtaataatgtttacctattcctcggagtaactactgtccaattctgcagaaggaaattcctgcttgagccaattacagaaggccctgatatttgtcaaattgatggttgtagtgttaaattggaatacaagaggaggcaagtcaaatatggtttgtgtgacagcacgttactaacttactctactatatctgcatgagaaaggatgaaccctgtttgcatgtatactaattaatctacggattcattaatgtgtgaataagattttatttaattatgacagcaaacgtgacatgccattacaatttcgtttatgcaaaaaagtaagttgcttatagtttagcctttggtttcaatttgcactttatagaattatactggcagagctcctgacggagcacctgacggagctcgccacaggtaccaaacggcgcagcagcagttgatgtgcaacccgagtgtactgccgctcgaggaggccagtaagtgccaacaacatgaatagccaaagcagggaaatagggctggcgggggcacatgggtaacttggtcctggagcattggagaaggagcataccacaaggaaaccaacacgcttcttactctagcagagttccttgcttcctgaaggcctcatagctcagattactgggttaacgaacaactcatactttgatggagcacatgaggttcgacattatgtcaggaagcattcgaatcttggtcgtattgtgcttgaagttgctaaggactcgcaaatcccccgccaagcaaactgctagaaatcttttcagaggtggagatgatgaagatgatagtgctgatgccgacacaaatgatcctgttgtaccttggtcattaggtagagtaggagttgggcatatggtgtacatctccggtttgacttgtgccttgagttcaacaaatatgaaagtgctgagagaggtggcatctagaggacgtcatgtcgaacgtgtgaagaatttttttagaaatatgtatatttgtgcgaaactttttagaaacttgactccattttattttctatgttactctcggctttgtttcctatcctttccaatgacttgctatgcatttgcactgtatttggcatgtttaaaactgctacacaaaacttgctatatattttgtccaaaaatactatatccttgttatgattgattgatctttattttgtc

SEQ ID NO: 81142 - DNA, 1134 bp, Zea Mays
cgagggcgtccacagcatcgccatgcccccgtcgccccacccccgcgcgcgtcttcctccggcatgcgccagcccccccgagctcgcccgcgcaccaatctcgccgtcgggtatcccgcccgcgagcccgcgcaccaagctccttccccgcgacaagctccctcccccgcgacgcgtcttcctcctcgccctagatcgccgccccagctctctcctcaccccgcaatccccgccgcccatgctccgctctctactcgccccagatcgtcgcccctgttcgcgtggattgggtaccggtcccaactatctccatggattgcgcgtccgcgacaacccaatctcctcccggtctccatggaagaaggaaattcctgcttgagccaattacagaaggccctgatatttgtcaaattgatggttgtagtgttaaattggaatacaagaggaggcaagtcaaatatggtttgtgtgacagcacgttactaacttactctactatatctgcatgagaaaggatgaaccctgtttgcatgtatactaattaatctacggattcattaatgtgtgaataagattttatttaattatgacagcaaacgtgacatgccattacaatttcgtttatgcaaaaaagtaccaaacggcgcagcagcagttgatgtgcaacccgagtgtactgccgctcgaggaggccagtaagtgccaacaacatgaatagccaaagcagggaaatagggctggcgggggcacatgggtaacttggtcctggagcattggagaaggagcataccacaaggaaaccaacacgattactgggttaacgaacaactcatactttgatggagcacatgaggttcgacattatgtcaggaagcattcgaatcttggtcgtattgtgcttgaagttgctaaggactcgcaaatcccccgccaagcaaactgctagaaatcttttcagaggtggagatgatgaagatgatagtgctgatgccgacacaaatgatcctgttgtaccttggtcattaggtagagtaggagttgggcatatggtgtacatctccggtttgacttgtgccttgagttcaacaaatatggacttgtacccagcaaacaaacgttgcagtgctttgctgg

SEQ ID NO: 81143 - DNA, 2891 bp, Zea Mays
ccccgtcgccccacccccgcgcgcgtcttcctccggcatgcgccagcccccccgagctcgcccgcgcaccaatctcgccgtcgggtatcccgcccgcgagcccgcgcaccaagctccttccccgcgacaagctccctcccccgcgacgcgtcttcctcctcgccctagatcgccgccccagctctctcctcaccccgcaatccccgccgcccatgctccgctctctactcgccccagatcgtcgcccctgttcgcgtggattgggtaccggtcccaactatctccatggattgcgcgtccgcgacaacccaatctcctcccggtctccatggaaggcgcgtcctccccccgtgattctcgattccccgcgtccgcgccccagatccactctcctctctcccacaatccccacggactctgccccgtatcaccaccccggctccttagaacgtgatccactctcctctctcctgcaatccccgctacctcaacccagatcgccgccctcgctctcgatcctcgcccacgctctccatggaaggcgaggccgcgatgctcgcgtggatctatgtagaggctgcgacgctctcccaggaagactactgccagtgctccgtgctccatgcgccgcgctggaacgccaccgtgcggtccatgtcctcgtagtatcgcccagactcgcccatgtagtcccacctgcatccaccgaccaccaagcacactctcactgcagaccagagaggattgccacgaataggtgtgtgcagttctactctacccctgcatcgagccggtgtgcgtccaccagaggccggagttgaaggagagcacgtcggcgtcgcgccatgactcggcgttctcgtagatgtcgtccagcatcagcacctgcttcccctggaccacgtcgatgtccaccagggtccacggagacgagctgcgtcggcgactgcagcgcggcggcgtgcagcaggcagacgagcgactcccactggttgcgccccagcgagtcgcccacgaacatcaccgtcttccccttcatccgtgtcaggaagaccgtggcacaacgcctgatgtcacgttgtcccagcggcgccgcggccggcgtcacgccacgcggatggtcacccacgccacgtccctagaccggtgtggtacgccggcgcccacagcgtcgatgaggaggaggtcggagcagcagtagctgtcatgggcagtgccgcagatgtggagcagtcgaatgagaggctagacgggctggagcaccacagcaggctggtgtcgctgttggccggtagccgctcctcccccaccggcaccgagagggacttgtgacccaaggatctgttcccgggggatgtggtgtttgcgctcgtcgatgatctcaggctcaaccactccaaggacccataggccatggggttatgcaatccaaaggtctccatcgccaatttcattttgtagacaaataagttagctcttctgatggcataccatttatagattgccaacgatctgaaggcatatatgaaggcttgttatctcttctgtgtttaattgatcagtgactttgatttggacctggttatcagcttgttatttctatctgaattttctcgctttatttgtactacactcgtgctaattatgtgagaatgatttgtgtcactatggtgttcatctgttattttatactattatatgtattcatctgtcatgttgttgaactcctgttatcaattgcagaaggaaattcctgcttgagccaattacagaaggccctgatatttgtcaaattgatggttgtagtgttaaattggaatacaagaggaggcaagtcaaatatggtttgtgtgacagcacgttactaacttactctactatatctgcatgagaaaggatgaaccctgtttgcatgtatactaattaatctacggattcattaatgtgtgaataagattttatttaattatgacagcaaacgtgacatgccattacaatttcgtttatgcaaaaaagtaagttgcttatagtttagcctttggtttcaatttgcactttatagaattatactggcagagctcctgacggagcacctgacggagctcgccacaggtaccaaacggcgcagcagcagttgatgtgcaacccgagtgtactgccgctcgaggaggccagtaagtgccaacaacatgaatagccaaagcagggaaatagggctggcgggggcacatgggtaacttggtcctggagcattggagaaggagcataccacaaggaaaccaacacgcttcttactctagcagagttccttgcttcctgaaggcctcatagctcagattactgggttaacgaacaactcatactttgatggagcacatgaggttcgacattatgtcaggaagcattcgaatcttggtcgtattgtgcttgaagttgctaaggactcgcaaatcccccgccaagcaaactgctagaaatcttttcagaggtggagatgatgaagatgatagtgctgatgccgacacaaatgatcctgttgtaccttggtcattaggtagagtaggagttgggcatatggtgtacatctccggtttgacttgtgccttgagttcaacaaatatgaaagtgctgagagaggtggcatctagaggacgtcatgtcgaacgtgtgaagaatttttttagaaatatgtatatttgtgcgaaactttttagaaacttgactccattttattttctatgttactctcggctttgtttcctatcctttccaatgacttgctatgcatttgcactgtatttggcatgtttaaaactgctacacaaaacttgctatatattttgtccaaaaatactatatccttgttatgattgattgatctttattttgtc

SEQ ID NO: 81144 - DNA, 2813 bp, Zea Mays
cccgtcgccccacccccgcgcgcgtcttcctccggcatgcgccagcccccccgagctcgcccgcgcaccaatctcgccgtcgggtatcccgcccgcgagcccgcgcaccaagctccttccccgcgacaagctccctcccccgcgacgcgtcttcctcctcgccctagatcgccgccccagctctctcctcaccccgcaatccccgccgcccatgctccgctctctactcgccccagatcgtcgcccctgttcgcgtggattgggtaccggtcccaactatctccatggattgcgcgtccgcgacaacccaatctcctcccggtctccatggaaggcgcgtcctccccccgtgattctcgattccccgcgtccgcgccccagatccactctcctctctcccacaatccccacggactctgccccgtatcaccaccccggctccttagaacgtgatccactctcctctctcctgcaatccccgctacctcaacccagatcgccgccctcgctctcgatcctcgcccacgctctccatggaaggcgaggccgcgatgctcgcgtggatctatgtagaggctgcgacgctctcccaggaagactactgccagtgctccgtgctccatgcgccgcgctggaacgccaccgtgcggtccatgtcctcgtagtatcgcccagactcgcccatgtagtcccacctgcatccaccgaccaccaagcacactctcactgcagaccagagaggattgccacgaataggtgtgtgcagttctactctacccctgcatcgagccggtgtgcgtccaccagaggccggagttgaaggagagcacgtcggcgtcgcgccatgactcggcgttctcgtagatgtcgtccagcatcagcacctgcttcccctggaccacgtcgatgtccaccaggaacttgtacgtgtacaaagggtccacggagacgagctgcgtcggcgactgcagcgcggcggcgtgcagcaggcagacgagcgactcccactggttgcgccccagcgagtcgcccacgaacatcaccgtcttccccttcatccgtgtcaggaagaccgtggcacaacgcctgatgtcacgttgtcccagcggcgccgcggccggcgtcacgccacgcggatggtcacccacgccacgtccctagaccggtgtggtacgccggcgcccacagcgtcgatgaggaggaggtcggagcagcagtagctgtcatgggcagtgccgcagatgtggagcagtcgaatgagaggctagacgggctggagcaccacagcaggctggtgtcgctgttggccggtagccgctcctcccccaccggcaccgagagggacttgtgacccaaggatctgttcccgggggatgtggtgtttgcgctcgtcgatgatctcaggctcaaccactccaaggacccataggccatggggttatgcaatccaaaggtctccatcgccaatttcattttgtagacaaataagttagctcttctgatggcataccatttatagattgccaacgatctgaaggcatatatgaaggcttgttatctcttctgtgtttaattgatcagtgactttgatttggacctggttatcagcttgttatttctatctgaattttctcgctttatttgtactacactcgtgctaattatgtgagaatgatttgtgtcactatggtgttcatctgttattttatactattatatgtattcatctgtcatgttgttgaactcctgttatcaattgcagaaggaaattcctgcttgagccaattacagaaggccctgatatttgtcaaattgatggttgtagtgttaaattggaatacaagaggaggcaagtcaaatatggtttgtgtgacagcacgttactaacttactctactatatctgcatgagaaaggatgaaccctgtttgcatgtatactaattaatctacggattcattaatgtgtgaataagattttatttaattatgacagcaaacgtgacatgccattacaatttcgtttatgcaaaaaagtaccaaacggcgcagcagcagttgatgtgcaacccgagtgtactgccgctcgaggaggccagtaagtgccaacaacatgaatagccaaagcagggaaatagggctggcgggggcacatgggtaacttggtcctggagcattggagaaggagcataccacaaggaaaccaacacgcttcttactctagcagagttccttgcttcctgaaggcctcatagctcagattactgggttaacgaacaactcatactttgatggagcacatgaggttcgacattatgtcaggaagcattcgaatcttggtcgtattgtgcttgaagttgctaaggactcgcaaatcccccgccaagcaaactgctagaaatcttttcagaggtggagatgatgaagatgatagtgctgatgccgacacaaatgatcctgttgtaccttggtcattaggtagagtaggagttgggcatatggtgtacatctccggtttgacttgtgccttgagttcaacaaatatgaaagtgctgagagaggtggcatctagaggacgtcatgtcgaacgtgtgaagaatttttttagaaatatgtatatttgtgcgaaactttttagaaacttgactccattttattttctatgttactctcggctttgtttcctatcctttccaatgacttgctatgcatttgcactgtatttggcatgtttaaaactgctacacaaaacttgctatatattttgtccaaaaatactatatccttgttatgattgattgatctttattttgtc

SEQ ID NO: 81145 - DNA, 1748 bp, Zea Mays
cccgtcgccccacccccgcgcgcgtcttcctccggcatgcgccagcccccccgagctcgcccgcgcaccaatctcgccgtcgggtatcccgcccgcgagcccgcgcaccaagctccttccccgcgacaagctccctcccccgcgacgcgtcttcctcctcgccctagatcgccgccccagctctctcctcaccccgcaatccccgccgcccatgctccgctctctactcgccccagatcgtcgcccctgttcgcgtggattgggtaccggtcccaactatctccatggattgcgcgtccgcgacaacccaatctcctcccggtctccatggaaggcgcgtcctccccccgtgattctcgattccccgcgtccgcgccccagatccactctcctctctcccacaatccccacggactctgccccgtatcaccaccccggctccttagaacgtgatccactctcctctctcctgcaatccccgctacctcaacccagatcgccgccctcgctctcgatcctcgcccacgctctccatggaaggcgaggccgcgatgctcgcgtggatctatgtagaggctgcgacgctctcccaggaagactactgccagtgctccgtgctccatgcgccgcgctggaacgccaccgtgcggtccatgtcctcgtagtatcgcccagactcgcccatgtagtcccacctgcatccaccgaccaccaagcacactctcactgcagaccagagaggattgccacgaataggtgtgtgcagttctactctacccctgcatcgagccggtgtgcgtccaccagaggccggagttgaaggagagcacgtcggcgtcgcgccatgactcggcgttctcgtagatgtcgtccagcatcagcacctgcttcccctggaccacgtcgatgtccaccagaaggaaattcctgcttgagccaattacagaaggccctgatatttgtcaaattgatggttgtagtgttaaattggaatacaagaggaggcaagtcaaatatggtaccaaacggcgcagcagcagttgatgtgcaacccgagtgtactgccgctcgaggaggccagtaagtgccaacaacatgaatagccaaagcagggaaatagggctggcgggggcacatgggtaacttggtcctggagcattggagaaggagcataccacaaggaaaccaacacgattactgggttaacgaacaactcatactttgatggagcacatgaggttcgacattatgtcaggaagcattcgaatcttggtcgtattgtgcttgaagttgctaaggactcgcaaatcccccgccaagcaaactgctagaaatcttttcagaggtggagatgatgaagatgatagtgctgatgccgacacaaatgatcctgttgtaccttggtcattaggtagagtaggagttgggcatatggtgtacatctccggtttgacttgtgccttgagttcaacaaatatgaaagtgctgagagaggtggcatctagaggacgtcatgtcgaacgtgtgaagaatttttttagaaatatgtatatttgtgcgaaactttttagaaacttgactccattttattttctatgttactctcggctttgtttcctatcctttccaatgacttgctatgcatttgcactgtatttggcatgtttaaaactgctacacaaaacttgctatatattttgtccaaaaatactatatccttgttatgattgattgatctttattttgtc

SEQ ID NO: 81146 - DNA, 1845 bp, Zea Mays
cgtcgccccacccccgcgcgcgtcttcctccggcatgcgccagcccccccgagctcgcccgcgcaccaatctcgccgtcgggtatcccgcccgcgagcccgcgcaccaagctccttccccgcgacaagctccctcccccgcgacgcgtcttcctcctcgccctagatcgccgccccagctctctcctcaccccgcaatccccgccgcccatgctccgctctctactcgccccagatcgtcgcccctgttcgcgtggattgggtaccggtcccaactatctccatggattgcgcgtccgcgacaacccaatctcctcccggtctccatggaaggcgcgtcctccccccgtgattctcgattccccgcgtccgcgccccagatccactctcctctctcccacaatccccacggactctgccccgtatcaccaccccggctccttagaacgtgatccactctcctctctcctgcaatccccgctacctcaacccagatcgccgccctcgctctcgatcctcgcccacgctctccatggaaggcgaggccgcgatgctcgcgtggatctatgtagaggctgcgacgctctcccaggaagactactgccagtgctccgtgctccatgcgccgcgctggaacgccaccgtgcggtccatgtcctcgtagtatcgcccagactcgcccatgtagtcccacctgcatccaccgaccaccaagcacactctcactgcagaccagagaggattgccacgaataggtgtgtgcagttctactctacccctgcatcgagccggtgtgcgtccaccagaggccggagttgaaggagagcacgtcggcgtcgcgccatgactcggcgttctcgtagatgtcgtccagcatcagcacctgcttcccctggaccacgtcgatgtccaccagaaggaaattcctgcttgagccaattacagaaggccctgatatttgtcaaattgatggttgtagtgttaaattggaatacaagaggaggcaagtcaaatatgaattatactggcagagctcctgacggagcacctgacggagctcgccacaggtaccaaacggcgcagcagcagttgatgtgcaacccgagtgtactgccgctcgaggaggccagtaagtgccaacaacatgaatagccaaagcagggaaatagggctggcgggggcacatgggtaacttggtcctggagcattggagaaggagcataccacaaggaaaccaacacgcttcttactctagcagagttccttgcttcctgaaggcctcatagctcagattactgggttaacgaacaactcatactttgatggagcacatgaggttcgacattatgtcaggaagcattcgaatcttggtcgtattgtgcttgaagttgctaaggactcgcaaatcccccgccaagcaaactgctagaaatcttttcagaggtggagatgatgaagatgatagtgctgatgccgacacaaatgatcctgttgtaccttggtcattaggtagagtaggagttgggcatatggtgtacatctccggtttgacttgtgccttgagttcaacaaatatgaaagtgctgagagaggtggcatctagaggacgtcatgtcgaacgtgtgaagaatttttttagaaatatgtatatttgtgcgaaactttttagaaacttgactccattttattttctatgttactctcggctttgtttcctatcctttccaatgacttgctatgcatttgcactgtatttggcatgtttaaaactgctacacaaaacttgctatatattttgtccaaaaatactatatccttgttatgattgattgatctttattttgtc

SEQ ID NO: 81147 - DNA, 2859 bp, Zea Mays
cgtcgccccacccccgcgcgcgtcttcctccggcatgcgccagcccccccgagctcgcccgcgcaccaatctcgccgtcgggtatcccgcccgcgagcccgcgcaccaagctccttccccgcgacaagctccctcccccgcgacgcgtcttcctcctcgccctagatcgccgccccagctctctcctcaccccgcaatccccgccgcccatgctccgctctctactcgccccagatcgtcgcccctgttcgcgtggattgggtaccggtcccaactatctccatggattgcgcgtccgcgacaacccaatctcctcccggtctccatggaaggcgcgtcctccccccgtgattctcgattccccgcgtccgcgccccagatccactctcctctctcccacaatccccacggactctgccccgtatcaccaccccggctccttagaacgtgatccactctcctctctcctgcaatccccgctacctcaacccagatcgccgccctcgctctcgatcctcgcccacgctctccatggaaggcgaggccgcgatgctcgcgtggatctatgtagaggctgcgacgctctcccaggaagactactgccagtgctccgtgctccatgcgccgcgctggaacgccaccgtgcggtccatgtcctcgtagtatcgcccagactcgcccatgtagtcccacctgcatccaccgaccaccaagcacactctcactgcagaccagagaggattgccacgaataggtgtgtgcagttctactctacccctgcatcgagccggtgtgcgtccaccagaggccggagttgaaggagagcacgtcggcgtcgcgccatgactcggcgttctcgtagatgtcgtccagcatcagcacctgcttcccctggaccacgtcgatgtccaccaggaacttgtacgtgtacaaagggtccacggagacgagctgcgtcggcgactgcagcgcggcggcgtgcagcaggcagacgagcgactcccactggttgcgccccagcgagtcgcccacgaacatcaccgtcttccccttcatccgtgtcaggaagaccgtggcacaacgcctgatgtcacgttgtcccagcggcgccgcggccggcgtcacgccacgcggatggtcacccacgccacgtccctagaccggtgtggtacgccggcgcccacagcgtcgatgaggaggaggtcggagcagcagtagctgtcatgggcagtgccgcagatgtggagcagtcgaatgagaggctagacgggctggagcaccacagcaggctggtgtcgctgttggccggtagccgctcctcccccaccggcaccgagagggacttgtgacccaaggatctgttcccgggggatgtggtgtttgcgctcgtcgatgatctcaggctcaaccactccaaggacccataggccatggggttatgcaatccaaaggtctccatcgccaatttcattttgtagacaaataagttagctcttctgatggcataccatttatagattgccaacgatctgaaggcatatatgaaggcttgttatctcttctgtgtttaattgatcagtgactttgatttggacctggttatcagcttgttatttctatctgaattttctcgctttatttgtactacactcgtgctaattatgtgagaatgatttgtgtcactatggtgttcatctgttattttatactattatatgtattcatctgtcatgttgttgaactcctgttatcaattgcagaaggaaattcctgcttgagccaattacagaaggccctgatatttgtcaaattgatggttgtagtgttaaattggaatacaagaggaggcaagtcaaatatggtttgtgtgacagcacgttactaacttactctactatatctgcatgagaaaggatgaaccctgtttgcatgtatactaattaatctacggattcattaatgtgtgaataagattttatttaattatgacagcaaacgtgacatgccattacaatttcgtttatgcaaaaaagtaagttgcttatagtttagcctttggtttcaatttgcactttatagaattatactggcagagctcctgacggagcacctgacggagctcgccacaggtaccaaacggcgcagcagcagttgatgtgcaacccgagtgtactgccgctcgaggaggccagtaagtgccaacaacatgaatagccaaagcagggaaatagggctggcgggggcacatgggtaacttggtcctggagcattggagaaggagcataccacaaggaaaccaacacgattactgggttaacgaacaactcatactttgatggagcacatgaggttcgacattatgtcaggaagcattcgaatcttggtcgtattgtgcttgaagttgctaaggactcgcaaatcccccgccaagcaaactgctagaaatcttttcagaggtggagatgatgaagatgatagtgctgatgccgacacaaatgatcctgttgtaccttggtcattaggtagagtaggagttgggcatatggtgtacatctccggtttgacttgtgccttgagttcaacaaatatgaaagtgctgagagaggtggcatctagaggacgtcatgtcgaacgtgtgaagaatttttttagaaatatgtatatttgtgcgaaactttttagaaacttgactccattttattttctatgttactctcggctttgtttcctatcctttccaatgacttgctatgcatttgcactgtatttggcatgtttaaaactgctacacaaaacttgctatatattttgtccaaaaatactatatccttgttatgattgattgatctttattttgtc

SEQ ID NO: 81148 - DNA, 1819 bp, Zea Mays
cgtcgccccacccccgcgcgcgtcttcctccggcatgcgccagcccccccgagctcgcccgcgcaccaatctcgccgtcgggtatcccgcccgcgagcccgcgcaccaagctccttccccgcgacaagctccctcccccgcgacgcgtcttcctcctcgccctagatcgccgccccagctctctcctcaccccgcaatccccgccgcccatgctccgctctctactcgccccagatcgtcgcccctgttcgcgtggattgggtaccggtcccaactatctccatggattgcgcgtccgcgacaacccaatctcctcccggtctccatggaaggcgcgtcctccccccgtgattctcgattccccgcgtccgcgccccagatccactctcctctctcccacaatccccacggactctgccccgtatcaccaccccggctccttagaacgtgatccactctcctctctcctgcaatccccgctacctcaacccagatcgccgccctcgctctcgatcctcgcccacgctctccatggaaggcgaggccgcgatgctcgcgtggatctatgtagaggctgcgacgctctcccaggaagactactgccagtgctccgtgctccatgcgccgcgctggaacgccaccgtgcggtccatgtcctcgtagtatcgcccagactcgcccatgtagtcccacctgcatccaccgaccaccaagcacactctcactgcagaccagagaggattgccacgaataggtgtgtgcagttctactctacccctgcatcgagccggtgtgcgtccaccagaggccggagttgaaggagagcacgtcggcgtcgcgccatgactcggcgttctcgtagatgtcgtccagcatcagcacctgcttcccctggaccacgtcgatgtccaccagaaggaaattcctgcttgagccaattacagaaggccctgatatttgtcaaattgatggttgtagtgttaaattggaatacaagaggaggcaagtcaaatatgcaaacgtgacatgccattacaatttcgtttatgcaaaaaagtaccaaacggcgcagcagcagttgatgtgcaacccgagtgtactgccgctcgaggaggccagtaagtgccaacaacatgaatagccaaagcagggaaatagggctggcgggggcacatgggtaacttggtcctggagcattggagaaggagcataccacaaggaaaccaacacgagttccttgcttcctgaaggcctcatagctcagattactgggttaacgaacaactcatactttgatggagcacatgaggttcgacattatgtcaggaagcattcgaatcttggtcgtattgtgcttgaagttgctaaggactcgcaaatcccccgccaagcaaactgctagaaatcttttcagaggtggagatgatgaagatgatagtgctgatgccgacacaaatgatcctgttgtaccttggtcattaggtagagtaggagttgggcatatggtgtacatctccggtttgacttgtgccttgagttcaacaaatatgaaagtgctgagagaggtggcatctagaggacgtcatgtcgaacgtgtgaagaatttttttagaaatatgtatatttgtgcgaaactttttagaaacttgactccattttattttctatgttactctcggctttgtttcctatcctttccaatgacttgctatgcatttgcactgtatttggcatgtttaaaactgctacacaaaacttgctatatattttgtccaaaaatactatatccttgttatgattgattgatctttattttgtc

SEQ ID NO: 81149 - DNA, 2549 bp, Zea Mays
gtcgccccacccccgcgcgcgtcttcctccggcatgcgccagcccccccgagctcgcccgcgcaccaatctcgccgtcgggtatcccgcccgcgagcccgcgcaccaagctccttccccgcgacaagctccctcccccgcgacgcgtcttcctcctcgccctagatcgccgccccagctctctcctcaccccgcaatccccgccgcccatgctccgctctctactcgccccagatcgtcgcccctgttcgcgtggattgggtaccggtcccaactatctccatggattgcgcgtccgcgacaacccaatctcctcccggtctccatggaaggcgcgtcctccccccgtgattctcgattccccgcgtccgcgccccagatccactctcctctctcccacaatccccacggactctgccccgtatcaccaccccggctccttagaacgtgatccactctcctctctcctgcaatccccgctacctcaacccagatcgccgccctcgctctcgatcctcgcccacgctctccatggaaggcgaggccgcgatgctcgcgtggatctatgtagaggctgcgacgctctcccaggaagactactgccagtgctccgtgctccatgcgccgcgctggaacgccaccgtgcggtccatgtcctcgtagtatcgcccagactcgcccatgtagtcccacctgcatccaccgaccaccaagcacactctcactgcagaccagagaggattgccacgaataggtgtgtgcagttctactctacccctgcatcgagccggtgtgcgtccaccagaggccggagttgaaggagagcacgtcggcgtcgcgccatgactcggcgttctcgtagatgtcgtccagcatcagcacctgcttcccctggaccacgtcgatgtccaccaggaacttgtacgtgtacaaagggtccacggagacgagctgcgtcggcgactgcagcgcggcggcgtgcagcaggcagacgagcgactcccactggttgcgccccagcgagtcgcccacgaacatcaccgtcttccccttcatccgtgtcaggaagaccgtggcacaacgcctgatgtcacgttgtcccagcggcgccgcggccggcgtcacgccacgcggatggtcacccacgccacgtccctagaccggtgtggtacgccggcgcccacagcgtcgatgaggaggaggtcggagcagcagtagctgtcatgggcagtgccgcagatgtggagcagtcgaatgagaggctagacgggctggagcaccacagcaggctggtgtcgctgttggccggtagccgctcctcccccaccggcaccgagagggacttgtgacccaaggatctgttcccgggggatgtggtgtttgcgctcgtcgatgatctcaggctcaaccactccaaggacccataggccatggggttatgcaatccaaagaaggaaattcctgcttgagccaattacagaaggccctgatatttgtcaaattgatggttgtagtgttaaattggaatacaagaggaggcaagtcaaatatggtttgtgtgacagcacgttactaacttactctactatatctgcatgagaaaggatgaaccctgtttgcatgtatactaattaatctacggattcattaatgtgtgaataagattttatttaattatgacagcaaacgtgacatgccattacaatttcgtttatgcaaaaaagtaagttgcttatagtttagcctttggtttcaatttgcactttatagaattatactggcagagctcctgacggagcacctgacggagctcgccacaggtaccaaacggcgcagcagcagttgatgtgcaacccgagtgtactgccgctcgaggaggccagtaagtgccaacaacatgaatagccaaagcagggaaatagggctggcgggggcacatgggtaacttggtcctggagcattggagaaggagcataccacaaggaaaccaacacgattactgggttaacgaacaactcatactttgatggagcacatgaggttcgacattatgtcaggaagcattcgaatcttggtcgtattgtgcttgaagttgctaaggactcgcaaatcccccgccaagcaaactgctagaaatcttttcagaggtggagatgatgaagatgatagtgctgatgccgacacaaatgatcctgttgtaccttggtcattaggtagagtaggagttgggcatatggtgtacatctccggtttgacttgtgccttgagttcaacaaatatgaaagtgctgagagaggtggcatctagaggacgtcatgtcgaacgtgtgaagaatttttttagaaatatgtatatttgtgcgaaactttttagaaacttgactccattttattttctatgttactctcggctttgtttcctatcctttccaatgacttgctatgcatttgcactgtatttggcatgtttaaaactgctacacaaaacttgctatatattttgtccaaaaatactatatccttgttatgattgattgatctttattttgtc

SEQ ID NO: 81150 - DNA, 2790 bp, Zea Mays
ccccacccccgcgcgcgtcttcctccggcatgcgccagcccccccgagctcgcccgcgcaccaatctcgccgtcgggtatcccgcccgcgagcccgcgcaccaagctccttccccgcgacaagctccctcccccgcgacgcgtcttcctcctcgccctagatcgccgccccagctctctcctcaccccgcaatccccgccgcccatgctccgctctctactcgccccagatcgtcgcccctgttcgcgtggattgggtaccggtcccaactatctccatggattgcgcgtccgcgacaacccaatctcctcccggtctccatggaaggcgcgtcctccccccgtgattctcgattccccgcgtccgcgccccagatccactctcctctctcccacaatccccacggactctgccccgtatcaccaccccggctccttagaacgtgatccactctcctctctcctgcaatccccgctacctcaacccagatcgccgccctcgctctcgatcctcgcccacgctctccatggaaggcgaggccgcgatgctcgcgtggatctatgtagaggctgcgacgctctcccaggaagactactgccagtgctccgtgctccatgcgccgcgctggaacgccaccgtgcggtccatgtcctcgtagtatcgcccagactcgcccatgtagtcccacctgcatccaccgaccaccaagcacactctcactgcagaccagagaggattgccacgaataggtgtgtgcagttctactctacccctgcatcgagccggtgtgcgtccaccagaggccggagttgaaggagagcacgtcggcgtcgcgccatgactcggcgttctcgtagatgtcgtccagcatcagcacctgcttcccctggaccacgtcgatgtccaccaggaacttgtacgtgtacaaagggtccacggagacgagctgcgtcggcgactgcagcgcggcggcgtgcagcaggcagacgagcgactcccactggttgcgccccagcgagtcgcccacgaacatcaccgtcttccccttcatccgtgtcaggaagaccgtggcacaacgcctgatgtcacgttgtcccagcggcgccgcggccggcgtcacgccacgcggatggtcacccacgccacgtccctagaccggtgtggtacgccggcgcccacagcgtcgatgaggaggaggtcggagcagcagtagctgtcatgggcagtgccgcagatgtggagcagtcgaatgagaggctagacgggctggagcaccacagcaggctggtgtcgctgttggccggtagccgctcctcccccaccggcaccgagagggacttgtgacccaaggatctgttcccgggggatgtggtgtttgcgctcgtcgatgatctcaggctcaaccactccaaggacccataggccatggggttatgcaatccaaaggtctccatcgccaatttcattttgtagacaaataagttagctcttctgatggcataccatttatagattgccaacgatctgaaggcatatatgaaggcttgttatctcttctgtgtttaattgatcagtgactttgatttggacctggttatcagcttgttatttctatctgaattttctcgctttatttgtactacactcgtgctaattatgtgagaatgatttgtgtcactatggtgttcatctgttattttatactattatatgtattcatctgtcatgttgttgaactcctgttatcaattgcagaaggaaattcctgcttgagccaattacagaaggccctgatatttgtcaaattgatggttgtagtgttaaattggaatacaagaggaggcaagtcaaatatggtttgtgtgacagcacgttactaacttactctactatatctgcatgagaaaggatgaaccctgtttgcatgtatactaattaatctacggattcattaatgtgtgaataagattttatttaattatgacagcaaacgtgacatgccattacaatttcgtttatgcaaaaaagtaccaaacggcgcagcagcagttgatgtgcaacccgagtgtactgccgctcgaggaggccagtaagtgccaacaacatgaatagccaaagcagggaaatagggctggcgggggcacatgggtaacttggtcctggagcattggagaaggagcataccacaaggaaaccaacacgagttccttgcttcctgaaggcctcatagctcagattactgggttaacgaacaactcatactttgatggagcacatgaggttcgacattatgtcaggaagcattcgaatcttggtcgtattgtgcttgaagttgctaaggactcgcaaatcccccgccaagcaaactgctagaaatcttttcagaggtggagatgatgaagatgatagtgctgatgccgacacaaatgatcctgttgtaccttggtcattaggtagagtaggagttgggcatatggtgtacatctccggtttgacttgtgccttgagttcaacaaatatgaaagtgctgagagaggtggcatctagaggacgtcatgtcgaacgtgtgaagaatttttttagaaatatgtatatttgtgcgaaactttttagaaacttgactccattttattttctatgttactctcggctttgtttcctatcctttccaatgacttgctatgcatttgcactgtatttggcatgtttaaaactgctacacaaaacttgctatatattttgtccaaaaatactatatccttgttatgattgattgatctttattttgtc

SEQ ID NO: 81151 - DNA, 2571 bp, Zea Mays
cccacccccgcgcgcgtcttcctccggcatgcgccagcccccccgagctcgcccgcgcaccaatctcgccgtcgggtatcccgcccgcgagcccgcgcaccaagctccttccccgcgacaagctccctcccccgcgacgcgtcttcctcctcgccctagatcgccgccccagctctctcctcaccccgcaatccccgccgcccatgctccgctctctactcgccccagatcgtcgcccctgttcgcgtggattgggtaccggtcccaactatctccatggattgcgcgtccgcgacaacccaatctcctcccggtctccatggaaggcgcgtcctccccccgtgattctcgattccccgcgtccgcgccccagatccactctcctctctcccacaatccccacggactctgccccgtatcaccaccccggctccttagaacgtgatccactctcctctctcctgcaatccccgctacctcaacccagatcgccgccctcgctctcgatcctcgcccacgctctccatggaaggcgaggccgcgatgctcgcgtggatctatgtagaggctgcgacgctctcccaggaagactactgccagtgctccgtgctccatgcgccgcgctggaacgccaccgtgcggtccatgtcctcgtagtatcgcccagactcgcccatgtagtcccacctgcatccaccgaccaccaagcacactctcactgcagaccagagaggattgccacgaataggtgtgtgcagttctactctacccctgcatcgagccggtgtgcgtccaccagaggccggagttgaaggagagcacgtcggcgtcgcgccatgactcggcgttctcgtagatgtcgtccagcatcagcacctgcttcccctggaccacgtcgatgtccaccaggaacttgtacgtgtacaaagggtccacggagacgagctgcgtcggcgactgcagcgcggcggcgtgcagcaggcagacgagcgactcccactggttgcgccccagcgagtcgcccacgaacatcaccgtcttccccttcatccgtgtcaggaagaccgtggcacaacgcctgatgtcacgttgtcccagcggcgccgcggccggcgtcacgccacgcggatggtcacccacgccacgtccctagaccggtgtggtacgccggcgcccacagcgtcgatgaggaggaggtcggagcagcagtagctgtcatgggcagtgccgcagatgtggagcagtcgaatgagaggctagacgggctggagcaccacagcaggctggtgtcgctgttggccggtagccgctcctcccccaccggcaccgagagggacttgtgacccaaggatctgttcccgggggatgtggtgtttgcgctcgtcgatgatctcaggctcaaccactccaaggacccataggccatggggttatgcaatccaaaggtctccatcgccaatttcattttgtagacaaataagttagctcttctgatggcataccatttatagattgccaacgatctgaaggcatatatgaaggcttgttatctcttctgtgtttaattgatcagtgactttgatttggacctggttatcagcttgttatttctatctgaattttctcgctttatttgtactacactcgtgctaattatgtgagaatgatttgtgtcactatggtgttcatctgttattttatactattatatgtattcatctgtcatgttgttgaactcctgttatcaattgcagaaggaaattcctgcttgagccaattacagaaggccctgatatttgtcaaattgatggttgtagtgttaaattggaatacaagaggaggtaccaaacggcgcagcagcagttgatgtgcaacccgagtgtactgccgctcgaggaggccagtaagtgccaacaacatgaatagccaaagcagggaaatagggctggcgggggcacatgggtaacttggtcctggagcattggagaaggagcataccacaaggaaaccaacacgattactgggttaacgaacaactcatactttgatggagcacatgaggttcgacattatgtcaggaagcattcgaatcttggtcgtattgtgcttgaagttgctaaggactcgcaaatcccccgccaagcaaactgctagaaatcttttcagaggtggagatgatgaagatgatagtgctgatgccgacacaaatgatcctgttgtaccttggtcattaggtagagtaggagttgggcatatggtgtacatctccggtttgacttgtgccttgagttcaacaaatatgaaagtgctgagagaggtggcatctagaggacgtcatgtcgaacgtgtgaagaatttttttagaaatatgtatatttgtgcgaaactttttagaaacttgactccattttattttctatgttactctcggctttgtttcctatcctttccaatgacttgctatgcatttgcactgtatttggcatgtttaaaactgctacacaaaacttgctatatattttgtccaaaaatactatatccttgttatgattgattgatctttattttgtc

SEQ ID NO: 81152 - DNA, 1772 bp, Zea Mays
ccacccccgcgcgcgtcttcctccggcatgcgccagcccccccgagctcgcccgcgcaccaatctcgccgtcgggtatcccgcccgcgagcccgcgcaccaagctccttccccgcgacaagctccctcccccgcgacgcgtcttcctcctcgccctagatcgccgccccagctctctcctcaccccgcaatccccgccgcccatgctccgctctctactcgccccagatcgtcgcccctgttcgcgtggattgggtaccggtcccaactatctccatggattgcgcgtccgcgacaacccaatctcctcccggtctccatggaaggcgcgtcctccccccgtgattctcgattccccgcgtccgcgccccagatccactctcctctctcccacaatccccacggactctgccccgtatcaccaccccggctccttagaacgtgatccactctcctctctcctgcaatccccgctacctcaacccagatcgccgccctcgctctcgatcctcgcccacgctctccatggaaggcgaggccgcgatgctcgcgtggatctatgtagaggctgcgacgctctcccaggaagactactgccagtgctccgtgctccatgcgccgcgctggaacgccaccgtgcggtccatgtcctcgtagtatcgcccagactcgcccatgtagtcccacctgcatccaccgaccaccaagcacactctcactgcagaccagagaggattgccacgaataggtgtgtgcagttctactctacccctgcatcgagccggtgtgcgtccaccagaggccggagttgaaggagagcacgtcggcgtcgcgccatgactcggcgttctcgtagatgtcgtccagcatcagcacctgcttcccctggaccacgtcgatgtccaccagaaggaaattcctgcttgagccaattacagaaggccctgatatttgtcaaattgatggttgtagtgttaaattggaatacaagaggaggcaagtcaaatatggtaccaaacggcgcagcagcagttgatgtgcaacccgagtgtactgccgctcgaggaggccagtaagtgccaacaacatgaatagccaaagcagggaaatagggctggcgggggcacatgggtaacttggtcctggagcattggagaaggagcataccacaaggaaaccaacacgagttccttgcttcctgaaggcctcatagctcagattactgggttaacgaacaactcatactttgatggagcacatgaggttcgacattatgtcaggaagcattcgaatcttggtcgtattgtgcttgaagttgctaaggactcgcaaatcccccgccaagcaaactgctagaaatcttttcagaggtggagatgatgaagatgatagtgctgatgccgacacaaatgatcctgttgtaccttggtcattaggtagagtaggagttgggcatatggtgtacatctccggtttgacttgtgccttgagttcaacaaatatgaaagtgctgagagaggtggcatctagaggacgtcatgtcgaacgtgtgaagaatttttttagaaatatgtatatttgtgcgaaactttttagaaacttgactccattttattttctatgttactctcggctttgtttcctatcctttccaatgacttgctatgcatttgcactgtatttggcatgtttaaaactgctacacaaaacttgctatatattttgtccaaaaatactatatccttgttatgattgattgatctttattttgtc

SEQ ID NO: 81153 - DNA, 2865 bp, Zea Mays
ccacccccgcgcgcgtcttcctccggcatgcgccagcccccccgagctcgcccgcgcaccaatctcgccgtcgggtatcccgcccgcgagcccgcgcaccaagctccttccccgcgacaagctccctcccccgcgacgcgtcttcctcctcgccctagatcgccgccccagctctctcctcaccccgcaatccccgccgcccatgctccgctctctactcgccccagatcgtcgcccctgttcgcgtggattgggtaccggtcccaactatctccatggattgcgcgtccgcgacaacccaatctcctcccggtctccatggaaggcgcgtcctccccccgtgattctcgattccccgcgtccgcgccccagatccactctcctctctcccacaatccccacggactctgccccgtatcaccaccccggctccttagaacgtgatccactctcctctctcctgcaatccccgctacctcaacccagatcgccgccctcgctctcgatcctcgcccacgctctccatggaaggcgaggccgcgatgctcgcgtggatctatgtagaggctgcgacgctctcccaggaagactactgccagtgctccgtgctccatgcgccgcgctggaacgccaccgtgcggtccatgtcctcgtagtatcgcccagactcgcccatgtagtcccacctgcatccaccgaccaccaagcacactctcactgcagaccagagaggattgccacgaataggtgtgtgcagttctactctacccctgcatcgagccggtgtgcgtccaccagaggccggagttgaaggagagcacgtcggcgtcgcgccatgactcggcgttctcgtagatgtcgtccagcatcagcacctgcttcccctggaccacgtcgatgtccaccagggtccacggagacgagctgcgtcggcgactgcagcgcggcggcgtgcagcaggcagacgagcgactcccactggttgcgccccagcgagtcgcccacgaacatcaccgtcttccccttcatccgtgtcaggaagaccgtggcacaacgcctgatgtcacgttgtcccagcggcgccgcggccggcgtcacgccacgcggatggtcacccacgccacgtccctagaccggtgtggtacgccggcgcccacagcgtcgatgaggaggaggtcggagcagcagtagctgtcatgggcagtgccgcagatgtggagcagtcgaatgagaggctagacgggctggagcaccacagcaggctggtgtcgctgttggccggtagccgctcctcccccaccggcaccgagagggacttgtgacccaaggatctgttcccgggggatgtggtgtttgcgctcgtcgatgatctcaggctcaaccactccaaggacccataggccatggggttatgcaatccaaaggtctccatcgccaatttcattttgtagacaaataagttagctcttctgatggcataccatttatagattgccaacgatctgaaggcatatatgaaggcttgttatctcttctgtgtttaattgatcagtgactttgatttggacctggttatcagcttgttatttctatctgaattttctcgctttatttgtactacactcgtgctaattatgtgagaatgatttgtgtcactatggtgttcatctgttattttatactattatatgtattcatctgtcatgttgttgaactcctgttatcaattgcagaaggaaattcctgcttgagccaattacagaaggccctgatatttgtcaaattgatggttgtagtgttaaattggaatacaagaggaggcaagtcaaatatggtttgtgtgacagcacgttactaacttactctactatatctgcatgagaaaggatgaaccctgtttgcatgtatactaattaatctacggattcattaatgtgtgaataagattttatttaattatgacagcaaacgtgacatgccattacaatttcgtttatgcaaaaaagtaagttgcttatagtttagcctttggtttcaatttgcactttatagaattatactggcagagctcctgacggagcacctgacggagctcgccacaggtaccaaacggcgcagcagcagttgatgtgcaacccgagtgtactgccgctcgaggaggccagtaagtgccaacaacatgaatagccaaagcagggaaatagggctggcgggggcacatgggtaacttggtcctggagcattggagaaggagcataccacaaggaaaccaacacgagttccttgcttcctgaaggcctcatagctcagattactgggttaacgaacaactcatactttgatggagcacatgaggttcgacattatgtcaggaagcattcgaatcttggtcgtattgtgcttgaagttgctaaggactcgcaaatcccccgccaagcaaactgctagaaatcttttcagaggtggagatgatgaagatgatagtgctgatgccgacacaaatgatcctgttgtaccttggtcattaggtagagtaggagttgggcatatggtgtacatctccggtttgacttgtgccttgagttcaacaaatatgaaagtgctgagagaggtggcatctagaggacgtcatgtcgaacgtgtgaagaatttttttagaaatatgtatatttgtgcgaaactttttagaaacttgactccattttattttctatgttactctcggctttgtttcctatcctttccaatgacttgctatgcatttgcactgtatttggcatgtttaaaactgctacacaaaacttgctatatattttgtccaaaaatactatatccttgttatgattgattgatctttattttgtc

SEQ ID NO: 81154 - DNA, 2613 bp, Zea Mays
ccccgcgcgcgtcttcctccggcatgcgccagcccccccgagctcgcccgcgcaccaatctcgccgtcgggtatcccgcccgcgagcccgcgcaccaagctccttccccgcgacaagctccctcccccgcgacgcgtcttcctcctcgccctagatcgccgccccagctctctcctcaccccgcaatccccgccgcccatgctccgctctctactcgccccagatcgtcgcccctgttcgcgtggattgggtaccggtcccaactatctccatggattgcgcgtccgcgacaacccaatctcctcccggtctccatggaaggcgcgtcctccccccgtgattctcgattccccgcgtccgcgccccagatccactctcctctctcccacaatccccacggactctgccccgtatcaccaccccggctccttagaacgtgatccactctcctctctcctgcaatccccgctacctcaacccagatcgccgccctcgctctcgatcctcgcccacgctctccatggaaggcgaggccgcgatgctcgcgtggatctatgtagaggctgcgacgctctcccaggaagactactgccagtgctccgtgctccatgcgccgcgctggaacgccaccgtgcggtccatgtcctcgtagtatcgcccagactcgcccatgtagtcccacctgcatccaccgaccaccaagcacactctcactgcagaccagagaggattgccacgaataggtgtgtgcagttctactctacccctgcatcgagccggtgtgcgtccaccagaggccggagttgaaggagagcacgtcggcgtcgcgccatgactcggcgttctcgtagatgtcgtccagcatcagcacctgcttcccctggaccacgtcgatgtccaccaggaacttgtacgtgtacaaagggtccacggagacgagctgcgtcggcgactgcagcgcggcggcgtgcagcaggcagacgagcgactcccactggttgcgccccagcgagtcgcccacgaacatcaccgtcttccccttcatccgtgtcaggaagaccgtggcacaacgcctgatgtcacgttgtcccagcggcgccgcggccggcgtcacgccacgcggatggtcacccacgccacgtccctagaccggtgtggtacgccggcgcccacagcgtcgatgaggaggaggtcggagcagcagtagctgtcatgggcagtgccgcagatgtggagcagtcgaatgagaggctagacgggctggagcaccacagcaggctggtgtcgctgttggccggtagccgctcctcccccaccggcaccgagagggacttgtgacccaaggatctgttcccgggggatgtggtgtttgcgctcgtcgatgatctcaggctcaaccactccaaggacccataggccatggggttatgcaatccaaaggtctccatcgccaatttcattttgtagacaaataagttagctcttctgatggcataccatttatagattgccaacgatctgaaggcatatatgaaggcttgttatctcttctgtgtttaattgatcagtgactttgatttggacctggttatcagcttgttatttctatctgaattttctcgctttatttgtactacactcgtgctaattatgtgagaatgatttgtgtcactatggtgttcatctgttattttatactattatatgtattcatctgtcatgttgttgaactcctgttatcaattgcagaaggaaattcctgcttgagccaattacagaaggccctgatatttgtcaaattgatggttgtagtgttaaattggaatacaagaggaggcaagtcaaatatggtaccaaacggcgcagcagcagttgatgtgcaacccgagtgtactgccgctcgaggaggccagtaagtgccaacaacatgaatagccaaagcagggaaatagggctggcgggggcacatgggtaacttggtcctggagcattggagaaggagcataccacaaggaaaccaacacgagttccttgcttcctgaaggcctcatagctcagattactgggttaacgaacaactcatactttgatggagcacatgaggttcgacattatgtcaggaagcattcgaatcttggtcgtattgtgcttgaagttgctaaggactcgcaaatcccccgccaagcaaactgctagaaatcttttcagaggtggagatgatgaagatgatagtgctgatgccgacacaaatgatcctgttgtaccttggtcattaggtagagtaggagttgggcatatggtgtacatctccggtttgacttgtgccttgagttcaacaaatatgaaagtgctgagagaggtggcatctagaggacgtcatgtcgaacgtgtgaagaatttttttagaaatatgtatatttgtgcgaaactttttagaaacttgactccattttattttctatgttactctcggctttgtttcctatcctttccaatgacttgctatgcatttgcactgtatttggcatgtttaaaactgctacacaaaacttgctatatattttgtccaaaaatactatatccttgttatgattgattgatctttattttgtc

SEQ ID NO: 81155 - DNA, 1201 bp, Zea Mays
ccccgcgcgcgtcttcctccggcatgcgccagcccccccgagctcgcccgcgcaccaatctcgccgtcgggtatcccgcccgcgagcccgcgcaccaagctccttccccgcgacaagctccctcccccgcgacgcgtcttcctcctcgccctagatcgccgccccagctctctcctcaccccgcaatccccgccgcccatgctccgctctctactcgccccagatcgtcgcccctgttcgcgtggattgggtaccggtcccaactatctccatggattgcgcgtccgcgacaacccaatctcctcccggtctccatggaagaaggaaattcctgcttgagccaattacagaaggccctgatatttgtcaaattgatggttgtagtgttaaattggaatacaagaggaggcaagtcaaatatggtaccaaacggcgcagcagcagttgatgtgcaacccgagtgtactgccgctcgaggaggccagtaagtgccaacaacatgaatagccaaagcagggaaatagggctggcgggggcacatgggtaacttggtcctggagcattggagaaggagcataccacaaggaaaccaacacgcttcttactctagcagagttccttgcttcctgaaggcctcatagctcagattactgggttaacgaacaactcatactttgatggagcacatgaggttcgacattatgtcaggaagcattcgaatcttggtcgtattgtgcttgaagttgctaaggactcgcaaatcccccgccaagcaaactgctagaaatcttttcagaggtggagatgatgaagatgatagtgctgatgccgacacaaatgatcctgttgtaccttggtcattaggtagagtaggagttgggcatatggtgtacatctccggtttgacttgtgccttgagttcaacaaatatgaaagtgctgagagaggtggcatctagaggacgtcatgtcgaacgtgtgaagaatttttttagaaatatgtatatttgtgcgaaactttttagaaacttgactccattttattttctatgttactctcggctttgtttcctatcctttccaatgacttgctatgcatttgcactgtatttggcatgtttaaaactgctacacaaaacttgctatatattttgtccaaaaatactatatccttgttatgattgattgatctttattttgtc

SEQ ID NO: 81156 - DNA, 2284 bp, Zea Mays
ccccgcgcgcgtcttcctccggcatgcgccagcccccccgagctcgcccgcgcaccaatctcgccgtcgggtatcccgcccgcgagcccgcgcaccaagctccttccccgcgacaagctccctcccccgcgacgcgtcttcctcctcgccctagatcgccgccccagctctctcctcaccccgcaatccccgccgcccatgctccgctctctactcgccccagatcgtcgcccctgttcgcgtggattgggtaccggtcccaactatctccatggattgcgcgtccgcgacaacccaatctcctcccggtctccatggaaggcgcgtcctccccccgtgattctcgattccccgcgtccgcgccccagatccactctcctctctcccacaatccccacggactctgccccgtatcaccaccccggctccttagaacgtgatccactctcctctctcctgcaatccccgctacctcaacccagatcgccgccctcgctctcgatcctcgcccacgctctccatggaaggcgaggccgcgatgctcgcgtggatctatgtagaggctgcgacgctctcccaggaagactactgccagtgctccgtgctccatgcgccgcgctggaacgccaccgtgcggtccatgtcctcgtagtatcgcccagactcgcccatgtagtcccacctgcatccaccgaccaccaagcacactctcactgcagaccagagaggattgccacgaataggtgtgtgcagttctactctacccctgcatcgagccggtgtgcgtccaccagaggccggagttgaaggagagcacgtcggcgtcgcgccatgactcggcgttctcgtagatgtcgtccagcatcagcacctgcttcccctggaccacgtcgatgtccaccagggtccacggagacgagctgcgtcggcgactgcagcgcggcggcgtgcagcaggcagacgagcgactcccactggttgcgccccagcgagtcgcccacgaacatcaccgtcttccccttcatccgtgtcaggaagaccgtggcacaacgcctgatgtcacgttgtcccagcggcgccgcggccggcgtcacgccacgcggatggtcacccacgccacgtccctagaccggtgtggtacgccggcgcccacagcgtcgatgaggaggaggtcggagcagcagtagctgtcatgggcagtgccgcagatgtggagcagtcgaatgagaggctagacgggctggagcaccacagcaggctggtgtcgctgttggccggtagccgctcctcccccaccggcaccgagagggacttgtgacccaaggatctgttcccgggggatgtggtgtttgcgctcgtcgatgatctcaggctcaaccactccaaggacccataggccatggggttatgcaatccaaagaaggaaattcctgcttgagccaattacagaaggccctgatatttgtcaaattgatggttgtagtgttaaattggaatacaagaggaggcaagtcaaatatggtaccaaacggcgcagcagcagttgatgtgcaacccgagtgtactgccgctcgaggaggccagtaagtgccaacaacatgaatagccaaagcagggaaatagggctggcgggggcacatgggtaacttggtcctggagcattggagaaggagcataccacaaggaaaccaacacgagttccttgcttcctgaaggcctcatagctcagattactgggttaacgaacaactcatactttgatggagcacatgaggttcgacattatgtcaggaagcattcgaatcttggtcgtattgtgcttgaagttgctaaggactcgcaaatcccccgccaagcaaactgctagaaatcttttcagaggtggagatgatgaagatgatagtgctgatgccgacacaaatgatcctgttgtaccttggtcattaggtagagtaggagttgggcatatggtgtacatctccggtttgacttgtgccttgagttcaacaaatatgaaagtgctgagagaggtggcatctagaggacgtcatgtcgaacgtgtgaagaatttttttagaaatatgtatatttgtgcgaaactttttagaaacttgactccattttattttctatgttactctcggctttgtttcctatcctttccaatgacttgctatgcatttgcactgtatttggcatgtttaaaactgctacacaaaacttgctatatattttgtccaaaaatactatatccttgttatgattgattgatctttattttgtc

SEQ ID NO: 81157 - DNA, 1818 bp, Zea Mays
ccccgcgcgcgtcttcctccggcatgcgccagcccccccgagctcgcccgcgcaccaatctcgccgtcgggtatcccgcccgcgagcccgcgcaccaagctccttccccgcgacaagctccctcccccgcgacgcgtcttcctcctcgccctagatcgccgccccagctctctcctcaccccgcaatccccgccgcccatgctccgctctctactcgccccagatcgtcgcccctgttcgcgtggattgggtaccggtcccaactatctccatggattgcgcgtccgcgacaacccaatctcctcccggtctccatggaaggcgcgtcctccccccgtgattctcgattccccgcgtccgcgccccagatccactctcctctctcccacaatccccacggactctgccccgtatcaccaccccggctccttagaacgtgatccactctcctctctcctgcaatccccgctacctcaacccagatcgccgccctcgctctcgatcctcgcccacgctctccatggaaggcgaggccgcgatgctcgcgtggatctatgtagaggctgcgacgctctcccaggaagactactgccagtgctccgtgctccatgcgccgcgctggaacgccaccgtgcggtccatgtcctcgtagtatcgcccagactcgcccatgtagtcccacctgcatccaccgaccaccaagcacactctcactgcagaccagagaggattgccacgaataggtgtgtgcagttctactctacccctgcatcgagccggtgtgcgtccaccagaggccggagttgaaggagagcacgtcggcgtcgcgccatgactcggcgttctcgtagatgtcgtccagcatcagcacctgcttcccctggaccacgtcgatgtccaccagaaggaaattcctgcttgagccaattacagaaggccctgatatttgtcaaattgatggttgtagtgttaaattggaatacaagaggaggcaagtcaaatatgaattatactggcagagctcctgacggagcacctgacggagctcgccacaggtaccaaacggcgcagcagcagttgatgtgcaacccgagtgtactgccgctcgaggaggccagtaagtgccaacaacatgaatagccaaagcagggaaatagggctggcgggggcacatgggtaacttggtcctggagcattggagaaggagcataccacaaggaaaccaacacgagttccttgcttcctgaaggcctcatagctcagattactgggttaacgaacaactcatactttgatggagcacatgaggttcgacattatgtcaggaagcattcgaatcttggtcgtattgtgcttgaagttgctaaggactcgcaaatcccccgccaagcaaactgctagaaatcttttcagaggtggagatgatgaagatgatagtgctgatgccgacacaaatgatcctgttgtaccttggtcattaggtagagtaggagttgggcatatggtgtacatctccggtttgacttgtgccttgagttcaacaaatatgaaagtgctgagagaggtggcatctagaggacgtcatgtcgaacgtgtgaagaatttttttagaaatatgtatatttgtgcgaaactttttagaaacttgactccattttattttctatgttactctcggctttgtttcctatcctttccaatgacttgctatgcatttgcactgtatttggcatgtttaaaactgctacacaaaacttgctatatattttgtccaaaaatactatatccttgttatgattgattgatctttattttgtc

SEQ ID NO: 81158 - DNA, 1770 bp, Zea Mays
ccccgcgcgcgtcttcctccggcatgcgccagcccccccgagctcgcccgcgcaccaatctcgccgtcgggtatcccgcccgcgagcccgcgcaccaagctccttccccgcgacaagctccctcccccgcgacgcgtcttcctcctcgccctagatcgccgccccagctctctcctcaccccgcaatccccgccgcccatgctccgctctctactcgccccagatcgtcgcccctgttcgcgtggattgggtaccggtcccaactatctccatggattgcgcgtccgcgacaacccaatctcctcccggtctccatggaaggcgcgtcctccccccgtgattctcgattccccgcgtccgcgccccagatccactctcctctctcccacaatccccacggactctgccccgtatcaccaccccggctccttagaacgtgatccactctcctctctcctgcaatccccgctacctcaacccagatcgccgccctcgctctcgatcctcgcccacgctctccatggaaggcgaggccgcgatgctcgcgtggatctatgtagaggctgcgacgctctcccaggaagactactgccagtgctccgtgctccatgcgccgcgctggaacgccaccgtgcggtccatgtcctcgtagtatcgcccagactcgcccatgtagtcccacctgcatccaccgaccaccaagcacactctcactgcagaccagagaggattgccacgaataggtgtgtgcagttctactctacccctgcatcgagccggtgtgcgtccaccagaggccggagttgaaggagagcacgtcggcgtcgcgccatgactcggcgttctcgtagatgtcgtccagcatcagcacctgcttcccctggaccacgtcgatgtccaccagaaggaaattcctgcttgagccaattacagaaggccctgatatttgtcaaattgatggttgtagtgttaaattggaatacaagaggaggtaccaaacggcgcagcagcagttgatgtgcaacccgagtgtactgccgctcgaggaggccagtaagtgccaacaacatgaatagccaaagcagggaaatagggctggcgggggcacatgggtaacttggtcctggagcattggagaaggagcataccacaaggaaaccaacacgcttcttactctagcagagttccttgcttcctgaaggcctcatagctcagattactgggttaacgaacaactcatactttgatggagcacatgaggttcgacattatgtcaggaagcattcgaatcttggtcgtattgtgcttgaagttgctaaggactcgcaaatcccccgccaagcaaactgctagaaatcttttcagaggtggagatgatgaagatgatagtgctgatgccgacacaaatgatcctgttgtaccttggtcattaggtagagtaggagttgggcatatggtgtacatctccggtttgacttgtgccttgagttcaacaaatatgaaagtgctgagagaggtggcatctagaggacgtcatgtcgaacgtgtgaagaatttttttagaaatatgtatatttgtgcgaaactttttagaaacttgactccattttattttctatgttactctcggctttgtttcctatcctttccaatgacttgctatgcatttgcactgtatttggcatgtttaaaactgctacacaaaacttgctatatattttgtccaaaaatactatatccttgttatgattgattgatctttattttgtc

SEQ ID NO: 81159 - DNA, 1187 bp, Zea Mays
ccccgcgcgcgtcttcctccggcatgcgccagcccccccgagctcgcccgcgcaccaatctcgccgtcgggtatcccgcccgcgagcccgcgcaccaagctccttccccgcgacaagctccctcccccgcgacgcgtcttcctcctcgccctagatcgccgccccagctctctcctcaccccgcaatccccgccgcccatgctccgctctctactcgccccagatcgtcgcccctgttcgcgtggattgggtaccggtcccaactatctccatggattgcgcgtccgcgacaacccaatctcctcccggtctccatggaagaaggaaattcctgcttgagccaattacagaaggccctgatatttgtcaaattgatggttgtagtgttaaattggaatacaagaggaggtaccaaacggcgcagcagcagttgatgtgcaacccgagtgtactgccgctcgaggaggccagtaagtgccaacaacatgaatagccaaagcagggaaatagggctggcgggggcacatgggtaacttggtcctggagcattggagaaggagcataccacaaggaaaccaacacgcttcttactctagcagagttccttgcttcctgaaggcctcatagctcagattactgggttaacgaacaactcatactttgatggagcacatgaggttcgacattatgtcaggaagcattcgaatcttggtcgtattgtgcttgaagttgctaaggactcgcaaatcccccgccaagcaaactgctagaaatcttttcagaggtggagatgatgaagatgatagtgctgatgccgacacaaatgatcctgttgtaccttggtcattaggtagagtaggagttgggcatatggtgtacatctccggtttgacttgtgccttgagttcaacaaatatgaaagtgctgagagaggtggcatctagaggacgtcatgtcgaacgtgtgaagaatttttttagaaatatgtatatttgtgcgaaactttttagaaacttgactccattttattttctatgttactctcggctttgtttcctatcctttccaatgacttgctatgcatttgcactgtatttggcatgtttaaaactgctacacaaaacttgctatatattttgtccaaaaatactatatccttgttatgattgattgatctttattttgtc

SEQ ID NO: 81160 - DNA, 2290 bp, Zea Mays
ccccgcgcgcgtcttcctccggcatgcgccagcccccccgagctcgcccgcgcaccaatctcgccgtcgggtatcccgcccgcgagcccgcgcaccaagctccttccccgcgacaagctccctcccccgcgacgcgtcttcctcctcgccctagatcgccgccccagctctctcctcaccccgcaatccccgccgcccatgctccgctctctactcgccccagatcgtcgcccctgttcgcgtggattgggtaccggtcccaactatctccatggattgcgcgtccgcgacaacccaatctcctcccggtctccatggaaggcgcgtcctccccccgtgattctcgattccccgcgtccgcgccccagatccactctcctctctcccacaatccccacggactctgccccgtatcaccaccccggctccttagaacgtgatccactctcctctctcctgcaatccccgctacctcaacccagatcgccgccctcgctctcgatcctcgcccacgctctccatggaaggcgaggccgcgatgctcgcgtggatctatgtagaggctgcgacgctctcccaggaagactactgccagtgctccgtgctccatgcgccgcgctggaacgccaccgtgcggtccatgtcctcgtagtatcgcccagactcgcccatgtagtcccacctgcatccaccgaccaccaagcacactctcactgcagaccagagaggattgccacgaataggtgtgtgcagttctactctacccctgcatcgagccggtgtgcgtccaccagaggccggagttgaaggagagcacgtcggcgtcgcgccatgactcggcgttctcgtagatgtcgtccagcatcagcacctgcttcccctggaccacgtcgatgtccaccaggaacttgtacgtgtacaaagggtccacggagacgagctgcgtcggcgactgcagcgcggcggcgtgcagcaggcagacgagcgactcccactggttgcgccccagcgagtcgcccacgaacatcaccgtcttccccttcatccgtgtcaggaagaccgtggcacaacgcctgatgtcacgttgtcccagcggcgccgcggccggcgtcacgccacgcggatggtcacccacgccacgtccctagaccggtgtggtacgccggcgcccacagcgtcgatgaggaggaggtcggagcagcagtagctgtcatgggcagtgccgcagatgtggagcagtcgaatgagaggctagacgggctggagcaccacagcaggctggtgtcgctgttggccggtagccgctcctcccccaccggcaccgagagggacttgtgacccaaggatctgttcccgggggatgtggtgtttgcgctcgtcgatgatctcaggctcaaccactccaaggacccataggccatggggttatgcaatccaaagaaggaaattcctgcttgagccaattacagaaggccctgatatttgtcaaattgatggttgtagtgttaaattggaatacaagaggaggtaccaaacggcgcagcagcagttgatgtgcaacccgagtgtactgccgctcgaggaggccagtaagtgccaacaacatgaatagccaaagcagggaaatagggctggcgggggcacatgggtaacttggtcctggagcattggagaaggagcataccacaaggaaaccaacacgagttccttgcttcctgaaggcctcatagctcagattactgggttaacgaacaactcatactttgatggagcacatgaggttcgacattatgtcaggaagcattcgaatcttggtcgtattgtgcttgaagttgctaaggactcgcaaatcccccgccaagcaaactgctagaaatcttttcagaggtggagatgatgaagatgatagtgctgatgccgacacaaatgatcctgttgtaccttggtcattaggtagagtaggagttgggcatatggtgtacatctccggtttgacttgtgccttgagttcaacaaatatgaaagtgctgagagaggtggcatctagaggacgtcatgtcgaacgtgtgaagaatttttttagaaatatgtatatttgtgcgaaactttttagaaacttgactccattttattttctatgttactctcggctttgtttcctatcctttccaatgacttgctatgcatttgcactgtatttggcatgtttaaaactgctacacaaaacttgctatatattttgtccaaaaatactatatccttgttatgattgattgatctttattttgtc

SEQ ID NO: 81161 - DNA, 1721 bp, Zea Mays
ccccgcgcgcgtcttcctccggcatgcgccagcccccccgagctcgcccgcgcaccaatctcgccgtcgggtatcccgcccgcgagcccgcgcaccaagctccttccccgcgacaagctccctcccccgcgacgcgtcttcctcctcgccctagatcgccgccccagctctctcctcaccccgcaatccccgccgcccatgctccgctctctactcgccccagatcgtcgcccctgttcgcgtggattgggtaccggtcccaactatctccatggattgcgcgtccgcgacaacccaatctcctcccggtctccatggaaggcgcgtcctccccccgtgattctcgattccccgcgtccgcgccccagatccactctcctctctcccacaatccccacggactctgccccgtatcaccaccccggctccttagaacgtgatccactctcctctctcctgcaatccccgctacctcaacccagatcgccgccctcgctctcgatcctcgcccacgctctccatggaaggcgaggccgcgatgctcgcgtggatctatgtagaggctgcgacgctctcccaggaagactactgccagtgctccgtgctccatgcgccgcgctggaacgccaccgtgcggtccatgtcctcgtagtatcgcccagactcgcccatgtagtcccacctgcatccaccgaccaccaagcacactctcactgcagaccagagaggattgccacgaataggtgtgtgcagttctactctacccctgcatcgagccggtgtgcgtccaccagaggccggagttgaaggagagcacgtcggcgtcgcgccatgactcggcgttctcgtagatgtcgtccagcatcagcacctgcttcccctggaccacgtcgatgtccaccagaaggaaattcctgcttgagccaattacagaaggccctgatatttgtcaaattgatggttgtagtgttaaattggaatacaagaggaggtaccaaacggcgcagcagcagttgatgtgcaacccgagtgtactgccgctcgaggaggccagtaagtgccaacaacatgaatagccaaagcagggaaatagggctggcgggggcacatgggtaacttggtcctggagcattggagaaggagcataccacaaggaaaccaacacgattactgggttaacgaacaactcatactttgatggagcacatgaggttcgacattatgtcaggaagcattcgaatcttggtcgtattgtgcttgaagttgctaaggactcgcaaatcccccgccaagcaaactgctagaaatcttttcagaggtggagatgatgaagatgatagtgctgatgccgacacaaatgatcctgttgtaccttggtcattaggtagagtaggagttgggcatatggtgtacatctccggtttgacttgtgccttgagttcaacaaatatgaaagtgctgagagaggtggcatctagaggacgtcatgtcgaacgtgtgaagaatttttttagaaatatgtatatttgtgcgaaactttttagaaacttgactccattttattttctatgttactctcggctttgtttcctatcctttccaatgacttgctatgcatttgcactgtatttggcatgtttaaaactgctacacaaaacttgctatatattttgtccaaaaatactatatccttgttatgattgattgatctttattttgtc

SEQ ID NO: 81162 - DNA, 2663 bp, Zea Mays
ccccgcgcgcgtcttcctccggcatgcgccagcccccccgagctcgcccgcgcaccaatctcgccgtcgggtatcccgcccgcgagcccgcgcaccaagctccttccccgcgacaagctccctcccccgcgacgcgtcttcctcctcgccctagatcgccgccccagctctctcctcaccccgcaatccccgccgcccatgctccgctctctactcgccccagatcgtcgcccctgttcgcgtggattgggtaccggtcccaactatctccatggattgcgcgtccgcgacaacccaatctcctcccggtctccatggaaggcgcgtcctccccccgtgattctcgattccccgcgtccgcgccccagatccactctcctctctcccacaatccccacggactctgccccgtatcaccaccccggctccttagaacgtgatccactctcctctctcctgcaatccccgctacctcaacccagatcgccgccctcgctctcgatcctcgcccacgctctccatggaaggcgaggccgcgatgctcgcgtggatctatgtagaggctgcgacgctctcccaggaagactactgccagtgctccgtgctccatgcgccgcgctggaacgccaccgtgcggtccatgtcctcgtagtatcgcccagactcgcccatgtagtcccacctgcatccaccgaccaccaagcacactctcactgcagaccagagaggattgccacgaataggtgtgtgcagttctactctacccctgcatcgagccggtgtgcgtccaccagaggccggagttgaaggagagcacgtcggcgtcgcgccatgactcggcgttctcgtagatgtcgtccagcatcagcacctgcttcccctggaccacgtcgatgtccaccaggaacttgtacgtgtacaaagggtccacggagacgagctgcgtcggcgactgcagcgcggcggcgtgcagcaggcagacgagcgactcccactggttgcgccccagcgagtcgcccacgaacatcaccgtcttccccttcatccgtgtcaggaagaccgtggcacaacgcctgatgtcacgttgtcccagcggcgccgcggccggcgtcacgccacgcggatggtcacccacgccacgtccctagaccggtgtggtacgccggcgcccacagcgtcgatgaggaggaggtcggagcagcagtagctgtcatgggcagtgccgcagatgtggagcagtcgaatgagaggctagacgggctggagcaccacagcaggctggtgtcgctgttggccggtagccgctcctcccccaccggcaccgagagggacttgtgacccaaggatctgttcccgggggatgtggtgtttgcgctcgtcgatgatctcaggctcaaccactccaaggacccataggccatggggttatgcaatccaaaggtctccatcgccaatttcattttgtagacaaataagttagctcttctgatggcataccatttatagattgccaacgatctgaaggcatatatgaaggcttgttatctcttctgtgtttaattgatcagtgactttgatttggacctggttatcagcttgttatttctatctgaattttctcgctttatttgtactacactcgtgctaattatgtgagaatgatttgtgtcactatggtgttcatctgttattttatactattatatgtattcatctgtcatgttgttgaactcctgttatcaattgcagaaggaaattcctgcttgagccaattacagaaggccctgatatttgtcaaattgatggttgtagtgttaaattggaatacaagaggaggcaagtcaaatatgaattatactggcagagctcctgacggagcacctgacggagctcgccacaggtaccaaacggcgcagcagcagttgatgtgcaacccgagtgtactgccgctcgaggaggccagtaagtgccaacaacatgaatagccaaagcagggaaatagggctggcgggggcacatgggtaacttggtcctggagcattggagaaggagcataccacaaggaaaccaacacgagttccttgcttcctgaaggcctcatagctcagattactgggttaacgaacaactcatactttgatggagcacatgaggttcgacattatgtcaggaagcattcgaatcttggtcgtattgtgcttgaagttgctaaggactcgcaaatcccccgccaagcaaactgctagaaatcttttcagaggtggagatgatgaagatgatagtgctgatgccgacacaaatgatcctgttgtaccttggtcattaggtagagtaggagttgggcatatggtgtacatctccggtttgacttgtgccttgagttcaacaaatatgaaagtgctgagagaggtggcatctagaggacgtcatgtcgaacgtgtgaagaatttttttagaaatatgtatatttgtgcgaaactttttagaaacttgactccattttattttctatgttactctcggctttgtttcctatcctttccaatgacttgctatgcatttgcactgtatttggcatgtttaaaactgctacacaaaacttgctatatattttgtccaaaaatactatatccttgttatgattgattgatctttattttgtc

SEQ ID NO: 81163 - DNA, 2552 bp, Zea Mays
ccccgcgcgcgtcttcctccggcatgcgccagcccccccgagctcgcccgcgcaccaatctcgccgtcgggtatcccgcccgcgagcccgcgcaccaagctccttccccgcgacaagctccctcccccgcgacgcgtcttcctcctcgccctagatcgccgccccagctctctcctcaccccgcaatccccgccgcccatgctccgctctctactcgccccagatcgtcgcccctgttcgcgtggattgggtaccggtcccaactatctccatggattgcgcgtccgcgacaacccaatctcctcccggtctccatggaaggcgcgtcctccccccgtgattctcgattccccgcgtccgcgccccagatccactctcctctctcccacaatccccacggactctgccccgtatcaccaccccggctccttagaacgtgatccactctcctctctcctgcaatccccgctacctcaacccagatcgccgccctcgctctcgatcctcgcccacgctctccatggaaggcgaggccgcgatgctcgcgtggatctatgtagaggctgcgacgctctcccaggaagactactgccagtgctccgtgctccatgcgccgcgctggaacgccaccgtgcggtccatgtcctcgtagtatcgcccagactcgcccatgtagtcccacctgcatccaccgaccaccaagcacactctcactgcagaccagagaggattgccacgaataggtgtgtgcagttctactctacccctgcatcgagccggtgtgcgtccaccagaggccggagttgaaggagagcacgtcggcgtcgcgccatgactcggcgttctcgtagatgtcgtccagcatcagcacctgcttcccctggaccacgtcgatgtccaccagggtccacggagacgagctgcgtcggcgactgcagcgcggcggcgtgcagcaggcagacgagcgactcccactggttgcgccccagcgagtcgcccacgaacatcaccgtcttccccttcatccgtgtcaggaagaccgtggcacaacgcctgatgtcacgttgtcccagcggcgccgcggccggcgtcacgccacgcggatggtcacccacgccacgtccctagaccggtgtggtacgccggcgcccacagcgtcgatgaggaggaggtcggagcagcagtagctgtcatgggcagtgccgcagatgtggagcagtcgaatgagaggctagacgggctggagcaccacagcaggctggtgtcgctgttggccggtagccgctcctcccccaccggcaccgagagggacttgtgacccaaggatctgttcccgggggatgtggtgtttgcgctcgtcgatgatctcaggctcaaccactccaaggacccataggccatggggttatgcaatccaaagaaggaaattcctgcttgagccaattacagaaggccctgatatttgtcaaattgatggttgtagtgttaaattggaatacaagaggaggcaagtcaaatatggtttgtgtgacagcacgttactaacttactctactatatctgcatgagaaaggatgaaccctgtttgcatgtatactaattaatctacggattcattaatgtgtgaataagattttatttaattatgacagcaaacgtgacatgccattacaatttcgtttatgcaaaaaagtaagttgcttatagtttagcctttggtttcaatttgcactttatagaattatactggcagagctcctgacggagcacctgacggagctcgccacaggtaccaaacggcgcagcagcagttgatgtgcaacccgagtgtactgccgctcgaggaggccagtaagtgccaacaacatgaatagccaaagcagggaaatagggctggcgggggcacatgggtaacttggtcctggagcattggagaaggagcataccacaaggaaaccaacacgagttccttgcttcctgaaggcctcatagctcagattactgggttaacgaacaactcatactttgatggagcacatgaggttcgacattatgtcaggaagcattcgaatcttggtcgtattgtgcttgaagttgctaaggactcgcaaatcccccgccaagcaaactgctagaaatcttttcagaggtggagatgatgaagatgatagtgctgatgccgacacaaatgatcctgttgtaccttggtcattaggtagagtaggagttgggcatatggtgtacatctccggtttgacttgtgccttgagttcaacaaatatgaaagtgctgagagaggtggcatctagaggacgtcatgtcgaacgtgtgaagaatttttttagaaatatgtatatttgtgcgaaactttttagaaacttgactccattttattttctatgttactctcggctttgtttcctatcctttccaatgacttgctatgcatttgcactgtatttggcatgtttaaaactgctacacaaaacttgctatatattttgtccaaaaatactatatccttgttatgattgattgatctttattttgtc

SEQ ID NO: 81164 - DNA, 2286 bp, Zea Mays
ccccgcgcgcgtcttcctccggcatgcgccagcccccccgagctcgcccgcgcaccaatctcgccgtcgggtatcccgcccgcgagcccgcgcaccaagctccttccccgcgacaagctccctcccccgcgacgcgtcttcctcctcgccctagatcgccgccccagctctctcctcaccccgcaatccccgccgcccatgctccgctctctactcgccccagatcgtcgcccctgttcgcgtggattgggtaccggtcccaactatctccatggattgcgcgtccgcgacaacccaatctcctcccggtctccatggaaggcgcgtcctccccccgtgattctcgattccccgcgtccgcgccccagatccactctcctctctcccacaatccccacggactctgccccgtatcaccaccccggctccttagaacgtgatccactctcctctctcctgcaatccccgctacctcaacccagatcgccgccctcgctctcgatcctcgcccacgctctccatggaaggcgaggccgcgatgctcgcgtggatctatgtagaggctgcgacgctctcccaggaagactactgccagtgctccgtgctccatgcgccgcgctggaacgccaccgtgcggtccatgtcctcgtagtatcgcccagactcgcccatgtagtcccacctgcatccaccgaccaccaagcacactctcactgcagaccagagaggattgccacgaataggtgtgtgcagttctactctacccctgcatcgagccggtgtgcgtccaccagaggccggagttgaaggagagcacgtcggcgtcgcgccatgactcggcgttctcgtagatgtcgtccagcatcagcacctgcttcccctggaccacgtcgatgtccaccagggtccacggagacgagctgcgtcggcgactgcagcgcggcggcgtgcagcaggcagacgagcgactcccactggttgcgccccagcgagtcgcccacgaacatcaccgtcttccccttcatccgtgtcaggaagaccgtggcacaacgcctgatgtcacgttgtcccagcggcgccgcggccggcgtcacgccacgcggatggtcacccacgccacgtccctagaccggtgtggtacgccggcgcccacagcgtcgatgaggaggaggtcggagcagcagtagctgtcatgggcagtgccgcagatgtggagcagtcgaatgagaggctagacgggctggagcaccacagcaggctggtgtcgctgttggccggtagccgctcctcccccaccggcaccgagagggacttgtgacccaaggatctgttcccgggggatgtggtgtttgcgctcgtcgatgatctcaggctcaaccactccaaggacccataggccatggggttatgcaatccaaagaaggaaattcctgcttgagccaattacagaaggccctgatatttgtcaaattgatggttgtagtgttaaattggaatacaagaggaggtaccaaacggcgcagcagcagttgatgtgcaacccgagtgtactgccgctcgaggaggccagtaagtgccaacaacatgaatagccaaagcagggaaatagggctggcgggggcacatgggtaacttggtcctggagcattggagaaggagcataccacaaggaaaccaacacgcttcttactctagcagagttccttgcttcctgaaggcctcatagctcagattactgggttaacgaacaactcatactttgatggagcacatgaggttcgacattatgtcaggaagcattcgaatcttggtcgtattgtgcttgaagttgctaaggactcgcaaatcccccgccaagcaaactgctagaaatcttttcagaggtggagatgatgaagatgatagtgctgatgccgacacaaatgatcctgttgtaccttggtcattaggtagagtaggagttgggcatatggtgtacatctccggtttgacttgtgccttgagttcaacaaatatgaaagtgctgagagaggtggcatctagaggacgtcatgtcgaacgtgtgaagaatttttttagaaatatgtatatttgtgcgaaactttttagaaacttgactccattttattttctatgttactctcggctttgtttcctatcctttccaatgacttgctatgcatttgcactgtatttggcatgtttaaaactgctacacaaaacttgctatatattttgtccaaaaatactatatccttgttatgattgattgatctttattttgtc

SEQ ID NO: 81165 - DNA, 2580 bp, Zea Mays
ccccgcgcgcgtcttcctccggcatgcgccagcccccccgagctcgcccgcgcaccaatctcgccgtcgggtatcccgcccgcgagcccgcgcaccaagctccttccccgcgacaagctccctcccccgcgacgcgtcttcctcctcgccctagatcgccgccccagctctctcctcaccccgcaatccccgccgcccatgctccgctctctactcgccccagatcgtcgcccctgttcgcgtggattgggtaccggtcccaactatctccatggattgcgcgtccgcgacaacccaatctcctcccggtctccatggaaggcgcgtcctccccccgtgattctcgattccccgcgtccgcgccccagatccactctcctctctcccacaatccccacggactctgccccgtatcaccaccccggctccttagaacgtgatccactctcctctctcctgcaatccccgctacctcaacccagatcgccgccctcgctctcgatcctcgcccacgctctccatggaaggcgaggccgcgatgctcgcgtggatctatgtagaggctgcgacgctctcccaggaagactactgccagtgctccgtgctccatgcgccgcgctggaacgccaccgtgcggtccatgtcctcgtagtatcgcccagactcgcccatgtagtcccacctgcatccaccgaccaccaagcacactctcactgcagaccagagaggattgccacgaataggtgtgtgcagttctactctacccctgcatcgagccggtgtgcgtccaccagaggccggagttgaaggagagcacgtcggcgtcgcgccatgactcggcgttctcgtagatgtcgtccagcatcagcacctgcttcccctggaccacgtcgatgtccaccaggaacttgtacgtgtacaaagggtccacggagacgagctgcgtcggcgactgcagcgcggcggcgtgcagcaggcagacgagcgactcccactggttgcgccccagcgagtcgcccacgaacatcaccgtcttccccttcatccgtgtcaggaagaccgtggcacaacgcctgatgtcacgttgtcccagcggcgccgcggccggcgtcacgccacgcggatggtcacccacgccacgtccctagaccggtgtggtacgccggcgcccacagcgtcgatgaggaggaggtcggagcagcagtagctgtcatgggcagtgccgcagatgtggagcagtcgaatgagaggctagacgggctggagcaccacagcaggctggtgtcgctgttggccggtagccgctcctcccccaccggcaccgagagggacttgtgacccaaggatctgttcccgggggatgtggtgtttgcgctcgtcgatgatctcaggctcaaccactccaaggacccataggccatggggttatgcaatccaaaggtctccatcgccaatttcattttgtagacaaataagttagctcttctgatggcataccatttatagattgccaacgatctgaaggcatatatgaaggcttgttatctcttctgtgtttaattgatcagtgactttgatttggacctggttatcagcttgttatttctatctgaattttctcgctttatttgtactacactcgtgctaattatgtgagaatgatttgtgtcactatggtgttcatctgttattttatactattatatgtattcatctgtcatgttgttgaactcctgttatcaattgcagaaggaaattcctgcttgagccaattacagaaggccctgatatttgtcaaattgatggttgtagtgttaaattggaatacaagaggaggcaagtcaaatatggtaccaaacggcgcagcagcagttgatgtgcaacccgagtgtactgccgctcgaggaggccagtaagtgccaacaacatgaatagccaaagcagggaaatagggctggcgggggcacatgggtaacttggtcctggagcattggagaaggagcataccacaaggaaaccaacacgattactgggttaacgaacaactcatactttgatggagcacatgaggttcgacattatgtcaggaagcattcgaatcttggtcgtattgtgcttgaagttgctaaggactcgcaaatcccccgccaagcaaactgctagaaatcttttcagaggtggagatgatgaagatgatagtgctgatgccgacacaaatgatcctgttgtaccttggtcattaggtagagtaggagttgggcatatggtgtacatctccggtttgacttgtgccttgagttcaacaaatatgaaagtgctgagagaggtggcatctagaggacgtcatgtcgaacgtgtgaagaatttttttagaaatatgtatatttgtgcgaaactttttagaaacttgactccattttattttctatgttactctcggctttgtttcctatcctttccaatgacttgctatgcatttgcactgtatttggcatgtttaaaactgctacacaaaacttgctatatattttgtccaaaaatactatatccttgttatgattgattgatctttattttgtc

SEQ ID NO: 81166 - DNA, 2615 bp, Zea Mays
ccccgcgcgcgtcttcctccggcatgcgccagcccccccgagctcgcccgcgcaccaatctcgccgtcgggtatcccgcccgcgagcccgcgcaccaagctccttccccgcgacaagctccctcccccgcgacgcgtcttcctcctcgccctagatcgccgccccagctctctcctcaccccgcaatccccgccgcccatgctccgctctctactcgccccagatcgtcgcccctgttcgcgtggattgggtaccggtcccaactatctccatggattgcgcgtccgcgacaacccaatctcctcccggtctccatggaaggcgcgtcctccccccgtgattctcgattccccgcgtccgcgccccagatccactctcctctctcccacaatccccacggactctgccccgtatcaccaccccggctccttagaacgtgatccactctcctctctcctgcaatccccgctacctcaacccagatcgccgccctcgctctcgatcctcgcccacgctctccatggaaggcgaggccgcgatgctcgcgtggatctatgtagaggctgcgacgctctcccaggaagactactgccagtgctccgtgctccatgcgccgcgctggaacgccaccgtgcggtccatgtcctcgtagtatcgcccagactcgcccatgtagtcccacctgcatccaccgaccaccaagcacactctcactgcagaccagagaggattgccacgaataggtgtgtgcagttctactctacccctgcatcgagccggtgtgcgtccaccagaggccggagttgaaggagagcacgtcggcgtcgcgccatgactcggcgttctcgtagatgtcgtccagcatcagcacctgcttcccctggaccacgtcgatgtccaccaggaacttgtacgtgtacaaagggtccacggagacgagctgcgtcggcgactgcagcgcggcggcgtgcagcaggcagacgagcgactcccactggttgcgccccagcgagtcgcccacgaacatcaccgtcttccccttcatccgtgtcaggaagaccgtggcacaacgcctgatgtcacgttgtcccagcggcgccgcggccggcgtcacgccacgcggatggtcacccacgccacgtccctagaccggtgtggtacgccggcgcccacagcgtcgatgaggaggaggtcggagcagcagtagctgtcatgggcagtgccgcagatgtggagcagtcgaatgagaggctagacgggctggagcaccacagcaggctggtgtcgctgttggccggtagccgctcctcccccaccggcaccgagagggacttgtgacccaaggatctgttcccgggggatgtggtgtttgcgctcgtcgatgatctcaggctcaaccactccaaggacccataggccatggggttatgcaatccaaaggtctccatcgccaatttcattttgtagacaaataagttagctcttctgatggcataccatttatagattgccaacgatctgaaggcatatatgaaggcttgttatctcttctgtgtttaattgatcagtgactttgatttggacctggttatcagcttgttatttctatctgaattttctcgctttatttgtactacactcgtgctaattatgtgagaatgatttgtgtcactatggtgttcatctgttattttatactattatatgtattcatctgtcatgttgttgaactcctgttatcaattgcagaaggaaattcctgcttgagccaattacagaaggccctgatatttgtcaaattgatggttgtagtgttaaattggaatacaagaggaggtaccaaacggcgcagcagcagttgatgtgcaacccgagtgtactgccgctcgaggaggccagtaagtgccaacaacatgaatagccaaagcagggaaatagggctggcgggggcacatgggtaacttggtcctggagcattggagaaggagcataccacaaggaaaccaacacgcttcttactctagcagagttccttgcttcctgaaggcctcatagctcagattactgggttaacgaacaactcatactttgatggagcacatgaggttcgacattatgtcaggaagcattcgaatcttggtcgtattgtgcttgaagttgctaaggactcgcaaatcccccgccaagcaaactgctagaaatcttttcagaggtggagatgatgaagatgatagtgctgatgccgacacaaatgatcctgttgtaccttggtcattaggtagagtaggagttgggcatatggtgtacatctccggtttgacttgtgccttgagttcaacaaatatgaaagtgctgagagaggtggcatctagaggacgtcatgtcgaacgtgtgaagaatttttttagaaatatgtatatttgtgcgaaactttttagaaacttgactccattttattttctatgttactctcggctttgtttcctatcctttccaatgacttgctatgcatttgcactgtatttggcatgtttaaaactgctacacaaaacttgctatatattttgtccaaaaatactatatccttgttatgattgattgatctttattttgtc

SEQ ID NO: 81167 - DNA, 2257 bp, Zea Mays
ccccgcgcgcgtcttcctccggcatgcgccagcccccccgagctcgcccgcgcaccaatctcgccgtcgggtatcccgcccgcgagcccgcgcaccaagctccttccccgcgacaagctccctcccccgcgacgcgtcttcctcctcgccctagatcgccgccccagctctctcctcaccccgcaatccccgccgcccatgctccgctctctactcgccccagatcgtcgcccctgttcgcgtggattgggtaccggtcccaactatctccatggattgcgcgtccgcgacaacccaatctcctcccggtctccatggaaggcgcgtcctccccccgtgattctcgattccccgcgtccgcgccccagatccactctcctctctcccacaatccccacggactctgccccgtatcaccaccccggctccttagaacgtgatccactctcctctctcctgcaatccccgctacctcaacccagatcgccgccctcgctctcgatcctcgcccacgctctccatggaaggcgaggccgcgatgctcgcgtggatctatgtagaggctgcgacgctctcccaggaagactactgccagtgctccgtgctccatgcgccgcgctggaacgccaccgtgcggtccatgtcctcgtagtatcgcccagactcgcccatgtagtcccacctgcatccaccgaccaccaagcacactctcactgcagaccagagaggattgccacgaataggtgtgtgcagttctactctacccctgcatcgagccggtgtgcgtccaccagaggccggagttgaaggagagcacgtcggcgtcgcgccatgactcggcgttctcgtagatgtcgtccagcatcagcacctgcttcccctggaccacgtcgatgtccaccaggaacttgtacgtgtacaaagggtccacggagacgagctgcgtcggcgactgcagcgcggcggcgtgcagcaggcagacgagcgactcccactggttgcgccccagcgagtcgcccacgaacatcaccgtcttccccttcatccgtgtcaggaagaccgtggcacaacgcctgatgtcacgttgtcccagcggcgccgcggccggcgtcacgccacgcggatggtcacccacgccacgtccctagaccggtgtggtacgccggcgcccacagcgtcgatgaggaggaggtcggagcagcagtagctgtcatgggcagtgccgcagatgtggagcagtcgaatgagaggctagacgggctggagcaccacagcaggctggtgtcgctgttggccggtagccgctcctcccccaccggcaccgagagggacttgtgacccaaggatctgttcccgggggatgtggtgtttgcgctcgtcgatgatctcaggctcaaccactccaaggacccataggccatggggttatgcaatccaaagaaggaaattcctgcttgagccaattacagaaggccctgatatttgtcaaattgatggttgtagtgttaaattggaatacaagaggaggtaccaaacggcgcagcagcagttgatgtgcaacccgagtgtactgccgctcgaggaggccagtaagtgccaacaacatgaatagccaaagcagggaaatagggctggcgggggcacatgggtaacttggtcctggagcattggagaaggagcataccacaaggaaaccaacacgattactgggttaacgaacaactcatactttgatggagcacatgaggttcgacattatgtcaggaagcattcgaatcttggtcgtattgtgcttgaagttgctaaggactcgcaaatcccccgccaagcaaactgctagaaatcttttcagaggtggagatgatgaagatgatagtgctgatgccgacacaaatgatcctgttgtaccttggtcattaggtagagtaggagttgggcatatggtgtacatctccggtttgacttgtgccttgagttcaacaaatatgaaagtgctgagagaggtggcatctagaggacgtcatgtcgaacgtgtgaagaatttttttagaaatatgtatatttgtgcgaaactttttagaaacttgactccattttattttctatgttactctcggctttgtttcctatcctttccaatgacttgctatgcatttgcactgtatttggcatgtttaaaactgctacacaaaacttgctatatattttgtccaaaaatactatatccttgttatgattgattgatctttattttgtc

SEQ ID NO: 81168 - DNA, 2340 bp, Zea Mays
ccccgcgcgcgtcttcctccggcatgcgccagcccccccgagctcgcccgcgcaccaatctcgccgtcgggtatcccgcccgcgagcccgcgcaccaagctccttccccgcgacaagctccctcccccgcgacgcgtcttcctcctcgccctagatcgccgccccagctctctcctcaccccgcaatccccgccgcccatgctccgctctctactcgccccagatcgtcgcccctgttcgcgtggattgggtaccggtcccaactatctccatggattgcgcgtccgcgacaacccaatctcctcccggtctccatggaaggcgcgtcctccccccgtgattctcgattccccgcgtccgcgccccagatccactctcctctctcccacaatccccacggactctgccccgtatcaccaccccggctccttagaacgtgatccactctcctctctcctgcaatccccgctacctcaacccagatcgccgccctcgctctcgatcctcgcccacgctctccatggaaggcgaggccgcgatgctcgcgtggatctatgtagaggctgcgacgctctcccaggaagactactgccagtgctccgtgctccatgcgccgcgctggaacgccaccgtgcggtccatgtcctcgtagtatcgcccagactcgcccatgtagtcccacctgcatccaccgaccaccaagcacactctcactgcagaccagagaggattgccacgaataggtgtgtgcagttctactctacccctgcatcgagccggtgtgcgtccaccagaggccggagttgaaggagagcacgtcggcgtcgcgccatgactcggcgttctcgtagatgtcgtccagcatcagcacctgcttcccctggaccacgtcgatgtccaccaggaacttgtacgtgtacaaagggtccacggagacgagctgcgtcggcgactgcagcgcggcggcgtgcagcaggcagacgagcgactcccactggttgcgccccagcgagtcgcccacgaacatcaccgtcttccccttcatccgtgtcaggaagaccgtggcacaacgcctgatgtcacgttgtcccagcggcgccgcggccggcgtcacgccacgcggatggtcacccacgccacgtccctagaccggtgtggtacgccggcgcccacagcgtcgatgaggaggaggtcggagcagcagtagctgtcatgggcagtgccgcagatgtggagcagtcgaatgagaggctagacgggctggagcaccacagcaggctggtgtcgctgttggccggtagccgctcctcccccaccggcaccgagagggacttgtgacccaaggatctgttcccgggggatgtggtgtttgcgctcgtcgatgatctcaggctcaaccactccaaggacccataggccatggggttatgcaatccaaagaaggaaattcctgcttgagccaattacagaaggccctgatatttgtcaaattgatggttgtagtgttaaattggaatacaagaggaggcaagtcaaatatgagctcctgacggagcacctgacggagctcgccacaggtaccaaacggcgcagcagcagttgatgtgcaacccgagtgtactgccgctcgaggaggccagtaagtgccaacaacatgaatagccaaagcagggaaatagggctggcgggggcacatgggtaacttggtcctggagcattggagaaggagcataccacaaggaaaccaacacgagttccttgcttcctgaaggcctcatagctcagattactgggttaacgaacaactcatactttgatggagcacatgaggttcgacattatgtcaggaagcattcgaatcttggtcgtattgtgcttgaagttgctaaggactcgcaaatcccccgccaagcaaactgctagaaatcttttcagaggtggagatgatgaagatgatagtgctgatgccgacacaaatgatcctgttgtaccttggtcattaggtagagtaggagttgggcatatggtgtacatctccggtttgacttgtgccttgagttcaacaaatatgaaagtgctgagagaggtggcatctagaggacgtcatgtcgaacgtgtgaagaatttttttagaaatatgtatatttgtgcgaaactttttagaaacttgactccattttattttctatgttactctcggctttgtttcctatcctttccaatgacttgctatgcatttgcactgtatttggcatgtttaaaactgctacacaaaacttgctatatattttgtccaaaaatactatatccttgttatgattgattgatctttattttgtc

SEQ ID NO: 81169 - DNA, 1453 bp, Zea Mays
ccccgcgcgcgtcttcctccggcatgcgccagcccccccgagctcgcccgcgcaccaatctcgccgtcgggtatcccgcccgcgagcccgcgcaccaagctccttccccgcgacaagctccctcccccgcgacgcgtcttcctcctcgccctagatcgccgccccagctctctcctcaccccgcaatccccgccgcccatgctccgctctctactcgccccagatcgtcgcccctgttcgcgtggattgggtaccggtcccaactatctccatggattgcgcgtccgcgacaacccaatctcctcccggtctccatggaagaaggaaattcctgcttgagccaattacagaaggccctgatatttgtcaaattgatggttgtagtgttaaattggaatacaagaggaggcaagtcaaatatggtttgtgtgacagcacgttactaacttactctactatatctgcatgagaaaggatgaaccctgtttgcatgtatactaattaatctacggattcattaatgtgtgaataagattttatttaattatgacagcaaacgtgacatgccattacaatttcgtttatgcaaaaaagtaagttgcttatagtttagcctttggtttcaatttgcactttatagaattatactggcagagctcctgacggagcacctgacggagctcgccacaggtaccaaacggcgcagcagcagttgatgtgcaacccgagtgtactgccgctcgaggaggccagtaagtgccaacaacatgaatagccaaagcagggaaatagggctggcgggggcacatgggtaacttggtcctggagcattggagaaggagcataccacaaggaaaccaacacgagttccttgcttcctgaaggcctcatagctcagattactgggttaacgaacaactcatactttgatggagcacatgaggttcgacattatgtcaggaagcattcgaatcttggtcgtattgtgcttgaagttgctaaggactcgcaaatcccccgccaagcaaactgctagaaatcttttcagaggtggagatgatgaagatgatagtgctgatgccgacacaaatgatcctgttgtaccttggtcattaggtagagtaggagttgggcatatggtgtacatctccggtttgacttgtgccttgagttcaacaaatatgaaagtgctgagagaggtggcatctagaggacgtcatgtcgaacgtgtgaagaatttttttagaaatatgtatatttgtgcgaaactttttagaaacttgactccattttattttctatgttactctcggctttgtttcctatcctttccaatgacttgctatgcatttgcactgtatttggcatgtttaaaactgctacacaaaacttgctatatattttgtccaaaaatactatatccttgttatgattgattgatctttattttgtc

SEQ ID NO: 81170 - DNA, 2491 bp, Zea Mays
ccccgcgcgcgtcttcctccggcatgcgccagcccccccgagctcgcccgcgcaccaatctcgccgtcgggtatcccgcccgcgagcccgcgcaccaagctccttccccgcgacaagctccctcccccgcgacgcgtcttcctcctcgccctagatcgccgccccagctctctcctcaccccgcaatccccgccgcccatgctccgctctctactcgccccagatcgtcgcccctgttcgcgtggattgggtaccggtcccaactatctccatggattgcgcgtccgcgacaacccaatctcctcccggtctccatggaaggcgcgtcctccccccgtgattctcgattccccgcgtccgcgccccagatccactctcctctctcccacaatccccacggactctgccccgtatcaccaccccggctccttagaacgtgatccactctcctctctcctgcaatccccgctacctcaacccagatcgccgccctcgctctcgatcctcgcccacgctctccatggaaggcgaggccgcgatgctcgcgtggatctatgtagaggctgcgacgctctcccaggaagactactgccagtgctccgtgctccatgcgccgcgctggaacgccaccgtgcggtccatgtcctcgtagtatcgcccagactcgcccatgtagtcccacctgcatccaccgaccaccaagcacactctcactgcagaccagagaggattgccacgaataggtgtgtgcagttctactctacccctgcatcgagccggtgtgcgtccaccagaggccggagttgaaggagagcacgtcggcgtcgcgccatgactcggcgttctcgtagatgtcgtccagcatcagcacctgcttcccctggaccacgtcgatgtccaccaggaacttgtacgtgtacaaagggtccacggagacgagctgcgtcggcgactgcagcgcggcggcgtgcagcaggcagacgagcgactcccactggttgcgccccagcgagtcgcccacgaacatcaccgtcttccccttcatccgtgtcaggaagaccgtggcacaacgcctgatgtcacgttgtcccagcggcgccgcggccggcgtcacgccacgcggatggtcacccacgccacgtccctagaccggtgtggtacgccggcgcccacagcgtcgatgaggaggaggtcggagcagcagtagctgtcatgggcagtgccgcagatgtggagcagtcgaatgagaggctagacgggctggagcaccacagcaggctggtgtcgctgttggccggtagccgctcctcccccaccggcaccgagagggacttgtgacccaaggatctgttcccgggggatgtggtgtttgcgctcgtcgatgatctcaggctcaaccactccaaggacccataggccatggggttatgcaatccaaagaaggaaattcctgcttgagccaattacagaaggccctgatatttgtcaaattgatggttgtagtgttaaattggaatacaagaggaggcaagtcaaatatggtttgtgtgacagcacgttactaacttactctactatatctgcatgagaaaggatgaaccctgtttgcatgtatactaattaatctacggattcattaatgtgtgaataagattttatttaattatgacagcaaacgtgacatgccattacaatttcgtttatgcaaaaaagtaccaaacggcgcagcagcagttgatgtgcaacccgagtgtactgccgctcgaggaggccagtaagtgccaacaacatgaatagccaaagcagggaaatagggctggcgggggcacatgggtaacttggtcctggagcattggagaaggagcataccacaaggaaaccaacacgcttcttactctagcagagttccttgcttcctgaaggcctcatagctcagattactgggttaacgaacaactcatactttgatggagcacatgaggttcgacattatgtcaggaagcattcgaatcttggtcgtattgtgcttgaagttgctaaggactcgcaaatcccccgccaagcaaactgctagaaatcttttcagaggtggagatgatgaagatgatagtgctgatgccgacacaaatgatcctgttgtaccttggtcattaggtagagtaggagttgggcatatggtgtacatctccggtttgacttgtgccttgagttcaacaaatatgaaagtgctgagagaggtggcatctagaggacgtcatgtcgaacgtgtgaagaatttttttagaaatatgtatatttgtgcgaaactttttagaaacttgactccattttattttctatgttactctcggctttgtttcctatcctttccaatgacttgctatgcatttgcactgtatttggcatgtttaaaactgctacacaaaacttgctatatattttgtccaaaaatactatatccttgttatgattgattgatctttattttgtc

SEQ ID NO: 81171 - DNA, 1784 bp, Zea Mays
ccccgcgcgcgtcttcctccggcatgcgccagcccccccgagctcgcccgcgcaccaatctcgccgtcgggtatcccgcccgcgagcccgcgcaccaagctccttccccgcgacaagctccctcccccgcgacgcgtcttcctcctcgccctagatcgccgccccagctctctcctcaccccgcaatccccgccgcccatgctccgctctctactcgccccagatcgtcgcccctgttcgcgtggattgggtaccggtcccaactatctccatggattgcgcgtccgcgacaacccaatctcctcccggtctccatggaaggcgcgtcctccccccgtgattctcgattccccgcgtccgcgccccagatccactctcctctctcccacaatccccacggactctgccccgtatcaccaccccggctccttagaacgtgatccactctcctctctcctgcaatccccgctacctcaacccagatcgccgccctcgctctcgatcctcgcccacgctctccatggaaggcgaggccgcgatgctcgcgtggatctatgtagaggctgcgacgctctcccaggaagactactgccagtgctccgtgctccatgcgccgcgctggaacgccaccgtgcggtccatgtcctcgtagtatcgcccagactcgcccatgtagtcccacctgcatccaccgaccaccaagcacactctcactgcagaccagagaggattgccacgaataggtgtgtgcagttctactctacccctgcatcgagccggtgtgcgtccaccagaggccggagttgaaggagagcacgtcggcgtcgcgccatgactcggcgttctcgtagatgtcgtccagcatcagcacctgcttcccctggaccacgtcgatgtccaccagaaggaaattcctgcttgagccaattacagaaggccctgatatttgtcaaattgatggttgtagtgttaaattggaatacaagaggaggcaagtcaaatatggtaccaaacggcgcagcagcagttgatgtgcaacccgagtgtactgccgctcgaggaggccagtaagtgccaacaacatgaatagccaaagcagggaaatagggctggcgggggcacatgggtaacttggtcctggagcattggagaaggagcataccacaaggaaaccaacacgcttcttactctagcagagttccttgcttcctgaaggcctcatagctcagattactgggttaacgaacaactcatactttgatggagcacatgaggttcgacattatgtcaggaagcattcgaatcttggtcgtattgtgcttgaagttgctaaggactcgcaaatcccccgccaagcaaactgctagaaatcttttcagaggtggagatgatgaagatgatagtgctgatgccgacacaaatgatcctgttgtaccttggtcattaggtagagtaggagttgggcatatggtgtacatctccggtttgacttgtgccttgagttcaacaaatatgaaagtgctgagagaggtggcatctagaggacgtcatgtcgaacgtgtgaagaatttttttagaaatatgtatatttgtgcgaaactttttagaaacttgactccattttattttctatgttactctcggctttgtttcctatcctttccaatgacttgctatgcatttgcactgtatttggcatgtttaaaactgctacacaaaacttgctatatattttgtccaaaaatactatatccttgttatgattgattgatctttattttgtc

SEQ ID NO: 81172 - DNA, 1907 bp, Zea Mays
ccccgcgcgcgtcttcctccggcatgcgccagcccccccgagctcgcccgcgcaccaatctcgccgtcgggtatcccgcccgcgagcccgcgcaccaagctccttccccgcgacaagctccctcccccgcgacgcgtcttcctcctcgccctagatcgccgccccagctctctcctcaccccgcaatccccgccgcccatgctccgctctctactcgccccagatcgtcgcccctgttcgcgtggattgggtaccggtcccaactatctccatggattgcgcgtccgcgacaacccaatctcctcccggtctccatggaaggcgcgtcctccccccgtgattctcgattccccgcgtccgcgccccagatccactctcctctctcccacaatccccacggactctgccccgtatcaccaccccggctccttagaacgtgatccactctcctctctcctgcaatccccgctacctcaacccagatcgccgccctcgctctcgatcctcgcccacgctctccatggaaggcgaggccgcgatgctcgcgtggatctatgtagaggctgcgacgctctcccaggaagactactgccagtgctccgtgctccatgcgccgcgctggaacgccaccgtgcggtccatgtcctcgtagtatcgcccagactcgcccatgtagtcccacctgcatccaccgaccaccaagcacactctcactgcagaccagagaggattgccacgaataggtgtgtgcagttctactctacccctgcatcgagccggtgtgcgtccaccagaggccggagttgaaggagagcacgtcggcgtcgcgccatgactcggcgttctcgtagatgtcgtccagcatcagcacctgcttcccctggaccacgtcgatgtccaccagaaggaaattcctgcttgagccaattacagaaggccctgatatttgtcaaattgatggttgtagtgttaaattggaatacaagaggagcaaacgtgacatgccattacaatttcgtttatgcaaaaaagtaagttgcttatagtttagcctttggtttcaatttgcactttatagaattatactggcagagctcctgacggagcacctgacggagctcgccacaggtaccaaacggcgcagcagcagttgatgtgcaacccgagtgtactgccgctcgaggaggccagtaagtgccaacaacatgaatagccaaagcagggaaatagggctggcgggggcacatgggtaacttggtcctggagcattggagaaggagcataccacaaggaaaccaacacgcttcttactctagcagagttccttgcttcctgaaggcctcatagctcagattactgggttaacgaacaactcatactttgatggagcacatgaggttcgacattatgtcaggaagcattcgaatcttggtcgtattgtgcttgaagttgctaaggactcgcaaatcccccgccaagcaaactgctagaaatcttttcagaggtggagatgatgaagatgatagtgctgatgccgacacaaatgatcctgttgtaccttggtcattaggtagagtaggagttgggcatatggtgtacatctccggtttgacttgtgccttgagttcaacaaatatgaaagtgctgagagaggtggcatctagaggacgtcatgtcgaacgtgtgaagaatttttttagaaatatgtatatttgtgcgaaactttttagaaacttgactccattttattttctatgttactctcggctttgtttcctatcctttccaatgacttgctatgcatttgcactgtatttggcatgtttaaaactgctacacaaaacttgctatatattttgtccaaaaatactatatccttgttatgattgattgatctttattttgtc

SEQ ID NO: 81173 - DNA, 2271 bp, Zea Mays
ccccgcgcgcgtcttcctccggcatgcgccagcccccccgagctcgcccgcgcaccaatctcgccgtcgggtatcccgcccgcgagcccgcgcaccaagctccttccccgcgacaagctccctcccccgcgacgcgtcttcctcctcgccctagatcgccgccccagctctctcctcaccccgcaatccccgccgcccatgctccgctctctactcgccccagatcgtcgcccctgttcgcgtggattgggtaccggtcccaactatctccatggattgcgcgtccgcgacaacccaatctcctcccggtctccatggaaggcgcgtcctccccccgtgattctcgattccccgcgtccgcgccccagatccactctcctctctcccacaatccccacggactctgccccgtatcaccaccccggctccttagaacgtgatccactctcctctctcctgcaatccccgctacctcaacccagatcgccgccctcgctctcgatcctcgcccacgctctccatggaaggcgaggccgcgatgctcgcgtggatctatgtagaggctgcgacgctctcccaggaagactactgccagtgctccgtgctccatgcgccgcgctggaacgccaccgtgcggtccatgtcctcgtagtatcgcccagactcgcccatgtagtcccacctgcatccaccgaccaccaagcacactctcactgcagaccagagaggattgccacgaataggtgtgtgcagttctactctacccctgcatcgagccggtgtgcgtccaccagaggccggagttgaaggagagcacgtcggcgtcgcgccatgactcggcgttctcgtagatgtcgtccagcatcagcacctgcttcccctggaccacgtcgatgtccaccaggaacttgtacgtgtacaaagggtccacggagacgagctgcgtcggcgactgcagcgcggcggcgtgcagcaggcagacgagcgactcccactggttgcgccccagcgagtcgcccacgaacatcaccgtcttccccttcatccgtgtcaggaagaccgtggcacaacgcctgatgtcacgttgtcccagcggcgccgcggccggcgtcacgccacgcggatggtcacccacgccacgtccctagaccggtgtggtacgccggcgcccacagcgtcgatgaggaggaggtcggagcagcagtagctgtcatgggcagtgccgcagatgtggagcagtcgaatgagaggctagacgggctggagcaccacagcaggctggtgtcgctgttggccggtagccgctcctcccccaccggcaccgagagggacttgtgacccaaggatctgttcccgggggatgtggtgtttgcgctcgtcgatgatctcaggctcaaccactccaaggacccataggccatggggttatgcaatccaaagaaggaaattcctgcttgagccaattacagaaggccctgatatttgtcaaattgatggttgtagtgttaaattggaatacaagaggaggcaagtcaaatatggtaccaaacggcgcagcagcagttgatgtgcaacccgagtgtactgccgctcgaggaggccagtaagtgccaacaacatgaatagccaaagcagggaaatagggctggcgggggcacatgggtaacttggtcctggagcattggagaaggagcataccacaaggaaaccaacacgattactgggttaacgaacaactcatactttgatggagcacatgaggttcgacattatgtcaggaagcattcgaatcttggtcgtattgtgcttgaagttgctaaggactcgcaaatcccccgccaagcaaactgctagaaatcttttcagaggtggagatgatgaagatgatagtgctgatgccgacacaaatgatcctgttgtaccttggtcattaggtagagtaggagttgggcatatggtgtacatctccggtttgacttgtgccttgagttcaacaaatatgaaagtgctgagagaggtggcatctagaggacgtcatgtcgaacgtgtgaagaatttttttagaaatatgtatatttgtgcgaaactttttagaaacttgactccattttattttctatgttactctcggctttgtttcctatcctttccaatgacttgctatgcatttgcactgtatttggcatgtttaaaactgctacacaaaacttgctatatattttgtccaaaaatactatatccttgttatgattgattgatctttattttgtc

SEQ ID NO: 81174 - DNA, 2321 bp, Zea Mays
ccccgcgcgcgtcttcctccggcatgcgccagcccccccgagctcgcccgcgcaccaatctcgccgtcgggtatcccgcccgcgagcccgcgcaccaagctccttccccgcgacaagctccctcccccgcgacgcgtcttcctcctcgccctagatcgccgccccagctctctcctcaccccgcaatccccgccgcccatgctccgctctctactcgccccagatcgtcgcccctgttcgcgtggattgggtaccggtcccaactatctccatggattgcgcgtccgcgacaacccaatctcctcccggtctccatggaaggcgcgtcctccccccgtgattctcgattccccgcgtccgcgccccagatccactctcctctctcccacaatccccacggactctgccccgtatcaccaccccggctccttagaacgtgatccactctcctctctcctgcaatccccgctacctcaacccagatcgccgccctcgctctcgatcctcgcccacgctctccatggaaggcgaggccgcgatgctcgcgtggatctatgtagaggctgcgacgctctcccaggaagactactgccagtgctccgtgctccatgcgccgcgctggaacgccaccgtgcggtccatgtcctcgtagtatcgcccagactcgcccatgtagtcccacctgcatccaccgaccaccaagcacactctcactgcagaccagagaggattgccacgaataggtgtgtgcagttctactctacccctgcatcgagccggtgtgcgtccaccagaggccggagttgaaggagagcacgtcggcgtcgcgccatgactcggcgttctcgtagatgtcgtccagcatcagcacctgcttcccctggaccacgtcgatgtccaccaggaacttgtacgtgtacaaagggtccacggagacgagctgcgtcggcgactgcagcgcggcggcgtgcagcaggcagacgagcgactcccactggttgcgccccagcgagtcgcccacgaacatcaccgtcttccccttcatccgtgtcaggaagaccgtggcacaacgcctgatgtcacgttgtcccagcggcgccgcggccggcgtcacgccacgcggatggtcacccacgccacgtccctagaccggtgtggtacgccggcgcccacagcgtcgatgaggaggaggtcggagcagcagtagctgtcatgggcagtgccgcagatgtggagcagtcgaatgagaggctagacgggctggagcaccacagcaggctggtgtcgctgttggccggtagccgctcctcccccaccggcaccgagagggacttgtgacccaaggatctgttcccgggggatgtggtgtttgcgctcgtcgatgatctcaggctcaaccactccaaggacccataggccatggggttatgcaatccaaagaaggaaattcctgcttgagccaattacagaaggccctgatatttgtcaaattgatggttgtagtgttaaattggaatacaagaggaggcaagtcaaatatgaattatactggcagagctcctgacggagcacctgacggagctcgccacaggtaccaaacggcgcagcagcagttgatgtgcaacccgagtgtactgccgctcgaggaggccagtaagtgccaacaacatgaatagccaaagcagggaaatagggctggcgggggcacatgggtaacttggtcctggagcattggagaaggagcataccacaaggaaaccaacacgattactgggttaacgaacaactcatactttgatggagcacatgaggttcgacattatgtcaggaagcattcgaatcttggtcgtattgtgcttgaagttgctaaggactcgcaaatcccccgccaagcaaactgctagaaatcttttcagaggtggagatgatgaagatgatagtgctgatgccgacacaaatgatcctgttgtaccttggtcattaggtagagtaggagttgggcatatggtgtacatctccggtttgacttgtgccttgagttcaacaaatatgaaagtgctgagagaggtggcatctagaggacgtcatgtcgaacgtgtgaagaatttttttagaaatatgtatatttgtgcgaaactttttagaaacttgactccattttattttctatgttactctcggctttgtttcctatcctttccaatgacttgctatgcatttgcactgtatttggcatgtttaaaactgctacacaaaacttgctatatattttgtccaaaaatactatatccttgttatgattgattgatctttattttgtc

SEQ ID NO: 81175 - DNA, 2609 bp, Zea Mays
ccccgcgcgcgtcttcctccggcatgcgccagcccccccgagctcgcccgcgcaccaatctcgccgtcgggtatcccgcccgcgagcccgcgcaccaagctccttccccgcgacaagctccctcccccgcgacgcgtcttcctcctcgccctagatcgccgccccagctctctcctcaccccgcaatccccgccgcccatgctccgctctctactcgccccagatcgtcgcccctgttcgcgtggattgggtaccggtcccaactatctccatggattgcgcgtccgcgacaacccaatctcctcccggtctccatggaaggcgcgtcctccccccgtgattctcgattccccgcgtccgcgccccagatccactctcctctctcccacaatccccacggactctgccccgtatcaccaccccggctccttagaacgtgatccactctcctctctcctgcaatccccgctacctcaacccagatcgccgccctcgctctcgatcctcgcccacgctctccatggaaggcgaggccgcgatgctcgcgtggatctatgtagaggctgcgacgctctcccaggaagactactgccagtgctccgtgctccatgcgccgcgctggaacgccaccgtgcggtccatgtcctcgtagtatcgcccagactcgcccatgtagtcccacctgcatccaccgaccaccaagcacactctcactgcagaccagagaggattgccacgaataggtgtgtgcagttctactctacccctgcatcgagccggtgtgcgtccaccagaggccggagttgaaggagagcacgtcggcgtcgcgccatgactcggcgttctcgtagatgtcgtccagcatcagcacctgcttcccctggaccacgtcgatgtccaccagggtccacggagacgagctgcgtcggcgactgcagcgcggcggcgtgcagcaggcagacgagcgactcccactggttgcgccccagcgagtcgcccacgaacatcaccgtcttccccttcatccgtgtcaggaagaccgtggcacaacgcctgatgtcacgttgtcccagcggcgccgcggccggcgtcacgccacgcggatggtcacccacgccacgtccctagaccggtgtggtacgccggcgcccacagcgtcgatgaggaggaggtcggagcagcagtagctgtcatgggcagtgccgcagatgtggagcagtcgaatgagaggctagacgggctggagcaccacagcaggctggtgtcgctgttggccggtagccgctcctcccccaccggcaccgagagggacttgtgacccaaggatctgttcccgggggatgtggtgtttgcgctcgtcgatgatctcaggctcaaccactccaaggacccataggccatggggttatgcaatccaaaggtctccatcgccaatttcattttgtagacaaataagttagctcttctgatggcataccatttatagattgccaacgatctgaaggcatatatgaaggcttgttatctcttctgtgtttaattgatcagtgactttgatttggacctggttatcagcttgttatttctatctgaattttctcgctttatttgtactacactcgtgctaattatgtgagaatgatttgtgtcactatggtgttcatctgttattttatactattatatgtattcatctgtcatgttgttgaactcctgttatcaattgcagaaggaaattcctgcttgagccaattacagaaggccctgatatttgtcaaattgatggttgtagtgttaaattggaatacaagaggaggcaagtcaaatatggtaccaaacggcgcagcagcagttgatgtgcaacccgagtgtactgccgctcgaggaggccagtaagtgccaacaacatgaatagccaaagcagggaaatagggctggcgggggcacatgggtaacttggtcctggagcattggagaaggagcataccacaaggaaaccaacacgcttcttactctagcagagttccttgcttcctgaaggcctcatagctcagattactgggttaacgaacaactcatactttgatggagcacatgaggttcgacattatgtcaggaagcattcgaatcttggtcgtattgtgcttgaagttgctaaggactcgcaaatcccccgccaagcaaactgctagaaatcttttcagaggtggagatgatgaagatgatagtgctgatgccgacacaaatgatcctgttgtaccttggtcattaggtagagtaggagttgggcatatggtgtacatctccggtttgacttgtgccttgagttcaacaaatatgaaagtgctgagagaggtggcatctagaggacgtcatgtcgaacgtgtgaagaatttttttagaaatatgtatatttgtgcgaaactttttagaaacttgactccattttattttctatgttactctcggctttgtttcctatcctttccaatgacttgctatgcatttgcactgtatttggcatgtttaaaactgctacacaaaacttgctatatattttgtccaaaaatactatatccttgttatgattgattgatctttattttgtc

SEQ ID NO: 81176 - DNA, 2270 bp, Zea Mays
ccccgcgcgcgtcttcctccggcatgcgccagcccccccgagctcgcccgcgcaccaatctcgccgtcgggtatcccgcccgcgagcccgcgcaccaagctccttccccgcgacaagctccctcccccgcgacgcgtcttcctcctcgccctagatcgccgccccagctctctcctcaccccgcaatccccgccgcccatgctccgctctctactcgccccagatcgtcgcccctgttcgcgtggattgggtaccggtcccaactatctccatggattgcgcgtccgcgacaacccaatctcctcccggtctccatggaaggcgcgtcctccccccgtgattctcgattccccgcgtccgcgccccagatccactctcctctctcccacaatccccacggactctgccccgtatcaccaccccggctccttagaacgtgatccactctcctctctcctgcaatccccgctacctcaacccagatcgccgccctcgctctcgatcctcgcccacgctctccatggaaggcgaggccgcgatgctcgcgtggatctatgtagaggctgcgacgctctcccaggaagactactgccagtgctccgtgctccatgcgccgcgctggaacgccaccgtgcggtccatgtcctcgtagtatcgcccagactcgcccatgtagtcccacctgcatccaccgaccaccaagcacactctcactgcagaccagagaggattgccacgaataggtgtgtgcagttctactctacccctgcatcgagccggtgtgcgtccaccagaggccggagttgaaggagagcacgtcggcgtcgcgccatgactcggcgttctcgtagatgtcgtccagcatcagcacctgcttcccctggaccacgtcgatgtccaccagggtccacggagacgagctgcgtcggcgactgcagcgcggcggcgtgcagcaggcagacgagcgactcccactggttgcgccccagcgagtcgcccacgaacatcaccgtcttccccttcatccgtgtcaggaagaccgtggcacaacgcctgatgtcacgttgtcccagcggcgccgcggccggcgtcacgccacgcggatggtcacccacgccacgtccctagaccggtgtggtacgccggcgcccacagcgtcgatgaggaggaggtcggagcagcagtagctgtcatgggcagtgccgcagatgtggagcagtcgaatgagaggctagacgggctggagcaccacagcaggctggtgtcgctgttggccggtagccgctcctcccccaccggcaccgagagggacttgtgacccaaggatctgttcccgggggatgtggtgtttgcgctcgtcgatgatctcaggctcaaccactccaaggacccataggccatggggttatgcaatccaaagaaggaaattcctgcttgagccaattacagaaggccctgatatttgtcaaattgatggttgtagtgttaaattggaatacaagaggaggtaccaaacggcgcagcagcagttgatgtgcaacccgagtgtactgccgctcgaggaggccagtaagtgccaacaacatgaatagccaaagcagggaaatagggctggcgggggcacatgggtaacttggtcctggagcattggagaaggagcataccacaaggaaaccaacacgagttccttgcttcctgaaggcctcatagctcagattactgggttaacgaacaactcatactttgatggagcacatgaggttcgacattatgtcaggaagcattcgaatcttggtcgtattgtgcttgaagttgctaaggactcgcaaatcccccgccaagcaaactgctagaaatcttttcagaggtggagatgatgaagatgatagtgctgatgccgacacaaatgatcctgttgtaccttggtcattaggtagagtaggagttgggcatatggtgtacatctccggtttgacttgtgccttgagttcaacaaatatgaaagtgctgagagaggtggcatctagaggacgtcatgtcgaacgtgtgaagaatttttttagaaatatgtatatttgtgcgaaactttttagaaacttgactccattttattttctatgttactctcggctttgtttcctatcctttccaatgacttgctatgcatttgcactgtatttggcatgtttaaaactgctacacaaaacttgctatatattttgtccaaaaatactatatccttgttatgattgattgatctttattttgtc

SEQ ID NO: 81177 - DNA, 1415 bp, Zea Mays
ccccgcgcgcgtcttcctccggcatgcgccagcccccccgagctcgcccgcgcaccaatctcgccgtcgggtatcccgcccgcgagcccgcgcaccaagctccttccccgcgacaagctccctcccccgcgacgcgtcttcctcctcgccctagatcgccgccccagctctctcctcaccccgcaatccccgccgcccatgctccgctctctactcgccccagatcgtcgcccctgttcgcgtggattgggtaccggtcccaactatctccatggattgcgcgtccgcgacaacccaatctcctcccggtctccatggaagaaggaaattcctgcttgagccaattacagaaggccctgatatttgtcaaattgatggttgtagtgttaaattggaatacaagaggaggcaagtcaaatatggtttgtgtgacagcacgttactaacttactctactatatctgcatgagaaaggatgaaccctgtttgcatgtatactaattaatctacggattcattaatgtgtgaataagattttatttaattatgacagcaaacgtgacatgccattacaatttcgtttatgcaaaaaagtaagttgcttatagtttagcctttggtttcaatttgcactttatagaattatactggcagagctcctgacggagcacctgacggagctcgccacaggtaccaaacggcgcagcagcagttgatgtgcaacccgagtgtactgccgctcgaggaggccagtaagtgccaacaacatgaatagccaaagcagggaaatagggctggcgggggcacatgggtaacttggtcctggagcattggagaaggagcataccacaaggaaaccaacacgattactgggttaacgaacaactcatactttgatggagcacatgaggttcgacattatgtcaggaagcattcgaatcttggtcgtattgtgcttgaagttgctaaggactcgcaaatcccccgccaagcaaactgctagaaatcttttcagaggtggagatgatgaagatgatagtgctgatgccgacacaaatgatcctgttgtaccttggtcattaggtagagtaggagttgggcatatggtgtacatctccggtttgacttgtgccttgagttcaacaaatattgctgagagaggtggcatctagaggacgtcatgtcgaacgtgtgaagaatttttttagaaatatgtatatttgtgcgaaactttttagaaacttgactccattttattttctatgttactctcggctttgtttcctatcctttccaatgacttgctatgcatttgcactgtatttggcatgtttaaaactgctacacaaaacttgctatatattttgtccaaaaatactatatccttgttatgattgattgatctttattttgtc

SEQ ID NO: 81178 - DNA, 2599 bp, Zea Mays
ccccgcgcgcgtcttcctccggcatgcgccagcccccccgagctcgcccgcgcaccaatctcgccgtcgggtatcccgcccgcgagcccgcgcaccaagctccttccccgcgacaagctccctcccccgcgacgcgtcttcctcctcgccctagatcgccgccccagctctctcctcaccccgcaatccccgccgcccatgctccgctctctactcgccccagatcgtcgcccctgttcgcgtggattgggtaccggtcccaactatctccatggattgcgcgtccgcgacaacccaatctcctcccggtctccatggaaggcgcgtcctccccccgtgattctcgattccccgcgtccgcgccccagatccactctcctctctcccacaatccccacggactctgccccgtatcaccaccccggctccttagaacgtgatccactctcctctctcctgcaatccccgctacctcaacccagatcgccgccctcgctctcgatcctcgcccacgctctccatggaaggcgaggccgcgatgctcgcgtggatctatgtagaggctgcgacgctctcccaggaagactactgccagtgctccgtgctccatgcgccgcgctggaacgccaccgtgcggtccatgtcctcgtagtatcgcccagactcgcccatgtagtcccacctgcatccaccgaccaccaagcacactctcactgcagaccagagaggattgccacgaataggtgtgtgcagttctactctacccctgcatcgagccggtgtgcgtccaccagaggccggagttgaaggagagcacgtcggcgtcgcgccatgactcggcgttctcgtagatgtcgtccagcatcagcacctgcttcccctggaccacgtcgatgtccaccaggaacttgtacgtgtacaaagggtccacggagacgagctgcgtcggcgactgcagcgcggcggcgtgcagcaggcagacgagcgactcccactggttgcgccccagcgagtcgcccacgaacatcaccgtcttccccttcatccgtgtcaggaagaccgtggcacaacgcctgatgtcacgttgtcccagcggcgccgcggccggcgtcacgccacgcggatggtcacccacgccacgtccctagaccggtgtggtacgccggcgcccacagcgtcgatgaggaggaggtcggagcagcagtagctgtcatgggcagtgccgcagatgtggagcagtcgaatgagaggctagacgggctggagcaccacagcaggctggtgtcgctgttggccggtagccgctcctcccccaccggcaccgagagggacttgtgacccaaggatctgttcccgggggatgtggtgtttgcgctcgtcgatgatctcaggctcaaccactccaaggacccataggccatggggttatgcaatccaaaggtctccatcgccaatttcattttgtagacaaataagttagctcttctgatggcataccatttatagattgccaacgatctgaaggcatatatgaaggcttgttatctcttctgtgtttaattgatcagtgactttgatttggacctggttatcagcttgttatttctatctgaattttctcgctttatttgtactacactcgtgctaattatgtgagaatgatttgtgtcactatggtgttcatctgttattttatactattatatgtattcatctgtcatgttgttgaactcctgttatcaattgcagaaggaaattcctgcttgagccaattacagaaggccctgatatttgtcaaattgatggttgtagtgttaaattggaatacaagaggaggtaccaaacggcgcagcagcagttgatgtgcaacccgagtgtactgccgctcgaggaggccagtaagtgccaacaacatgaatagccaaagcagggaaatagggctggcgggggcacatgggtaacttggtcctggagcattggagaaggagcataccacaaggaaaccaacacgagttccttgcttcctgaaggcctcatagctcagattactgggttaacgaacaactcatactttgatggagcacatgaggttcgacattatgtcaggaagcattcgaatcttggtcgtattgtgcttgaagttgctaaggactcgcaaatcccccgccaagcaaactgctagaaatcttttcagaggtggagatgatgaagatgatagtgctgatgccgacacaaatgatcctgttgtaccttggtcattaggtagagtaggagttgggcatatggtgtacatctccggtttgacttgtgccttgagttcaacaaatatgaaagtgctgagagaggtggcatctagaggacgtcatgtcgaacgtgtgaagaatttttttagaaatatgtatatttgtgcgaaactttttagaaacttgactccattttattttctatgttactctcggctttgtttcctatcctttccaatgacttgctatgcatttgcactgtatttggcatgtttaaaactgctacacaaaacttgctatatattttgtccaaaaatactatatccttgttatgattgattgatctttattttgtc

SEQ ID NO: 81179 - DNA, 2304 bp, Zea Mays
ccccgcgcgcgtcttcctccggcatgcgccagcccccccgagctcgcccgcgcaccaatctcgccgtcgggtatcccgcccgcgagcccgcgcaccaagctccttccccgcgacaagctccctcccccgcgacgcgtcttcctcctcgccctagatcgccgccccagctctctcctcaccccgcaatccccgccgcccatgctccgctctctactcgccccagatcgtcgcccctgttcgcgtggattgggtaccggtcccaactatctccatggattgcgcgtccgcgacaacccaatctcctcccggtctccatggaaggcgcgtcctccccccgtgattctcgattccccgcgtccgcgccccagatccactctcctctctcccacaatccccacggactctgccccgtatcaccaccccggctccttagaacgtgatccactctcctctctcctgcaatccccgctacctcaacccagatcgccgccctcgctctcgatcctcgcccacgctctccatggaaggcgaggccgcgatgctcgcgtggatctatgtagaggctgcgacgctctcccaggaagactactgccagtgctccgtgctccatgcgccgcgctggaacgccaccgtgcggtccatgtcctcgtagtatcgcccagactcgcccatgtagtcccacctgcatccaccgaccaccaagcacactctcactgcagaccagagaggattgccacgaataggtgtgtgcagttctactctacccctgcatcgagccggtgtgcgtccaccagaggccggagttgaaggagagcacgtcggcgtcgcgccatgactcggcgttctcgtagatgtcgtccagcatcagcacctgcttcccctggaccacgtcgatgtccaccaggaacttgtacgtgtacaaagggtccacggagacgagctgcgtcggcgactgcagcgcggcggcgtgcagcaggcagacgagcgactcccactggttgcgccccagcgagtcgcccacgaacatcaccgtcttccccttcatccgtgtcaggaagaccgtggcacaacgcctgatgtcacgttgtcccagcggcgccgcggccggcgtcacgccacgcggatggtcacccacgccacgtccctagaccggtgtggtacgccggcgcccacagcgtcgatgaggaggaggtcggagcagcagtagctgtcatgggcagtgccgcagatgtggagcagtcgaatgagaggctagacgggctggagcaccacagcaggctggtgtcgctgttggccggtagccgctcctcccccaccggcaccgagagggacttgtgacccaaggatctgttcccgggggatgtggtgtttgcgctcgtcgatgatctcaggctcaaccactccaaggacccataggccatggggttatgcaatccaaagaaggaaattcctgcttgagccaattacagaaggccctgatatttgtcaaattgatggttgtagtgttaaattggaatacaagaggaggcaagtcaaatatggtaccaaacggcgcagcagcagttgatgtgcaacccgagtgtactgccgctcgaggaggccagtaagtgccaacaacatgaatagccaaagcagggaaatagggctggcgggggcacatgggtaacttggtcctggagcattggagaaggagcataccacaaggaaaccaacacgagttccttgcttcctgaaggcctcatagctcagattactgggttaacgaacaactcatactttgatggagcacatgaggttcgacattatgtcaggaagcattcgaatcttggtcgtattgtgcttgaagttgctaaggactcgcaaatcccccgccaagcaaactgctagaaatcttttcagaggtggagatgatgaagatgatagtgctgatgccgacacaaatgatcctgttgtaccttggtcattaggtagagtaggagttgggcatatggtgtacatctccggtttgacttgtgccttgagttcaacaaatatgaaagtgctgagagaggtggcatctagaggacgtcatgtcgaacgtgtgaagaatttttttagaaatatgtatatttgtgcgaaactttttagaaacttgactccattttattttctatgttactctcggctttgtttcctatcctttccaatgacttgctatgcatttgcactgtatttggcatgtttaaaactgctacacaaaacttgctatatattttgtccaaaaatactatatccttgttatgattgattgatctttattttgtc

SEQ ID NO: 81180 - DNA, 2300 bp, Zea Mays
ccccgcgcgcgtcttcctccggcatgcgccagcccccccgagctcgcccgcgcaccaatctcgccgtcgggtatcccgcccgcgagcccgcgcaccaagctccttccccgcgacaagctccctcccccgcgacgcgtcttcctcctcgccctagatcgccgccccagctctctcctcaccccgcaatccccgccgcccatgctccgctctctactcgccccagatcgtcgcccctgttcgcgtggattgggtaccggtcccaactatctccatggattgcgcgtccgcgacaacccaatctcctcccggtctccatggaaggcgcgtcctccccccgtgattctcgattccccgcgtccgcgccccagatccactctcctctctcccacaatccccacggactctgccccgtatcaccaccccggctccttagaacgtgatccactctcctctctcctgcaatccccgctacctcaacccagatcgccgccctcgctctcgatcctcgcccacgctctccatggaaggcgaggccgcgatgctcgcgtggatctatgtagaggctgcgacgctctcccaggaagactactgccagtgctccgtgctccatgcgccgcgctggaacgccaccgtgcggtccatgtcctcgtagtatcgcccagactcgcccatgtagtcccacctgcatccaccgaccaccaagcacactctcactgcagaccagagaggattgccacgaataggtgtgtgcagttctactctacccctgcatcgagccggtgtgcgtccaccagaggccggagttgaaggagagcacgtcggcgtcgcgccatgactcggcgttctcgtagatgtcgtccagcatcagcacctgcttcccctggaccacgtcgatgtccaccagggtccacggagacgagctgcgtcggcgactgcagcgcggcggcgtgcagcaggcagacgagcgactcccactggttgcgccccagcgagtcgcccacgaacatcaccgtcttccccttcatccgtgtcaggaagaccgtggcacaacgcctgatgtcacgttgtcccagcggcgccgcggccggcgtcacgccacgcggatggtcacccacgccacgtccctagaccggtgtggtacgccggcgcccacagcgtcgatgaggaggaggtcggagcagcagtagctgtcatgggcagtgccgcagatgtggagcagtcgaatgagaggctagacgggctggagcaccacagcaggctggtgtcgctgttggccggtagccgctcctcccccaccggcaccgagagggacttgtgacccaaggatctgttcccgggggatgtggtgtttgcgctcgtcgatgatctcaggctcaaccactccaaggacccataggccatggggttatgcaatccaaagaaggaaattcctgcttgagccaattacagaaggccctgatatttgtcaaattgatggttgtagtgttaaattggaatacaagaggaggcaagtcaaatatggtaccaaacggcgcagcagcagttgatgtgcaacccgagtgtactgccgctcgaggaggccagtaagtgccaacaacatgaatagccaaagcagggaaatagggctggcgggggcacatgggtaacttggtcctggagcattggagaaggagcataccacaaggaaaccaacacgcttcttactctagcagagttccttgcttcctgaaggcctcatagctcagattactgggttaacgaacaactcatactttgatggagcacatgaggttcgacattatgtcaggaagcattcgaatcttggtcgtattgtgcttgaagttgctaaggactcgcaaatcccccgccaagcaaactgctagaaatcttttcagaggtggagatgatgaagatgatagtgctgatgccgacacaaatgatcctgttgtaccttggtcattaggtagagtaggagttgggcatatggtgtacatctccggtttgacttgtgccttgagttcaacaaatatgaaagtgctgagagaggtggcatctagaggacgtcatgtcgaacgtgtgaagaatttttttagaaatatgtatatttgtgcgaaactttttagaaacttgactccattttattttctatgttactctcggctttgtttcctatcctttccaatgacttgctatgcatttgcactgtatttggcatgtttaaaactgctacacaaaacttgctatatattttgtccaaaaatactatatccttgttatgattgattgatctttattttgtc

SEQ ID NO: 81181 - DNA, 724 bp, Zea Mays
tgtggccgttctacctgaacggcaggtcacggtcgcgttcggcggctcgacggtgggacggcgacggtgcgagagctggagcgtgctactcaagacaaaggatcaagcgatgttggaagatattctggactcaatgaagaattggttacgggaacagcactcggttgaggaaaattgcagcgacattggagtgatttgaagtggaaaataccctttcttttctgtttggtctgaatactgttaaattacatcgaaaaaactgctttgatcctggaagccgtggatgcaaaattttgtcccagtcgtggaagctgtcgctgtaatggatgccgtatgaggttttttcttttagtgattggcctgtttttagatctgttaggttagttttatcagtgatgctttacgtgaagctttatggtgtgtactagctgcgatctggcggctgatttcagaactttgttagttgaactttgtcaggtcatagatattaagctggtgatttgaagtctcagttcttagtggagggtctgttttttttttgatggtcatgggtgtcatgtgtggagcttccctggttaactggttatcccagttcaacgctgtggggtgtgctctatgtagctacctctgttattgctttcttaaaagctgagtaaaatctccttaaaaaaatatgattatcatgagaaaaacataaataagaaggcacttacgaacatcgcca

SEQ ID NO: 81182 - DNA, 1355 bp, Zea Mays
cttgtaggaatgatactggaatttcttctcgtctgaatcagagaatggataaattggggaatcttcctattattgattggattgggggagttggtaacaaggtttcacgtatccaggagcgtggtttttccccaacttataacatggaaaggagtagcatgcatgggtgcgggactgaggtgattaacaagcgagctccacccaagcttgcaaaggaatccatggaggattttctagatgctagtttggtcagggagacgatgatggaagggacaaaggaggaagtctgggagcgggaatccatgagcgggttaccgacgaaaaaaggcatgtcatcggcccaagtgtttgggcactcctggaggcccatcaaccccacgtggtgctgggttccaagaagcggaatccacactaagtcatgctaccctgctcgaccggacgaagtgcgtaggcttcggctctctgccaagtccgtgtctagggttagacatcaatccttggaggctcgttcctatgcccaagtagtgagggaaggcagaatggcttggaggagggatcatggagggagcaattggaaacggcgccaagatgaatggatggaggaagatgaccttctggaaggggatccctgcagagaacaagatctgcgcgctaaacttcagaggggatcaggagattctactgacaggatcccagcagagcagagctggagcgtgctactcaagacaaaggatcaagcgatgttggaagatattctggactcaatgaagaattggttacgggaacagcactcggttgaggaaaattgcagcgacattggagtgatttgaagtggaaaataccctttcttttctgtttggtctgaatactgttaaattacatcgaaaaaactgctttgatcctggaagccgtggatgcaaaattttgtcccagtcgtggaagctgtcgctgtaatggatgccgtatgaggttttttcttttagtgattggcctgtttttagatctgttaggttagttttatcagtgatgctttacgtgaagctttatggtgtgtactagctgcgatctggcggctgatttcagaactttgttagttgaactttgtcaggtcatagatattaagctggtgatttgaagtctcagttcttagtggagggtctgttttttttttgatggtcatgggtgtcatgtgtggagcttccctggttaactggttatcccagttcaacgctgtggggtgtgctctatgtagctacctctgttattgctttcttaaaagctgagtaaaatctccttaaaaaaatatgattatcatgagaaaaacataaataagaaggcacttacgaacatcgcca

SEQ ID NO: 81183 - DNA, 1424 bp, Zea Mays
  misc_feature (1423)..(1424): n is a, c, g, or t
atggataaattggggaatcttcctattattgattggattgggggagttggtaacaaggtttcacgtatccaggagcgtggtttttccccaacttataacatggaaaggagtagcatgcatgggtgcgggactgaggtgattaacaagcgagctccacccaagcttgcaaaggaatccatggaggattttctagatgctagtttggtcagggagacgatgatggaagggacaaaggaggaagtctgggagcgggaatccatgagcgggttaccgacgaaaaaaggcatgtcatcggcccaagtgtttgggcactcctggaggcccatcaaccccacgtggtgctgggttccaagaagcggaatccacactaagtcatgctaccctgctcgaccggacgaagtgcgtaggcttcggctctctgccaagtccgtgtctagggttagacatcaatccttggaggctcgttcctatgcccaagtagtgagggaaggcagaatggcttggaggagggatcatggagggagcaattggaaacggcgccaagatgaatggatggaggaagatgaccttctggaaggggatccctgcagagaacaagatctgcgcgctaaacttcagaggggatcaggagattctactgacaggatcccagcagagcaggggaggctttggaggtcgacggggtttgggacgctctgaatttgatggtcaaggaagtagacagtttgagacaaaggaaaaattccgtggtgcccaattctctggagacagtggtttgatcacagaaaacagattggggacacactttgaaaaagattttcgtcttcaggaagatcagggcaaagaaatcaaatgttttcgctgtactcagtctggacaccaccaatctgagtgtagtaatgaacctctttgctacaaatgcaagggatttgggcacatggctgcagagtgccacatgcagaggaaactgaggttgtttggatttggtatgccagaacagggtttctttggtattgatatttctgaaaacaaagagcagatggcgggtctggtggcttctatccatgttttggagggggaacctaatgaggaaaaattagaggaggaactaaaaaatttagtgcaagaaaattgggaattcagggtgagaagggtggataagtttgacttcattgcctccttcccagataaaggatcccttgagacttatgctaagctcaatagcctggagatgcctatctataggttcagagttaaaattggaaaaaccagtgtggatccaaaagcttcagcagaattacagagtgtttgggttaagattttcaacataccagagaaagcacgtgagaaaattattgtgaaggaagtggctagcttagttggtaaacctgtgacagtagatgagctgagtctgatcaaagann

SEQ ID NO: 81184 - DNA, 2455 bp, Zea Mays
cctgtgttggtaaagctagataggtttttggtttcgacagagtgggaagagaaatttccctcctgctctgcccatggactgaccagggtggggtctgatcataaccctattattattgactccagggatcaaatccatcccaaaccaagatatttctactttgaaaacaactggtttttgcaacctgggtttgaagaattagtcaaagaaaaatggatcgagaagttaaggaaacgacctgtgggaatctattcaattgaagggtggcatgggagcttaacagcgttgaggatgttccttaaagggtggcataggaggctgcttgggtataaaaagaaagagaaaaatgatctcatccaggagctagatcagatagatatattgatagaggatcaggttaatctatgggagaactggtcaaaaagactcgcgatagagaaaaagcttgagcatatttatcatttagatgaggtgttctggcagcaaagggctggtagaaaatggactgttaaaggggactctaattctagattttttcatctatatgctaatgggaggagaaggaagaatacaattgcctatttggaaacagacaagggggtctgtatggatcagaaagcactgatcgcccacattgtgaacttctacaaaatcctatttggtccgaacacaccctgtaatatgaagctgagtgaggacttttggagggacagatcaatgaccagcaaagaggaaatggaatccctggccaagccgtttgaggttagtgaaattaaacaggctattgatcaaatgcacaatgagtcagcccctggcccaaatggttttggtgcctctttcttcaaaaagttctggaatcttattaaagaggatttgatcatgatgttcagtgacttttatgcagggaagttggatatccaacgtcttaattttggggttatcacgttaattcccaagattaaagaagcaagtaatattaggcagtatcggcccatttgtctgttaaatgtggattttaaaatcttcaccaaagtgctgacaaataggttgtctctagtagccaaggaggttattggaggcagccagacaggtttcattaaagataggaatatcctagagggggtggttattttacatgagattattcatgagctgaagacaaagaaaaaaaagggtttgatattaaaaattgattttgaaaaagcttatgacaaagtcagctgggtttttttggaggaagttatgaaaacgaaaaagttcccagataggtggatcgatatggtgatgaggacagttaaagggagaaaagtctgtgtgaacattaatggggagaggagcaatttttttaaaactttcagaggccttaggcagggtgaccctctttcgcctctgttattcaacctggtagcggatgcattaagtgccctattagataaaggggttgagaagggccacatttctggtgttttgggcgaccttgttcctggtggcatttcccacatccaatatgcagatgatacggtgatcatgatagatgggtctgataggtcaatcttaaacctgaaattaatcctttactgtttcgaatggatgtctggtttaaaaataaacttccacaaaagcgaggtctttgtctttggggcagttcaacaagaaagggaaaggatggcaaatatgcttaactgttcccttggatcttggccgatgaaatacctaggcattcctatttcggatggccgtctgaaaccatctgtgtttgaccatatagtcgaaaagatggaaaaaaggctggacccatggaaagagctggagcgtgctactcaagacaaaggatcaagcgatgttggaagatattctggactcaatgaagaattggttacgggaacagcactcggttgaggaaaattgcagcgacattggagtgatttgaagtggaaaataccctttcttttctgtttggtctgaatactgttaaattacatcgaaaaaactgctttgatcctggaagccgtggatgcaaaattttgtcccagtcgtggaagctgtcgctgtaatggatgccgtatgaggttttttcttttagtgattggcctgtttttagatctgttaggttagttttatcagtgatgctttacgtgaagctttatggtgtgtactagctgcgatctggcggctgatttcagaactttgttagttgaactttgtcaggtcatagatattaagctggtgatttgaagtctcagttcttagtggagggtctgttttttttttgatggtcatgggtgtcatgtgtggagcttccctggttaactggttatcccagttcaacgctgtggggtgtgctctatgtagctacctctgttattgctttcttaaaagctgagtaaaatctccttaaaaaaatatgattatcatgagaaaaacataaataagaaggcacttacgaacatcgcca

SEQ ID NO: 81185 - DNA, 2137 bp, Zea Mays
tgaggcaggcgacagcggggatgaaaaagtcatcctagaagcatcgcatctcgtgtccgcgtcgttctgcgctccgcctcattctttctaccttcgtctctctctgtgaccacctccacccctcctcttcttcttcctccccttctcccccgatctgcggcggggttgattcgatttcgatccccttctccatccgtcgcccacctccccgcccaggcagccaacgcaatccgctccccgaggcgcctccctgaccctgactcccctgcccccacaacgtgcgtgctcactcgcggtcgggcgggcggggccggcacactcaccgtcaccacacttattaattcctcttccgcgtccgcgcttcaaaaacctcctccggctcgtccccctctaaccagtccccagtcccgcggcggccgcattgcccgccgccgcaccgtgtccggctaggactaggacccctgtttgggctcttgcgtttcgattcctgggtcgtctgcaaggagtgtggccgacggagggggccaaaatgtgggcggagagggtggtcggcgagcgccggatgcggcagatccagcgcttcgcgcggaacgccaagctcaccgtcgtctgcctcctcctcaccgtagttgtgctccgcggcaccgtcggcgccggccgcttcggcacgccgcagcaggacctcatcgagctccgccagcacttcgtctcccacccgcaccgggcgctcgcggagcaccacgacgccaggtccagggcctccaccaccaccacgtcgtcctcgtcctcgtcttcctccggccgccgcgacgagcccgacccaccgccgaggtcgctcagggacccgccctacacgctggggcccaagatctccgactgggacgagcagcgcgccgcctggcaccgccgccacccggagacgccgcctttcctcaacgacatcaagccacgggtgctgctcgtcacggggtcctcgcccaagccctgcgagaaccccgtcggggaccactacctcctcaagtccatcaagaacaagatggactactgccgcgtccacggcatcgaggtcttctacaacctgatcatgcacggctgggacgagatggtctacgacgacaagaactggattgggctcaacaccggcagcttcttgctgcgcaactgccagtggtcgcttgatatgctggatacctgggcgccaatggggccaaagggccctgtccgcatcgaggccggcaaggtgctgaccaagtccttgaaggatcggccagtattcgaggccgatgatcagtcggccatggtgtacatcctcgcgacacagcgcgagaaatggggtgataaggtttaccttgagaatgggtactacctccacggctactgggggatcttggtcgacaggtatgaggagatgcttgagaactacaagccagggctaggtgatcaccggtggccgctcgtcacacattttgtcgggtgcaagccatgcggcaaatttggagactaccctgtcgagcgatgcctcaagaacatggaccgtgcattcaattttggggataaccagatcttgcagatgtatgggttcacacacaagtcactagcaagcaggagagtgaagaggatcaggaacgagaccagcaacccgcttgagacgaaggatgagcttgggctgcttcatccagcattcaaggctgtgaagacttccacatgataattagagtacagttccacttgtttattttgttggctcgttctagatcctgttgggtctataatccaaagtgttcttttttgtagaatcgggtgacgacagaagtttgggttggggtcatgggatggatatctttgttgtaatgtgaggtgttaggagaattatgttatgtttatttattggcataagttatgtcttacacgtacaaatgagttaatggatgaactcaagttattggttcaatgatagatttcaatggagtttcctgttttttttattattgccgggatttatgttaggctgtctccactctctagtagactgtgtatacttagactctactgtttatacaataggaggtgagatataaagtgctggagaaggccaaagtgtggtaatagccctgtaggtgttcttaaatcaagcttg

SEQ ID NO: 81186 - DNA, 898 bp, Zea Mays
agccccaaatacacagcctaggcccacctattcggacacaccagaaaagagagagagagaggaaaagaacccaacacgctctctcgcgcggcaagagcttcccggcccgaaaccgaaagcaccaccaccaccaccaccaatctctgcgtttttcgtctgcggcggcggcggcagcagcggaggaggtagacgagatgctgtccgccgacatccccccaaaccagaccatctacctcaacaacctcaacgagaaggtcaagaaagaagagttgaagagatcgctttatgccctgtgctcgcagtatggaaggatactggatgtggtggctctgaaaacacagaaactgagagggcaggcatgggtggtgtttagcgagattacagctgctaccaatgctttccgtggattgcaagactttgatttctacggcaaaaaaatgcgagtacaatatgcaaaaacaaaatcagactgtattgcaaaagaagatggtacttatgcacctaaggagaaaaggaagaagcaagaggagaaagctgctgagaaaaaacgacgagcagaagaggcacagcaagctggccccaatgctgctgctgctcaaagcaatggaactgttgtcgttgtgcatgtctgaaccatctcaactgatgttggacaagcttttcttcaattggtgctaccactatcacgtatatcatcattctggacccgatccctttttgtatgcccataaatccaacacaacgtacacattttcacaagacttttgctaaacatgacgtcttttttaggccagcattctgcaccatacaacatatgagatgtaatgtcctatacaacttgccttttagcttctgtggtaccctcttgtcataaaaaaggccagatgcttgacgcaac

SEQ ID NO: 81187 - DNA, 1097 bp, Zea Mays
agccccaaatacacagcctaggcccacctattcggacacaccagaaaagagagagagagaggaaaagaacccaacacgctctctcgcgcggcaagagcttcccggcccgaaaccgaaagcaccaccaccaccaccaccaatctctgcgtttttcgtctgcggcggcggcggcagcagcggaggaggtagacgagatgctgtccgccgacatccccccaaaccagaccatctacctcaacaacctcaacgagaaggtcaagaaagaagtatggaaggatactggatgtggtggctctgaaaacacagaaactgagagggcaggcatgggtggtgtttagcgagattacagctgctaccaatgctttccgtggattgcaagactttgatttctacggcaaaaaaatgcgagtacaatatgcaaaaacaaaatcagactgtattgcaaaagaagatggtacttatgcacctaaggagaaaaggaagaagcaagaggagaaagctgctgagaaaaaacgacgagcagaagaggcacagcaagctggccccaatgctgctgctgctcaaagcaatggaactggctatcaagcgtctcgtctgggcaaggcttcgcaggagccacctgctcctccgaacaacatcctcttcatccagaacttgccagaccagaccacgagcatgatgctccagatcctgttccagcagtatcccggcttccgggaagtccggatgatcgaagccaaaccaggcattgcctttgtggagttcgaggacgacggccagtccatggtggcgatgcaggctctccagggcttcaagatcaccccggagaaccccatggctatatcctatgccaaaaaatgagaaccctcgcggaatccctgtacccaatacccataatattttccgttccgccttccggaatcgagccacagtatctagtctactttccggccatgtatttttggaaagcacttgcttaatttagaagttagactcttgccacttttaaaccgtgtttggtgctcagtctttatgttgagcctgcttttgctcttgtcaagtctggtattgtgcctatatatagggctgtctcgatt

SEQ ID NO: 81188 - DNA, 4880 bp, Zea Mays
cgaaactactagcctccctctcccagtttctccccctccctatctctctgtccctgcttgcattgctcgtgttgacgcgcctgcaagtacgagacagcgagcgggaggaagaagaaacaaaaaggccggcccccgatgctagctcgccgcaagagcactaccaccacgccaatccattgaggcggcttcgttagcgtagcggcggccggcggtggaagctaagtgtaaagcggccgcctgctcggggggataaaagctacaacgggcagcggcaggaggaggcgtcgtctcgaggactgcgcgcaatgcccctgtcgcggcacacggtcgggaacgagtacgcgctgggtggccgcgacctctaccgcgcggccgaccagcacgacccggaggacgtcctcgatggcgtcgccatggccggactcgtcggcgtcctccgccagctcggcgacctcgccgagtttgctgcacaggtgttccacggcctgtacgacgaggtgatgagcacgtccgcgcgagggcacggcctcatgctccgggtgcagcagctggaggcagagctgccgctgctggagagagactcctgccagagagactacctgcatgtcgcttctaacaggggtgtcgattggcgttcgaatccgagggtcgaccaaggggttgtcacgagaggcgacacgcctcgcttcatcatggagtcaatcaagcagtgtcgcggaccacccaagctcttcatgctcgacaagtatgatatcggcggcgagggggcgtgcttgaagagatacaccgacccgtctttcttcaggacggattccgcatgttccaccttgccgcatgaggaaggaattcgagatgaaagaagacctcccaaagccatggagatcaggcctaaccttgagaatgcccagattttccagccccctaacgcagccgacaatgtctccaagctggagactgatccatctgctgaagctatggatgaagtgcccacaaaccgcagacggctgaagtaccgccaactaaatggatctgtattccaaagcttcagaccacttatgctgaatctgtatgaaaagccttcgtcagaggagaaactcgtcacaggtggccactcaaaagtgcgtatatctgtgaatggttcacctgaatcggatactgaagagagagataccatggtagacacgtccgtcaacatgggcaaaggcaaggtcgctgttcgcaagaacagaccagtttctgaagaagcactgtcacgttcttcagatgctcggtcagctggaagcagcaagggctacaactccgaattggatgtctacgtggacgcattaaccacggtggactctgaagcggagacagactcggaacacaggggccatggacaatgtacctttgatcggatggattcagacaatagattctccaatgctcaaaacgccatgacatcgaggaacagcaacttcgacaagaaagataggccagatgttccctcagcaaatagagatatgagtaaccagcatgaagaagccacggtctccacacaaaacaccaaaccagtggttgttggcgaacatgagaggaccagctcgttagaggaactgcttggccaagaaaaacctgcttcttgggatcatgagaggactagctccttggaggaattgctcaccgaagatttcaatgctccagaatctggagcaagagagcaggctactgaagagcagagctgcaatggcagtgccaccggtgctgtatcaaatggcacacaagatattactaagaagaccaaggaagtcaaggagaactctaacattgcaactatttccttcaagaaaatagcaagcaagaggtccagatatgtcggcagcatggctgcaaaagttggcattctgccaaggaaactctccaagaagcatgaccctttctctgattccctccggtgcatggcgaagcaactccttgaactgaagtacgatggcactaaagatagcgacttatatgactttgaagcaaacagtgtgggatgtgatgtcaagtatcagggaatttctgaccctcctgttgaaattaaggagagtgacgtgcacaaatttctgccagattcatcctatgatgatgtgggttcaagaaaatgcccgcaggaagaaatgaaccatgggcaggagcatgatgctccacctactgacagtccacatgattcagtccctgatgaaggaaacggatttcaggaccccaacatgatctacttggcaagcatcatcacatcttccagttcccaagaggaagaaggatgtgcaagtacttcactgcatgagaattcatctatggcagtgctcaaccatattttggagcatgctcaagagaagtttgaggaacatcttgacaaggatgtgaatgaggacattcatacagaagtcatttctgaaaattcatctggcaagtgtgaagacttgaaagaagtcagcatttactcagagcaggtgaatgtggaagatatggaggaaagcaataaatctgatgtatatgtgttggatgatgaaacagccgagtacatagaagagcaagtagtttcagatggtatgaactcttcaccggtttcatccaagcaatcagatgatccctgccggataactccactcgccctcgcagatgaagatgatacagtggcatgtaaggtcatcgatagccctgaagtggatcatattacattatcagaaacattcacggacattgatctacctaatgtggtaaatgagtcagtaatcagcagcgaacatgccatgccagaaaatgaacagtactatttccatccagaaactacttttggacaagatctgtgtctcgacaacaatgaaattgtaggggaaaatggggaagttccactatgcagctcaaccactgtggctataactcctgaaccaactgtaaacagagagatagaacatgagtttcatcaagctgtgtatcaggaaccatcgaattcattcaatagcagtaaagtttttggagatccactagcttctgactccagagatgttgcaccgtcagtcatctcgagctttgattggatgcttaatggtgcaatgcagcagtcattcaatgtctttccttctcatccaactaatggaaatgaacaagaaaatggttcttctgaagatgcgccaccacttcctcctcttccaccgatgcagtggagaacaaacaagatacagacatgctcatcaccgttatctgcaaagatcgggagaccaccaaggccaaaacctccagcaaaacaacaagaaagtgaagctgctcatattcttcaggagaacaatctccacaaaggcttgagtttgcagaatgaagtagcgcaggcaactatttctagtgatcatgagacaaatcaactccttaacatggattttcatgaaaaccatcaccaggaaggagatgaatatcatgcccaggattccaatccatttccctcgtcagaagctgaatgtttggcagaaattgattcagtaaaaagtgaaaatctgcacccattgcagctacctgagcttatagttgttccggaagaggcatggtcagagtttggtaatataaaattcatgccagaacaagaaggaaaactccaactaaacaacggactttctggtttggcagcacaaaagaccagcgggaagcctgatttgtttgcatattataaggaaaaggaattatcatttgcaggtagtgacaaagttgcaaattcagaagaaaacaaaccaaatggtgctgttaaacatatgcaaaatctggacttgccagcacaacagaaaaacgacaaaaatgattgtgatcgcaaggcagaggagttttcctctgcattagaggatgaatcatcaaaatcaccaactcatacagtgccaaaaccacctagataccctctacttcctgttacttctcatgacagaagcatgctaagaaaggtaccaactttggttcagccttcgagtaagcttgcagatgagaagaacacactattggaacagataaagaacaagcctgttcttgcaaagagaccaaatgtaatgggtggtccaaaaactaacttacaagtggtggccattctagagagagcccatgcgattcgccaggctgttgctgatgacgatgacgacgatagctggagtgagtagctggctcttccccaaagcgatttcggctcctgatgtttcagaagtgattgcatcgatcagacctttgtgtccctgttcttgcatggagcaaaagatgaaatagagccaagttaccacaggttttcatgccaagacaattggcatggaccaggtgatgcccatggatgggcaggaacggtagaagcaacgttgcaactgcaaacgtagtgtgtctctacttgtactatctgtgaagtttcgaagtgcgtcaatgtttattacctttcgatgcgcctcttgaaagtttcatgtgcttggtgaggattgttaggttgtatatgcctcctaggactagtgtcatttttgtaacttggtgagtgtacagaaagaagcatgatttttgagttgttctggacatctgaagcagatagagcaagcaactgaattgtatatgcctcctaggttgtatatgactgtacagatctctgaatccgacagttggccgcctaagctgagtttcaggaaacagatggtgcagcagtgcaggtaggggtggtaatagactctaaattttatactgcaaaatttaagaatcaaattggattagaattaggctctatttctatttaattttaaactaaaattatttaaaggctcaaactttgttgtgaataaacatttaaatcgtgatctatcaccactcctacgcaccaaatctgaattgtacatgaagatgctgggtct

SEQ ID NO: 81189 - DNA, 4139 bp, Zea Mays
cttgaggatgttaatccctatacaacaacaatgttgcactgaagcttctcccccacaatgcttctcctcatgcttcaaatgcttgagcagcagcaacatacaatttaataagcaaaaataacaattagataatgcaggatgtattaaagaaactactgatttagtagttgaccattacttgtctaacacaacccagcttgcatgtgatttcttgcactcaacagctacaacatcaggagagccgaaaacaagattatacctcacattaatctatagaaacaacaaattaagcacacaagcatacaacaacaataataagatgtaaacaggcattagcccccagctcaaatgtctatatcatacacatcaattttcttaactataataaatcacatttctgatccaacatagacttatggccacatgtacagtctccaacgaacagcataaatccccaaaactttttgtctgaaatagagaagtgttcatatactttcagtttttaggtaactactgcaaaaccatagaaacattaacaactataggcaataaaaaccatggatttaggcgatcattgtaactaaagtgaaaatgattagtgataccaacaaacatgcacatgagccaaaaaccagaaataataccaaagctatgtgacaggatgatgacaagtatgatgctaccgcctcgcccagatgatggggtcttgtggctgccctaactgtgccaccaccttctctgccaccacagttgcggcggcgggcccttgtcagccacagatttccccttcctctatagctgctagtggtgggaagagcccaccatcatcttcttcaagacaaccagcaatgcttacaaatccaaaagctctaagtcagaagcccaattgctgaagcaaataactcaacaaccgaagacccaagatccatgaagtagcaagaaaaagctactacaacaaattggaagtgatggttgtctagtacaacacaacaaccacgccaggggttttaatgccaacagggagggaagtgctttaatgttacttgtaggaccagcataagatcctgaattcagaaacaaaataagaggctagtaagtagcacctggacaaggcacaagggtggtgacaaagcagcacccctgtaggtgaggcacatcacgttggtgaactcccttacacatggtgtttacaaactcatgtgtggactccttacctacactcctagtagtatgagaatgatgctaaagtatccaacggtacaaaacaacaagaagatggatatttctcctttagaaaaaatgagcggggagtggcagtgaactcccttacacatggatcaggacctctatgacaagtacattgacatcaaaggaataccagagctatcagtcatcaacagcagcgttaagggaattgagcttggatcggttgtgtccatctctacaggctacaaccattgaggtgttgtcagatggaaatctggtcttcagaaaaattgccaatcacctaagcaaagtggcttcgccatttgttcggaacacagcaaccataggtggcaacataatcatggcgcagaggttgccattcgagtcagacatagcaactgtgctactggctgcagcgcctcggccatttggcaatgctgcttcatatgtcaatgctgctctcttggcaaggacttcaactgatgcagcttcagggaagaacatcatggaggatatatgcttggtgttcggtgcttatggagctgaccatgccatcagagctagcaaggtagaggattttctaaagggtaaatcactgagctcttctgttatacttaaagcagttcagttgcttaaagagacggtttcaccaccagaaggcacaacacatcctgagtatagggtcagcttggctgtcagcttcttgttcaccttcttatccaatacactcaagacaagaaatggttttcggtgatgaatacaagccagttggcaagccgatcaagaaagtcagggcagagctccaagcttctggtatttcccctccaatgtactgccttgccaaaaaaaatattttgacagcatcagcttataacctttcttcagcatattctgcaaaatactgtatagtgatgcttctgttcatttttagtacttcctctgttccaaattatagacgttttagtacaaaacaacaagaagatggatatttccccttcagaaaaaatgagcggggagtggcagtgatcatcattgttctaagagttcagagttgagggacagggagaatggtcgcactgagcggaggaggaagaactgacgtctcctctctagtcctgctcaaactccttagcagcggcgaatgaggattccatcagtatcataacaacagaatcagaaatggcaagagaacaaagcagttaggtaatgagaagtattctctagaggtgaaataaaaaaatccagtcgaataacgaggcttaccaattgtgggtcgttcgttggtgactccccctcgactgataaatggagacaaaaaggaacaagctttatgatctctgatgctcgagtaccaagtattgcttgaaaaacacatgcatagtcatagaagatgaaagacatttcaattgatccagaaaagcataagcgttcatacttgagacacacggagtgaaggtaagccattccgcgtgcagtgggtggacgtggggcgtggacatgagctgggcaaggccgaactcggtgacgcaggcgccgagttcctatgagagaaggatgttgcttgacttcatgttcccgtgaatgaacttcccgccgctacccatggagtgaaggtaagccattccgcgtgcagtgcccagagctatcttcaccctggtctcctagtccaatggggttcttccagcagctttgttacctagattttacaatcaacaattagtctgcaaccaactaccatacagtttcattttcatagaaatatgtataatgagcctagtcagactttcagacaataagttagcaaaacaggtgaaataactgaaaataaaagtggaaacatcacagaagcaaaacttgaaatgcacctttcatttgttgacccagtcccaaaatctcagtaaccaattaaatttgtggtatccaagcaaaagagaacatgtccatacagacaaattagatgaaaaagaaatgaaagcaaactcaggtgttctgtcaaaaatatgtcaaaagtcctatagccctcctagtaaaatcacacagtttccagttcatggtgattaagtagatctaccaaatgtgtctaaacctgattaataatatgcaacacaacattaacccatgtagtgctacttgtacccccaactgtccattctagtctccggtgcctgggaactgatgaccgttctagtctccggtgcctgcctggtattattcctcctgttcccgccagcattgcctgcactaacgagcccccaggacgacgtcagttgctacagtgttctatagtactgtacctgtacgtactacatgcaagagtaaccttctaccaaagtgagtgaccgccactatctcttgtccaagcttttctctatactcttctttttagatttctaccgtaacgttcaattttcttccctgccgacagcagcaactgtccatgtcgttcttgaagattaagtaggtaacagaaaagcaaggcagcactatgaaaccaccaattattcttttgcattcacgacaaaggccagaaaatttcagtatctcaaaagcccaaaattctagcaacaagagcaggtcttgttaactgtttctagggaactccagaacagctattggaatcccaaataccaaatgatttgaggaaggtatatgtcaacatcctttgtaaaaaactatattatatccagaagaataaaaactaaggactgaagacagtacatctggagtgtatgtctatgttacaaataataaataccttattcagaattttttttaccttattcagaaaaaaactaaggagtaaggaccaaagattataatttacataacccagaattagagagttctctacaatcaatgtaaagcatccccactttgagaattcaagtatgcggcccccatctggattatactttcaaggtgaagtagcaaat

SEQ ID NO: 81190 - DNA, 4066 bp, Zea Mays
aaatgcttgagcagcagcaacatacaatttaataagcaaaaataacaattagataatgcaggatgtattaaagaaactactgatttagtagttgaccattacttgtctaacacaacccagcttgcatgtgatttcttgcactcaacagctacaacatcaggagagccgaaaacaagattatacctcacattaatctatagaaacaacaaattaagcacacaagcatacaacaacaataataagatgtaaacaggcattagcccccagctcaaatgtctatatcatacacatcaattttcttaactataataaatcacatttctgatccaacatagacttatggccacatgtacagtctccaacgaacagcataaatccccaaaactttttgtctgaaatagagaagtgttcatatactttcagtttttaggtaactactgcaaaaccatagaaacattaacaactataggcaataaaaaccatggatttaggcgatcattgtaactaaagtgaaaatgattagtgataccaacaaacatgcacatgagccaaaaaccagaaataataccaaagctatgtgacaggatgatgacaagtatgatgctaccgcctcgcccagatgatggggtcttgtggctgccctaactgtgccaccaccttctctgccaccacagttgcggcggcgggcccttgtcagccacagatttccccttcctctatagctgctagtggtgggaagagcccaccatcatcttcttcaagacaaccagcaatgcttacaaatccaaaagctctaagtcagaagcccaattgctgaagcaaataactcaacaaccgaagacccaagatccatgaagtagcaagaaaaagctactacaacaaattggaagtgatggttgtctagtacaacacaacaaccacgccaggggttttaatgccaacagggagggaagtgctttaatgttacttgtaggaccagcataagatcctgaattcagaaacaaaataagaggctagtaagtagcacctggacaaggcacaagggtggtgacaaagcagcacccctgtaggtgaggcacatcacgttggtgaactcccttacacatggtgtttacaaactcatgtgtggactccttacctacactcctagtagtatgagaatgatgctaaagtatccaacggtacaaaacaacaagaagatggatatttctcctttagaaaaaatgagcggggagtggcagtgaactcccttacacatggatcaggacctctatgacaagtacattgacatcaaaggaataccagagctatcagtcatcaacagcagcgttaagggaattgagcttggatcggttgtgtccatctctacaggctacaaccattgaggtgttgtcagatggaaatctggtcttcagaaaaattgccaatcacctaagcaaagtggcttcgccatttgttcggaacacagcaaccataggtggcaacataatcatggcgcagaggttgccattcgagtcagacatagcaactgtgctactggctgcagcgcctcggccatttggcaatgctgcttcatatgtcaatgctgctctcttggcaaggacttcaactgatgcagcttcagggaagaacatcatggaggatatatgcttggtgttcggtgcttatggagctgaccatgccatcagagctagcaaggtagaggattttctaaagggtaaatcactgagctcttctgttatacttaaagcagttcagttgcttaaagagacggtttcaccaccagaaggcacaacacatcctgagtatagggtcagcttggctgtcagcttcttgttcaccttcttatcctccaatacactcaagacaagaaatggttttcggtgatgaatacaagccagttggcaagccgatcaagaaagtcagggcagagctccaagcttctggtatttcccctccaatgtactgccttgccaaaaaaaatattttgacagcatcagcttataacctttcttcagcatattctgcaaaatactgtatagtgatgcttctgttcatttttagtacttcctctgttccaaattatagacgttttagtacaaaacaacaagaagatggatatttccccttcagaaaaaatgagcggggagtggcagtgatcatcattgttctaagagttcagagttgagggacagggagaatggtcgcactgagcggaggaggaagaactgacgtctcctctctagtcctgctcaaactccttagcagcggcgaatgaggattccatcagtatcataacaacagaatcagaaatggcaagagaacaaagcagttaggtaatgagaagtattctctagaggtgaaataaaaaaatccagtcgaataacgaggcttaccaattgtgggtcgttcgttggtgactccccctcgactgataaatggagacaaaaaggaacaagctttatgatctctgatgctcgagtaccaagtattgcttgaaaaacacatgcatagtcatagaagatgaaagacatttcaattgatccagaaaagcataagcgttcatacttgagacacacggagtgaaggtaagccattccgcgtgcagtgggtggacgtggggcgtggacatgagctgggcaaggccgaactcggtgacgcaggcgccgagttcctatgagagaaggatgttgcttgacttcatgttcccgtgaatgaacttcccgccgctacccatggagtgaaggtaagccattccgcgtgcagtgcccagagctatcttcaccctggtctcctagtccaatggggttcttccagcagctttgttacctagattttacaatcaacaattagtctgcaaccaactaccatacagtttcattttcatagaaatatgtataatgagcctagtcagactttcagacaataagttagcaaaacaggtgaaataactgaaaataaaagtggaaacatcacagaagcaaaacttgaaatgcacctttcatttgttgacccagtcccaaaatctcagtaaccaattaaatttgtggtatccaagcaaaagagaacatgtccatacagacaaattagatgaaaaagaaatgaaagcaaactcaggtgttctgtcaaaaatatgtcaaaagtcctatagccctcctagtaaaatcacacagtttccagttcatggtgattaagtagatctaccaaatgtgtctaaacctgattaataatatgcaacacaacattaacccatgtagtgctacttgtacccccaactgtccattctagtctccggtgcctgggaactgatgaccgttctagtctccggtgcctgcctggtattattcctcctgttcccgccagcattgcctgcactaacgagcccccaggacgacgtcagttgctacagtgttctatagtactgtacctgtacgtactacatgcaagagtaaccttctaccaaagtgagtgaccgccactatctcttgtccaagcttttctctatactcttctttttagatttctaccgtaacgttcaattttcttccctgccgacagcagcaactgtccatgtcgttcttgaagattaagtaggtaacagaaaagcaaggcagcactatgaaaccaccaattattcttttgcattcacgacaaaggccagaaaatttcagtatctcaaaagcccaaaattctagcaacaagagcaggtcttgttaactgtttctagggaactccagaacagctattggaatcccaaataccaaatgatttgaggaaggtatatgtcaacatcctttgtaaaaaactatattatatccagaagaataaaaactaaggactgaagacagtacatctggagtgtatgtctatgttacaaataataaataccttattcagaattttttttaccttattcagaaaaaaactaaggagtaaggaccaaagattataatttacataacccagaattagagagttctctacaatcaatgtaaagcatccccactttgagaattcaagtatgcggcccccatctggattatactttcaaggtgaagtagcaaat

SEQ ID NO: 81191 - DNA, 3380 bp, Zea Mays
gaagagcccaccatcatcttcttcaagacaaccagcaatgcttacaaatccaaaagctctaagtcagaagcccaattgctgaagcaaataactcaacaaccgaagacccaagatccatgaagtagcaagaaaaagctactacaacaaattggaagtgatggttgtctagtacaacacaacaaccacgccaggggttttaatgccaacagggagggaagtgctttaatgttacttgtaggaccagcataagatcctgaattcagaaacaaaataagaggctagtaagtagcacctggacaaggcacaagggtggtgacaaagcagcacccctgtaggtgaggcacatcacgttggtgaactcccttacacatggtgtttacaaactcatgtgtggactccttacctacactcctagtagtatgagaatgatgctaaagtatccaacggtacaaaacaacaagaagatggatatttctcctttagaaaaaatgagcggggagtggcagtgaactcccttacacatggatcaggacctctatgacaagtacattgacatcaaaggaataccagagctatcagtcatcaacagcagcgttaagggaattgagcttggatcggttgtgtccatctctacaggctacaaccattgaggtgttgtcagatggaaatctggtcttcagaaaaattgccaatcacctaagcaaagtggcttcgccatttgttcggaacacagcaaccataggtggcaacataatcatggcgcagaggttgccattcgagtcagacatagcaactgtgctactggctgcagcgcctcggccatttggcaatgctgcttcatatgtcaatgctgctctcttggcaaggacttcaactgatgcagcttcagggaagaacatcatggaggatatatgcttggtgttcggtgcttatggagctgaccatgccatcagagctagcaaggtagaggattttctaaagggtaaatcactgagctcttctgttatacttaaagcagttcagttgcttaaagagacggtttcaccaccagaaggcacaacacatcctgagtatagggtcagcttggctgtcagcttcttgttcaccttcttatcctccttaaccaacagctgaaggaaaatcttgaggttgacagaaattatttaccaatacactcaagacaagaaatggttttcggtgatgaatacaagccagttggcaagccgatcaagaaagtcagggcagagctccaagcttctggtatttcccctccaatgtactgccttgccaaaaaaaatattttgacagcatcagcttataacctttcttcagcatattctgcaaaatactgtatagtgatgcttctgttcatttttagtacttcctctgttccaaattatagacgttttagtacaaaacaacaagaagatggatatttccccttcagaaaaaatgagcggggagtggcagtgatcatcattgttctaagagttcagagttgagggacagggagaatggtcgcactgagcggaggaggaagaactgacgtctcctctctagtcctgctcaaactccttagcagcggcgaatgaggattccatcagtatcataacaacagaatcagaaatggcaagagaacaaagcagttaggtaatgagaagtattctctagaggtgaaataaaaaaatccagtcgaataacgaggcttaccaattgtgggtcgttcgttggtgactccccctcgactgataaatggagacaaaaaggaacaagctttatgatctctgatgctcgagtaccaagtattgcttgaaaaacacatgcatagtcatagaagatgaaagacatttcaattgatccagaaaagcataagcgttcatacttgagacacacggagtgaaggtaagccattccgcgtgcagtgggtggacgtggggcgtggacatgagctgggcaaggccgaactcggtgacgcaggcgccgagttcctatgagagaaggatgttgcttgacttcatgttcccgtgaatgaacttcccgccgctacccatggagtgaaggtaagccattccgcgtgcagtgcccagagctatcttcaccctggtctcctagtccaatggggttcttccagcagctttgttacctagattttacaatcaacaattagtctgcaaccaactaccatacagtttcattttcatagaaatatgtataatgagcctagtcagactttcagacaataagttagcaaaacaggtgaaataactgaaaataaaagtggaaacatcacagaagcaaaacttgaaatgcacctttcatttgttgacccagtcccaaaatctcagtaaccaattaaatttgtggtatccaagcaaaagagaacatgtccatacagacaaattagatgaaaaagaaatgaaagcaaactcaggtgttctgtcaaaaatatgtcaaaagtcctatagccctcctagtaaaatcacacagtttccagttcatggtgattaagtagatctaccaaatgtgtctaaacctgattaataatatgcaacacaacattaacccatgtagtgctacttgtacccccaactgtccattctagtctccggtgcctgggaactgatgaccgttctagtctccggtgcctgcctggtattattcctcctgttcccgccagcattgcctgcactaacgagcccccaggacgacgtcagttgctacagtgttctatagtactgtacctgtacgtactacatgcaagagtaaccttctaccaaagtgagtgaccgccactatctcttgtccaagcttttctctatactcttctttttagatttctaccgtaacgttcaattttcttccctgccgacagcagcaactgtccatgtcgttcttgaagattaagtaggtaacagaaaagcaaggcagcactatgaaaccaccaattattcttttgcattcacgacaaaggccagaaaatttcagtatctcaaaagcccaaaattctagcaacaagagcaggtcttgttaactgtttctagggaactccagaacagctattggaatcccaaataccaaatgatttgaggaaggtatatgtcaacatcctttgtaaaaaactatattatatccagaagaataaaaactaaggactgaagacagtacatctggagtgtatgtctatgttacaaataataaataccttattcagaattttttttaccttattcagaaaaaaactaaggagtaaggaccaaagattataatttacataacccagaattagagagttctctacaatcaatgtaaagcatccccactttgagaattcaagtatgcggcccccatctggattatactttcaaggtgaagtagcaaat

SEQ ID NO: 81192 - DNA, 3306 bp, Zea Mays
atcagagccgcaagcctagcgaagaaggccaattcgaataggcagcacgaagccaaacttgcgtatatgaagtgaatataaacacttatagcaacgggctttgttttcagtcccaagaaaaaattggtgattctcgacagaagtaaacgctaccccaacaccggctgagcccaaaacattaacaacgcaggtaacgagtttcagcgaattcaccaaaacctaacagaaagaaactgcttccaaacagaacggcttagaacttagctggtgctgtacagcaaagctcatccaaatcaaccagtgtagccttagtaagcagcgacgccagaatttgtaatgtcgacgtcccccattcctgtatcttcctcctcttcactgtcagcatcaccatcgacctctgcgttttgctccattagggaatcaatctggtcgaggaatagcttgtcttcccgctcactaacctctcttggtggttccttcactactaactttcctttgtacttttcaatctctgctgtacaagccttgactgcagtagtgagaactgaaatgccttgatcctgttcaaagagcaacacagaagaaaaacaatggtcattattttctggacattgaaggatatgatacagccttaaccataattctagggttgatactaaaataaaaaatcgagcgaattgcaatatgtggggataaatataaaaaatgatgcatgtacaagtatcatactacaacatagtaaagggcaaaacaggtgtttcgttagataagcaatgcaaacaacgtgaacgaaggtaaacaaattgtgaaccatgttgataagaaccatgagaagtctggaaccagataatactgcaaatttggcagagaattgcattttgtgtagtcaataattgtgaaccgcattgataagaaccattttgacagattattgcactatagatagtgcagataatactgcactattaaagtctggtcactgcattttgtgcaattgaacaccctgcaaaaggctaaacagtaaatcaggccctttcccaataaggattgaggaggcaaaagatcagaagtatcggtaaacagaacaagcgacacaataacgattggcaagccacaacgattcttagcaacatataagtgcagcctggagctggaggtaatgcatatctaatttagaacacataatagatgaggatcaatttgcccaaaaaatagatgaggatcaattgaaacatgcactctcaatcctcaaaagtctcaaacattatgtttgatgtaaaattgtaatcacaaatttgaggagaatgggcttgagcacatatgaaactttatcaaataactcggctataacaaattgctcacacatattattaagtactaagataatgccaaccttgtcaagggtctgtgtggtcaaaacataaagtggaggagcaactagcttaatcttcacaggacagttatcattgcccgcagcttcagctttcttcatagcttgctgcaaatacatatacaattagttttttgcaaataccattgttaaatcacaagggtggcattaggggcaactagaaccttaatatggagcactccatcaaactggaagcatttcatctctatatcagcacggatcttgagaggctgtggtgtcatcctcctccttatgttcttaaccagagaatccttaacctcgggggtgacagcaggcaccaccttagtcacctaccagtaattttaagcatatccttgtctcaaatagttctatacaaatacatatagaaaaaattcataatatatttcaacaaagtaacaacataggcaggaacatcattccaaataaaagaaacagaactcttaaatcaatgcacttttttctactgtttgcctatacaataaactgcatacaaagttaagcactaaaaccaagctataccactatctatctactacatggaaattccaacttgatatattcaataatttgaaaggcatgtttcaggttagttcgaagttatttttatgtaaactccacaacatgagccaacaggttattcaccatttccgaggaagtattgattgacagaaatacaaactaaattatctgcaaattgttactggaccaaaaaatgaacaagtaactgctatagattttacataaatccttactggttcccaaaatcaaacatagcatatacatgtaaatgcctagttaaataaggacatgggacaagtctacaccatccaaatctacagaatctgtcaaccaccacatctaatcatgttcgaacgacatgggacgaatttagaacatccaaacctactgaatctgtctgcagtaccactaaatctaatcatgttcgaacaacatataagtagccatgttcaaacaacataagtagacacatgaatgaatgtccaggactccaggttgcggtggtcaatgttagatttataaggattgtttccaactaaaagatgtgaaccataacaatatcaaaccaattaatactcctagtgttatctactccctccatttcatgtgttaagatgttttggcttttctagatacatagcttttgctatgcactatctagataaactctatctaagacagcccacggccctctagctgagttggttaggtggtgtaagtagcactaatcaagtcttgagttcgagtgttcaactcccccgtgtgagcgaattttaggctgaggttaataaatccactcgtttgccccacgccaaagcacaggtcgaagacctggccccatcgtggtcgttctcacatggggattacatagtaaaaaagtgtatctagaaaagctaaaaagtcttataatttggaacatagagattacataacaacatccacgaagttgaataaaaaatcagcagaaaagcttcatgtggcgcaaaaactcaagaacaggaaagtttcatgtgaagcaaaaactcaacaacagggccaaagtaccgtggatctaaaagaccggagaggtctgataataaaaagacttaaaattcaaaacaaaagctatagctacagctcaagttttttaataacagtatttggttagtggaagaagtctggtaagaaaaactatcatgcacaaccaagaaccaataacagtattaatctgctaggctgttcatccatgacatgggcggccgggtcaaaatgcaatttgcagttcgataagaaaactgaattaacctcctggccatccgggccgacctccttctcctcataggtgagtgcgtcgaggatggcgtcagggtcggcaactatgagcttgaaggcct

SEQ ID NO: 81193 - DNA, 529 bp, Zea Mays
ggaagccaagaatatattagcatttctgagttctgactgctacaagacgtaaataatcaatactttgatctgatgtcaaaaatggatgcttgtcctcagtgcgtcactagccatgtcctggtggccccttctggacttctggtacatccaacaaaaaaaaaatacaatgatagtttatctgcaccaacgggattctaagctaattaaaacaccaattgctcctctcatacatcgtgcagctcaatcccaggacgttacagacaatgcaacccaaaggtcattagatgtcccagatatatacatcctatgtgtctggatcttctcattgttggtacataatggggttgggctcgaataatgaccgttgcttattctctcctggactgagaatatgatttccctttgcatcggttcatggccgttcagaagatttcccatgctcaaaactttcctccaagactgattagcagtagggggaggaaacaggttcgacacagcatctctctcatacatcccgaccttttcctta

SEQ ID NO: 81194 - DNA, 2436 bp, Zea Mays
gccagtcactcggtttggctaagctgtctggcggggatgttttggttgggcctttttactctgtgggccactcgaccggtcaggtttgcaacttgttagcctcgaccagcagaagctgggccagccgctacccaggattgcatttgcttcggcaaagggttgccagctcgtcaaaacctaagcgttctgtccactcgcctggttctcgtcagtcgccagttcagccgccaggtccgcttcgtaggacgtacgccgaggttctcaagtcgactgctctctctgggaaaatggctaaggaaggcgccgagggggatggctggagagtgatggatcgccgtcgtcaacaggtacgaggtcgttcctcgggtgctggcatctggtcgcttcgcggtcgtgcaaactgggaagcccgtggtcgtggtacctggcgtggccgtggcggtcggttcgtcgcgtctggttcgtcgctgggccttgatgccagggtggctgttgagcgcagtagtggtgttcagtccgaggcagctaaaaaaagggtggccgacgttgcatctggggtatcggacatggggaagaaacgccgtgaagagctttgttgcgaaatttgtgaagacaatcatgtgcctgaggagtgtccggtatttaatggtccaaaaccgcaggcagctctctgtggttttgcgggaggtgaatctggtttttttcaaattcctacctggggagcaaagggggtattaccaaggtcggatggtgtcacggccttcataacagtgaaggaagggaatgttactgccgaactcgttaagtctgaactctctagacttattccagtgaagtggaattggtcggtccagaagcatgcagatggttttatagtgacatttccgtgcagagtggagcttcaacgtatgattgctatgaaatatgttcatacgttgggaggagaaggtatcttagtaattcaagaggttaaccaaaaaatagaaccgatatcttatctgcagaaggcctgggtgaatgtgtacggggttccttttgagatccgctcatttcttcctctgtgggcagttggttctattttgggggcaactcagaaagtggacatgcgctacactcggaaaatgggggtggttcgaattttggttgcagtgacggatgtgaatcatatcccggaatccgcagaaatagtggttggtgaaggattatacgagatattcttcaaagttgacaaggtccttaaagatggtagatggattgacaataataatacgggtactcgagacagagatgataaggaacaaggtgaaaatgatgattttactgagaatcatgagaatgatatttttcagccagaggaagcagtagaagacactgtcatggaggataattccttacatagtgaccctatgaaaccacatgatgaatcttcagatatggggataggggttcagcacaggaaaccgttcattaatgactcagtgacattggagtcagaagttttgacttcggttgagccaacagttttgaatttaatgacctctacttgcgctgatcagcatttacagccagctcctgaggaatatggactggattcggtgatttgtattgccgatcatgcttcagatggcctggaattgtcaacaggaagggttggcgttgatggaaatctcagcagcttgattgatttggctccagactgctcggttcttgctagtggatccatcagtgaagaggggctgtctgtgtccaaagtaagtattccatctctggaagcaacagtgccatttgctgggagagagatcaacttggcttttgatgatattaatattccttctgcggctgacagcttgctcatcgaaaaacataagacacgtgagagtaccattcacctgggacatgttaattattttactgatgtaccccgttctgtcctccaggaggcacttaagtctaattctcttactaagagagtaaagactgaaaaacttaatcaagggggtgtcatgttaagtgccaggaggactaacacagatgaagatatattgtccaaagctcagcgtctggcagcaaagcgtaatttagaaatcatgtcggcgtgcgagtcatctcaagctggaagcgatcgatgtgggcgtgtcgtgtccctgccattcattcatcaattcgctcccagatccgcagacaggcacggcacgcggtgccgatcctcagcgatcgtgtcacgtcgtgctggcgagcagtgagccagtgactgactgactgcagagtgaaagttcacgcagtgtccgagtcgacgtaacggcggaaaaaggtcaaacggcaacaggcacttgtatcgagaggcttttcctttctcgtgataaccataaaggccgaagaagcaagaccgatctcgtctgacaatgccattgcaaaaataagaggactatatccaag

SEQ ID NO: 81195 - DNA, 4161 bp, Zea Mays
agaagctgggccagccgctacccaggattgcatttgcttcggcaaagggttgccagctcgtcaaaacctaagcgttctgtccactcgcctggttctcgtcagtcgccagttcagccgccaggtccgcttcgtaggacgtacgccgaggttctcaagtcgactgctctctctgggaaaatggctaaggaaggcgccgagggggatggctggagagtgatggatcgccgtcgtcaacaggtacgaggtcgttcctcgggtgctggcatctggtcgcttcgcggtcgtgcaaactgggaagcccgtggtcgtggtacctggcgtggccgtggcggtcggttcgtcgcgtctggttcgtcgctgggccttgatgccagggtggctgttgagcgcagtagtggtgttcagtccgaggcagctaaaaaaagggtggccgacgttgcatctggggtatcggacatggggaagaaacgccgtgaagagctttgttgcgaaatttgtgaagacaatcatgtgcctgaggagtgtccggtatttaatggtccaaaaccgcaggcagctctctgtggttttgcgggaggtgaatctggtttttttcaaattcctacctggggagcaaagggggtattaccaaggtcggatggtgtcacggccttcataacagtgaaggaagggaatgttactgccgaactcgttaagtctgaactctctagacttattccagtgaagtggaattggtcggtccagaagcatgcagatggttttatagtgacatttccgtgcagagtggagcttcaacgtatgattgctatgaaatatgttcatacgttgggaggagaaggtatcttagtaattcaagaggttaaccaaaaaatagaaccgatatcttatctgcagaaggcctgggtgaatgtgtacggggttccttttgagatccgctcatttcttcctctgtgggcagttggttctattttgggggcaactcagaaagtggacatgcgctacactcggaaaatgggggtggttcgaattttggttgcagtgacggatgtgaatcatatcccggaatccgcagaaatagtggttggtgaaggattatacgagatattcttcaaagttgacaaggtccttaaagatggtagatggattgacaataataatacgggtactcgagacagagatgataaggaacaaggtgaaaatgatgattttactgagaatcatgagaatgatatttttcagccagaggaagcagtagaagacactgtcatggaggataattccttacatagtgaccctatgaaaccacatgatgaatcttcagatatggggataggggttcagcacaggaaaccgttcattaatgactcagtgacattggagtcagaagttttgacttcggttgagccaacagttttgaatttaatgacctctacttgcgctgatcagcatttacagccagctcctgaggaatatggactggattcggtgatttgtattgccgatcatgcttcagatggcctggaattgtcaacaggaagggttggcgttgatggaaatctcagcagcttgattgatttggctccagactgctcggttcttgctagtggatccatcagtgaagaggggctgtctgtgtccaaagtaagtattccatctctggaagcaacagtgccatttgctgggagagagatcaacttggcttttgatgatattaatattccttctgcggctgacagcttgctcatcgaaaaacataagacacgtgagagtaccattcacctgggacatgttaattattttactgatgtaccccgttctgtcctccaggaggcacttaagtctaattctcttactaagagagtaaagactgaaaaacttaatcaagggggtgtcatgttaagtgccaggaggactaacacagatgaagatatattgtccaaagctcagcgtctggcagcaaagcgtaatttagaaatcaacagcccttccttcagtgtgctacagacaattagtaggttcatccagcagaaaaacggaatcctcgttttgttctggtcactctcggttcaatctcccaaaacgatcccgccttcagtagcagcaagcttcccatctttcaagcaaggtgaagattcagcagcggggaaaaaggttaggtctccagcgatggcggcggcgctggagtgctggtcggggcggccgagcaccgatgaggagacggtggagcacgttctcatgaagccccacgggcgttcagatgactccctcccgacctgcgccgattctgcccgcgctgccggcgagccgacgccgacgccgacgccggcgccccccaagaagtggcagcggctgggccgcaactttgccggcgccatcgccgcgttcaagaacacgctgaacctggatggcggcggcggcggcagcggcctcccccgcgacccatcaccgcgagccgagaagccgccaccgctcctcctccgtggcctcgcgcagctctactcccgcggcgccgccaaccagcagctgccagaaaagctcgtcgctgacctccgccgccacttcgacgctctccccaacagctacgcacaggcaggatatgacatgaaagatgtcctcctgcatgcccgccttgcagagcaggcgacaggtgaggatcagcctgcagtgaacattgaggaagttcatggcagaggaagttgtgaagaaggcactgttttccagctaacatttgcttgcacagccccgctctcatggcagtcaatgtcaggatcactagacagcccttcgttctgttgcaagaagatccagatctttgagaagagagggctgacacttggcgtcgtcatgatacttgtgcagactgggaacgaggcgctcttcaagaaccaggttgagtccgcgctgaaatcggtagtaaagaagcaaagaaagaacagtggtggtgtgaagctaccatttgggctctgcggttgtcaagaagaaggatcaagaaacttcgatgaggagtcgatgtttgatccagatgatggtcgggtactcgacaatgagccggcgcacagaccacagcttcccactcccctaccacaggcatcagtcttcgtctcagtagatgaatggcaaaccattcgctccggtggcgaggagcttggtcgctggatgctgcgttccgaggagatcgagttcgttgattggtttggcgcgaattcattcaggggtgtctataagggaaagaaggtttgggtcaacaaactgaggggctgtgacatggggagtgcttacgatgtcgagattcgtcaggacttgctgcagttgatgagctgtggccaaaggaacatcctacagctccatggcgtttgtttcagtgagaaccatgggctatgcatagtaacgaggatgatggaaggaggatcggttcatgatattcttgtgcagagaaacaagaggctgtccctccgagacacggttaggatcgctctcgatgtcgctgacgcaatggccttcatgaacggctatggcatcgcgtaccgtgatctcaatgctcggaagatcctgctggacaggcaagggaatgcttgccttggggatatgggcattgttaccccttgtagtaatgttggtgaggtcaccgagtacgagacatctgggtaccgatggctggctccagagatcattgctggagatcctgaaaccgtctccgagacctggatgagcaacgtctacagctacggaatggtgctctgggagatgatcaccggagaggaggcctactccacctactcgccagtgcaagcagctgtcgggatcgctgcctgcgggctgaggccggagatccccagagactgtcctcctttcctgaggtcactaatgaacaggtgctgggacagttcccctttgaagcgccctcagttctctgagatcacatccatcctacagaggcagaatgttagatagttcttttttgcccccctccctctcttccttttccttctatatcatatgctatatatcagtttggcttgggtgtctgcctaatcatgcaggaaactgcatctgagaaagtataatatatatgcgcagaggcttgttatttatattattgctcacatctcttatcccctgaaaatatcagtccatcttgaattagtccacacaagtagacgt

SEQ ID NO: 81196 - DNA, 3487 bp, Zea Mays
gttctgtccactcgcctggttctcgtcagtcgccagttcagccgccaggtccgcttcgtaggacgtacgccgaggttctcaagtcgactgctctctctgggaaaatggctaaggaaggcgccgagggggatggctggagagtgatggatcgccgtcgtcaacaggtacgaggtcgttcctcgggtgctggcatctggtcgcttcgcggtcgtgcaaactgggaagcccgtggtcgtggtacctggcgtggccgtggcggtcggttcgtcgcgtctggttcgtcgctgggccttgatgccagggtggctgttgagcgcagtagtggtgttcagtccgaggcagctaaaaaaagggtggccgacgttgcatctggggtatcggacatggggaagaaacgccgtgaagagctttgttgcgaaatttgtgaagacaatcatgtgcctgaggagtgtccggtatttaatggtccaaaaccgcaggcagctctctgtggttttgcgggaggtgaatctggtttttttcaaattcctacctggggagcaaagggggtattaccaaggtcggatggtgtcacggccttcataacagtgaaggaagggaatgttactgccgaactcgttaagtctgaactctctagacttattccagtgaagtggaattggtcggtccagaagcatgcagatggttttatagtgacatttccgtgcagagtggagcttcaacgtatgattgctatgaaatatgttcatacgttgggaggagaaggtatcttagtaattcaagaggttaaccaaaaaatagaaccgatatcttatctgcagaaggcctgggtgaatgtgtacggggttccttttgagatccgctcatttcttcctctgtgggcagttggttctattttgggggcaactcagaaagtggacatgcgctacactcggaaaatgggggtggttcgaattttggttgcagtgacggatgtgaatcatatcccggaatccgcagaaatagtggttggtgaaggattatacgagatattcttcaaagttgacaaggtccttaaagatggtagatggattgacaataataatacgggtactcgagacagagatgataaggaacaaggtgaaaatgatgattttactgagaatcatgagaatgatatttttcagccagaggaagcagtagaagacactgtcatggaggataattccttacatagtgaccctatgaaaccacatgatgaatcttcagatatggggataggggttcagcacaggaaaccgttcattaatgactcagtgacattggagtcagaagttttgacttcggttgagccaacagttttgaatttaatgacctctacttgcgctgatcagcatttacagccagctcctgaggaatatggactggattcggtgatttgtattgccgatcatgcttcagatggcctggaattgtcaacaggaagggttggcgttgatggaaatctcagcagcttgattgatttggctccagactgctcggttcttgctagtggatccatcagtgaagaggggctgtctgtgtccaaagtaagtattccatctctggaagcaacagtgccatttgctgggagagagatcaacttggcttttgatgatattaatattccttctgcggctgacagcttgctcatcgaaaaacataagacacgtgagagtaccattcacctgggacatgttaattattttactgatgtaccccgttctgtcctccaggaggcacttaagtctaattctcttactaagagagtaaagactgaaaaacttaatcaagggggtgtcatgttaagtgccaggaggactaacacagatgaagatatattgtccaaagctcagcgtctggcagcaaagcgtaatttagaaatcactacgcacaggcaggatatgacatgaaagatgtcctcctgcatgcccgccttgcagagcaggcgacaggtgaggatcagcctgcagtgaacattgaggaagttcatggcagaggaagttgtgaagaaggcactgttttccagctaacatttgcttgcacagccccgctctcatggcagtcaatgtcaggatcactagacagcccttcgttctgttgcaagaagatccagatctttgagaagagagggctgacacttggcgtcgtcatgatacttgtgcagactgggaacgaggcgctcttcaagaaccaggttgagtccgcgctgaaatcggtagtaaagaagcaaagaaagaacagtggtggtgtgaagctaccatttgggctctgcggttgtcaagaagaaggatcaagaaacttcgatgaggagtcgatgtttgatccagatgatggtcgggtactcgacaatgagccggcgcacagaccacagcttcccactcccctaccacaggcatcagtcttcgtctcagtagatgaatggcaaaccattcgctccggtggcgaggagcttggtcgctggatgctgcgttccgaggagatcgagttcgttgattggtttggcgcgaattcattcaggggtgtctataagggaaagaaggtttgggtcaacaaactgaggggctgtgacatggggagtgcttacgatgtcgagattcgtcaggacttgctgcagttgatgagctgtggccaaaggaacatcctacagctccatggcgtttgtttcagtgagaaccatgggctatgcatagtaacgaggatgatggaaggaggatcggttcatgatattcttgtgcagagaaacaagaggctgtccctccgagacacggttaggatcgctctcgatgtcgctgacgcaatggccttcatgaacggctatggcatcgcgtaccgtgatctcaatgctcggaagatcctgctggacaggcaagggaatgcttgccttggggatatgggcattgttaccccttgtagtaatgttggtgaggtcaccgagtacgagacatctgggtaccgatggctggctccagagatcattgctggagatcctgaaaccgtctccgagacctggatgagcaacgtctacagctacggaatggtgctctgggagatgatcaccggagaggaggcctactccacctactcgccagtgcaagcagctgtcgggatcgctgcctgcgggctgaggccggagatccccagagactgtcctcctttcctgaggtcactaatgaacaggtgctgggacagttcccctttgaagcgccctcagttctctgagatcacatccatcctacagaggcagaatgttagatagttcttttttgcccccctccctctcttccttttccttctatatcatatgctatatatcagtttggcttgggtgtctgcctaatcatgcaggaaactgcatctgagaaagtataatatatatgcgcagaggcttgttatttatattattgctcacatctcttatcccctgaaaatatcagtccatcttgaattagtccacacaagtagacgt

SEQ ID NO: 81197 - DNA, 1832 bp, Zea Mays
atggctaaggaaggcgccgagggggatggctggagagtgatggatcgccgtcgtcaacaggtacgaggtcgttcctcgggtgctggcatctggtcgcttcgcggtcgtgcaaactgggaagcccgtggtcgtggtacctggcgtggccgtggcggtcggttcgtcgcgtctggttcgtcgctgggccttgatgccagggtggctgttgagcgcagtagtggtgttcagtccgaggcagctaaaaaaagggtggccgacgttgcatctggggtatcggacatggggaagaaacgccgtgaagagctttgttgcgaaatttgtgaagacaatcatgtgcctgaggagtgtccggtatttaatggtccaaaaccgcaggcagctctctgtggttttgcgggaggtgaatctggtttttttcaaattcctacctggggagcaaagggggtattaccaaggtcggatggtgtcacggccttcataacagtgaaggaagggaatgttactgccgaactcgttaagtctgaactctctagacttattccagtgaagtggaattggtcggtccagaagcatgcagatggttttatagtgacatttccgtgcagagtggagcttcaacgtatgattgctatgaaatatgttcatacgttgggaggagaaggtatcttagtaattcaagaggttaaccaaaaaatagaaccgatatcttatctgcagaaggcctgggtgaatgtgtacggggttccttttgagatccgctcatttcttcctctgtgggcagttggttctattttgggggcaactcagaaagtggacatgcgctacactcggaaaatgggggtggttcgaattttggttgcagtgacggatgtgaatcatatcccggaatccgcagaaatagtggttggtgaaggattatacgagatattcttcaaagttgacaaggtccttaaagatggtagatggattgacaataataatacgggtactcgagacagagatgataaggaacaaggtgaaaatgatgattttactgagaatcatgagaatgatatttttcagccagaggaagcagtagaagacactgtcatggaggataattccttacatagtgaccctatgaaaccacatgatgaatcttcagatatggggataggggttcagcacaggaaaccgttcattaatgactcagtgacattggagtcagaagttttgacttcggttgagccaacagttttgaatttaatgacctctacttgcgctgatcagcatttacagccagctcctgaggaatatggactggattcggtgatttgtattgccgatcatgcttcagatggcctggaattgtcaacaggaagggttggcgttgatggaaatctcagcagcttgattgatttggctccagactgctcggttcttgctagtggatccatcagtgaagaggggctgtctgtgtccaaagtaagtattccatctctggaagcaacagtgccatttgctgggagagagatcaacttggcttttgatgatattaatattccttctgcggctgacagcttgctcatcgaaaaacataagacacgtgagagtaccattcacctgggacatgttaattattttactgatgtaccccgttctgtcctccaggaggcacttaagtctaattctcttactaagagagtaaagactgaaaaacttaatcaagggggtgtcatgttaagtgccaggaggactaacacagatgaagatatattgtccaaagctcagcgtctggcagcaaagcgtaatttagaaatcattaaggtatccagagagtgaccatcgatccg

SEQ ID NO: 81198 - DNA, 1364 bp, Zea Mays
ccacattccagtccggtaccgcgttccggttctccggtccgagtccaccgcaccgcgtgcggcggcgtgccgatctccggctcgcctgttacggtggcctcgcgcgcccggtataaaagtacttggattctctcagcctgccctgacaagccaggccactctaccaccgcacgctcaactcaaacccccgtcccgaacgcagaagaccggcggcagcggcgggggtgtgtgtgtgtggactggactgtaaccaattgccatcaatccaggcatccatccatccacccgccccgctgacggcggcaatggcccggctcgtgctctccgagtgctgcggcctcgcgccgctccgccgcctgcgcgccggccggggcgccattgcggcgccgtcaccccccgcgctctccgcggcgccgcgccgtcgtcccgcgtccgcgtccatccaccgcgactgggcgctccgcgtctccgcgcccacccgcctcgcctccgccgccgtcgaggaggacaagccgagcgccgcgccggggcaggaggagggcgcggcggccggcggggagttcgacccgggggcgccgccgccgttcgggctggcggagatccgcgccgccatccccaagcactgctgggtcaaggacccctggcgctccatgagctacgtgctgcgcgacgtcgccgtcgtcctgggcctcgccgcagcggccgcgcgcctcgacagctggctcgtctggccgctctactgggccgcgcagggcaccatgttctgggcgctcttcgtcctcggccacgactgtggacacgggagcttctcgaacaaccccaagttaaacagcgtcgtcggccacatactccattcctccattcttgtgccataccacggatggaggattagccacaggacgcaccatcaaaaccacggtcacgttgagaaggacgagtcctggcacccgctaccagagaggctgtacaaaagcctggactttatgactaggaaactgcggttcaccatgccgttccccttgctcgcgttcccgttatacttgtttgcgaggagtccagggaagtcaggatcacacttcaacccaggcagtgatctgttccaacctactgaaaagaatgacatcataacatcgacggcgtcctggctggccatggttggtgttctggccggtctcacctttctgatgggtcctgttccgatgctaaagctctacggagtcccatacttggtatttgttgcttggctggatatggtcacatacttgcaccatcatggccacgaagacaagcttccctggtaccgtggaaagcgagttgtagaatcataatacatctagtcctagaaatggaagatgcctaaggac

SEQ ID NO: 81199 - DNA, 2544 bp, Zea Mays
tattgatcagaggtcgtcagattctcgatcagcgtttcacgagacagatcgtgtcgtgagtagtttgtgtctggagcgctcctgtgtgtacggtaacatacgtaacagctagcagtgtcctgtccatatatgtcacgttattgccgtttctaagatgcagtcaaatgccaaagctggtccgctaatcactgaacattaagctaggcagccccaaaatatataccactgggacattcattaacagagcaggtcgcaggtgtagctagccgtgcgtactatctgaccagaacaccatgtgatgatggcggtggtgttcatatctatcagacagcgggtaggcgaaatcgcagtacagactggacacgcgtgttgttgaatcgcgaaagctggttagcatgattgcttgccgccaacaaaaggcaggctttgaagcaaagcaaacttgaaagaagggcggatttacgcgttcagttcagaagaaacgtgactggaaacccgggattggcacgagcacgagcgggaagatttatttgtgaggcggcgatgcaacggccgtggatccaacggcaatcggcatggaatgcaaccgcgctctggcgtccgcggtcaccaccaccatttcttttccgggcgccctatcagatacgacgccggaggctctcccggccccgttagttgaggggtggcaatcatcatctcgccgacacgttttgggcgtctcgtacgctaccacatgaccggcgaccaaaccggtagagcacaccggacggacaccagccacccgtcgtgatgtcgcccgaccacggctgtaccgcgacacttgcagtaaataaaataaaataaaataaaacaaataaaaaggacgcaaaggaacagaggcaaaggcagcacggatgtctgtctctctgtctgtacgccgagatctgaagtgcgaagagtagtcgtacagtacagcgcaggccgcaggccgcaggccgcaggcgccgggaaaaggagtccaagtggccgccaaaagggaaaggacccttgaatggcggacgccgggagcggcagggcgacctcctcacagcacatgccccggattctcaccgcccgcagagcgagctttgcttcggcaatacgcgacgcgacccgacgcgaagcaaggatgatggatggctgtgtggtacctaacctacctgatctccctgatctggtcgaagaggcggaggtccagcacgtcgtcgaggcccgcgaagaggacgacgccggcgaggcggtggtgctcgacgtgcccgagcgccacgttgcgctggtggtggcgctccttgcccgcgcccgcggcggtgaagttgtccctgtacgtcaggtggcggtacatgagccccgtggcgcgcagctgccgcgccgtggccggcgcgtccggggcggcctccacgaccacccacagcagcggcggcgccaccagccgcagcgcgtgcgccgtccgcgtcagcgcggcggcccgctcgccggacgccacgggcgtcgactccgtcgtcgtgacgaccaccaggagcgggcgcggagacgctgcccggtcgtagccaggccccgcgccgtgcgccagcaggctccggttcaaggccccgcccgccggcagcgcccgtaccacgtggctgctgctgctgctgctgcccgccgccgccgccgcggacgtccagtcggacacggacgacggcgcgaagccggtgaagaagcccatgacgaagcagagggaggaatgcagcagcgccttcttccacagctgcgacccctgcttcttgccccgccaaccggcgccaccgtggtccgtggacgaccccatcacagaagccaaccagcagaacggcgcctctgcttagctcctcgttcgagctaccgggaccgggacctggcctcgtgtcgcttaatcggcgtcgcgtcgtgtcaaagccctgggctatgcaagcgtcgcctaaataacgaggtagcttagctagacgcctagaccgacgggccgcagcagcaagcgccaagcggccaagcggtgttggggaggcaagtgaatttggtagtggtggtggtttaaaaagggcgggaggtggcgagcaggggaggagcgccgcgaggagacgagacgagaggacaggatggcagcaggctagagcggagcggacgaggggagaggatgtcgtgttggtgtcacgctttttttcttccctttatcatcccggagcagcagcaatcataaggtgtgccgtgtgcgagcaagtgaggcactaattacacttccccaaccaagcgtatatgtgtgcgtgtgtgtgtgtctgcgtggcaggatggtgtagtttcttcgtagccgtggctcgccgcgtggtgtctcgccctcgccgccagtgccactagcggcgtgctatactatgccagtcccattccgaactcttgcccgtgcccgtgcttcgctagtactactactgtattttagtgtacgcctgtagtgcatgaagataccacgtcacttgtagagttgtctccgttatgctcggccctgccactgccagtgcc

SEQ ID NO: 81200 - DNA, 2043 bp, Zea Mays
gtccactcgccccatctgttcttgcctccactccacccccagctggccggctggccgaaatgacgaacgatgaattcctagcagtactgcccccaccgcatgatcagctgcgagaggcggagtacagttcaagtcttgcagagctgcagctgcaggtgaggactgagagatcagagatggccagcccagctggggatctctctcttctctcctctcctcacagggcgccagggcagacgccaattgttgccagggctagaggaccagacggcagactaggagtaggctgtcctgtttccgttgtccgcccgcccaaccaccacaccctccccccggattataaacacagcgcctctcctcactcagtcgcctcctctccgtctgcgttcctgtcgtggcccacatctagccgtcgtcgtcgtcaagaaaggaggcgccacaatgacgatgatggcgcctcatccgcagccactgccgctggcacagccgccggcgttcggggacaccacgctcaccaaggtgttcgtgggcggcctggcgtgggagacccacgagggcgccctccgcgggcacttccagcgctacggcgacatcctcgaggccgtcatcatctccgacaagctcaccggccgctccaagggctacggcttcgtgacgttcaaggaggcggacgcagccaagaaggcgtgcgaggatgccacccccgtcatcaacggccgtcgcgccaactgcaacctcgcctccctcggcgccaagccgaggccccagccgctgcagcacgtcctccgtccctcgcccccgcacgcgcacgcgcttccctctcctcaccagcccacgccagccatcgcggtgggatccaggagcgtgtcgccggtgccatggtactaccacccctccacgacgcgccctccgccgccgccggccgcgcaccagcagtaccacggcgtgctcccgttctaccccgccgccgccacctacgggtactccccgaactacgtcacggacctgagctacaatacgaaggtaggccaagcggcagctgccggcacggcggccgggtcctacctacagctacaggggcacttggcgtaccaggcggcgccagctcagggcggcatggtgccggtgtacccgttctaccactacccgtaccacgcctcgcactcgcagggcctgggcgtccccgccgcgcacttcctccccccggtctccgccgccgccgtcgtctcctccaagcccaccgtcgtggccactcccaaaggtagacagcatatcatagtacagcacctaaatctatacaagcgcaacacatcgcatatgtgcaaccgatgcggcgccacccgtgcagctcagctctgcatgtgctcggtgtgccatggcatttcagctggtcctggccgtgccaagttggcatgcatgcatgcatggcaggcgcacgcaacgaaacattgagatgagatcccgccgccgtccagctaaatgccccgcatgcatctctttgtactggcgtgcagcagtggagtggagcgggtgacgggttgcagctgaaggcacgaggcgatggtggtggtggcggcggcgactatgggcggcgcaatgaaaggcgctctgctctgttaacaagctgcacatgaagggtgtcggatgccgaagcgacgcaaggccgcattagttacattcattcaattccctctaacttcgaccacagtaccggcaacaacagtctgtaacaaacaaatgactggattcgtctctcgtttacctctgtatttttccaatggtaaacccgtttatcagtgtctgtagtgtagtagtccgatcgctgcaggtgacagcggacctcaataaaccgtcatagtatttcgccctattctatggtcgaaatatctcagttaaaaagtaaaggggcgctaaatagagggaatgactgaagaggagatgaatttggttttctttgaatactctagtattgacctcaatccacatgtgttgaggtgaattcgagtgtaaattagtttaagttatactctaatccacctcaat

SEQ ID NO: 81201 - DNA, 1375 bp, Zea Mays
taggagtaggctgtcctgtttccgttgtccgcccgcccaaccaccacaccctccccccggattataaacacagcgcctctcctcactcagtcgcctcctctccgtctgcgttcctgtcgtggcccacatctagccgtcgtcgtcgtcaagaaaggaggcgccacaatgacgatgatggcgcctcatccgcagccactgccgctggcacagccgccggcgttcggggacaccacgctcaccaaggtgttcgtgggcggcctggcgtgggagacccacgagggcgccctccgcgggcacttccagcgctacggcgacatcctcgaggccgtcatcatctccgacaagctcaccggccgctccaagggctacggcttcgtgacgttcaaggaggcggacgcagccaagaaggcgtgcgaggatgccacccccgtcatcaacggccgtcgcgccaactgcaacctcgcctccctcggcgccaagccgaggccccagccgctgcagcacgtcctccgtccctcgcccccgcacgcgcacgcgcttccctctcctcaccagcccacgccaggtactccccgaactacgtcacggacctgagctacaatacgaaggtaggccaagcggcagctgccggcacggcggccgggtcctacctacagctacaggggcacttggcgtaccaggcggcgccagctcagggcggcatggtgccggtgtacccgttctaccactacccgtaccacgcctcgcactcgcagggcctgggcgtccccgccgcgcacttcctccccccggtctccgccgccgccgtcgtctcctccaagcccaccgtcgtggccactcccaaagcagtggagtggagcgggtgacgggttgcagctgaaggcacgaggcgatggtggtggtggcggcggcgactatgggcggcgcaatgaaaggcgctctgctctgttaacaagctgcacatgaagggtgtcggatgccgaagcgacgcaaggccgcattagttacattcattcaattccctctaacttcgaccacagtaccggcaacaacagtctgtaacaaacaaatgactggattcgtctctcgtttacctctgtatttttccaatggtaaacccgtttatcagtgtctgtagtgtagtagtccgatcgctgcaggtgacagcggacctcaataaaccgtcatagtatttcgccctattctatggtcgaaatatctcagttaaaaagtaaaggggcgctaaatagagggaatgactgaagaggagatgaatttggttttctttgaatactctagtattgacctcaatccacatgtgttgaggtgaattcgagtgtaaattagtttaagttatactctaatccacctcaat

SEQ ID NO: 81202 - DNA, 1623 bp, Zea Mays
tttgtgcttaaattcagtgtcaatatattaattaggccctggaacctggatcaaagtctggtacaggtagtcttcagaacaaaagaaaatggaagttacagtagccgatgaatagaagaggcaatatcccaagagctaaacgtactaaacaatgctggcagtctgagccacacttctctaacacaaaaaatatatatattctatccatcaatgccattaaaaaaaatgcctcccacatgccaatttaatactacaggtattattggacttctacccttgatgtccaattgctgaggcggtacggcattggatttgttgtgatcgccaccggtgtagtttctcatcatatattagctctaggcgctggcaggacaaagaaatgatggccgtatttactgtcttctagggtggtcacggcttgttgctgcgctttttggattcactgtaaagaatgacgccaaaaactgtgagagtgtaaccgagcattcctgttatggacacaggattcctgaatatcatgattgagatgacgactgccacggcaccctttgcatttccgagaacctgaagggacaaggatgtcaataattgaaggatttaaagctaaattcttaaaacaagacaaggtacggtaaggcaagataacaaacaaaagactatcaaagcaagtggtccataaaccaagatagagcaatctgatgattatgcatctaaaatacaaagatgagtagaaagctttactcataggacagcaaggtatagacgtttacttttcttaaacccgtaggaattaaagcaaatatgttactttctacaaacagattaagaacatttatattcaattctgacatgtgtttaatccatcaagtatccaatattttttcaataacaaacatcaaaccacaaaaggcgtttccccatttgtgtatgtttaaagtcactgtagtgttatgtacttcaaagttcagaccatacactaggtgtaaaactccacagaaacggcaaaacacagaggattagaaaggtcgaatgttacagaatagctgaatgtagtggtacatattagtaccgttacccacccatcttaaatatagtaacgccctgtttggatcattagaattgaattccattctaataatagtaatttaggtatatatcaattaagctaattcggttttatacaaaatatatttgtatactattattagcaagatgtcgtagatatttatgtgctacatttttactatagattagtgagacgaagagcgtcatgtaagttacatattagaaacaaaatctactaatgcataaaatcatttctcatcctcctccctatgaatttgagataggcttatatctgaactttggaaagtggtggaatgtcaaattccaaactaaacaagttacattattgagtgaattcaaattcatctaaaatgaaggaatccaaacgctccgtaacaaaaaaaggcaagaaaagctaggtgtaaaactacatgcacacaaagttgaattgatgagtcagaaagtattttgtacctgtagagtcagtgcgctagtatgtttggtcaccaagaaattggtcaaattgacaaaatatgacaagcaagaattgaacagtag

SEQ ID NO: 81203 - DNA, 3198 bp, Zea Mays
caataacagattcatagaattaagcttctccctgcaagacatcagaacagagaaacactcagcatccacacaaatgcaaagcagtaaatggatccaaggcaatgtgtaaaaaacagtgggttataagatagaagacagaagttacccatcagaagacagaagaattccttgcagtactgtcttcaacgcccttgctgcagttgctcctatgcacatgatgaatccaaacagatgaaagctaggctcgccctgtaaattcgatttgcaaattctatatcagtaagtattagaacctagaggtccaacaacagctctagccagtatgcattcaaagctctacgttctccacttgactcacatttgatatctataccactgttttcaagtcgtccgattaatcgtgattaatcgtccaaatcggtctggaccaatcatgattaatcgtccaagtcgtccaactaatcgcgatttatcgtccaagttggtcagccagaacgaccaacaagtcgcccgacttgaaaacaatgatctatactagttgatgtgaaacaaatacctcctaaagattcctcatagcagccaacaatagaatcaacttggtagactgagatgctacacgttaacataagattcccacatcccacctccagtggtcattgaacattttgctagcctagtatgccttgtattgtacaaatgagctgtaacacaatgttgtatatattatgtataatgcaagagaatcaactcaataatggcgcaattaacagcccagttcatgttcaacgaatgtataggcaatctatcatatcagttccaaaaggtgaaccaatgctttgattttataatcaaatttcaaaatgtggattactttccagaaacttatttttaaaatcctgacttgtaaatccattttttatgacactaggcgctttgtgtgtaggatccaaaaatttaaggttagagaggcattgaaaaggacgaaaacaagtaagacgatagggcttgatggtacccaatcaaggcatagagatgcctcggggatatagctattgtatgtctaaccaagttgttcaattatatcttctggtcgaacaagatgcttgacaagtggagaagtatattggtaccgatctacatgaataagggagatgttgaaagttgtaccaattagcagggaattgagttgatgagttgcactatgaagttgagagagagaatagagagagaggggggagatatcgagcatcgtctgacaggaataacgaggatctctatggaccaagttgctttcatgcccagaaggtcaaccatggaagccattttcttaataaagacaagtgatggagcagtatagggagcaaaaggacttacacatagttttcgtcgagaaggtttatgacaaaatatcaagaaattttacgtagtgggttttgaacaaacatgaagttctgatgaagtacattggactcattaaggacatgtacaacaatgttgtatctagtgtttgaactaacaatagggacacgagtaacttcccaattagaataggagtataggactacatcaaagatcaactttgagcccttacctttttgccttggtgatggataaggtcacatgggacatacaaggggatatcccttggtgtgtgctttttgtggacgatgtagtgctagttgatgaaagccgagcagaagtaaatagaaaactaggacaagagctctagagtccaaaggtttcagattaagtagaactaaaaacgaatacttaagatgtaacttcagtactgctacacaatgaggaagaagatgttagtttagaaggtcaaatagtatcaaggaaggataccttccggtatttaggatcaatgctatagagagatggggatattaatgaagatgttagctatataatggaagcaaactgaaggaagtgacgccaaacatctgcgttctatgtgacaataggatatcacagaagctaaaaaggaaagttttataggatgatgattaaacctactatattgtatttgtatggtgtagaatgttggcctacaaaaagacgacatgttcgatagattttttcatttttgaatgttggcctactatattgtatttgtatggtgaaaatgtgtatgctacgttagatttttcatttttgaccatacaataagggatcgggtccgaaataatgacatacgtgatacgctagaggtagcaccaattgaagaaaaatttgcccaatacctattaagatggtttggacatatatccaacagagacatcaagagtcaagaggcagttgtgcatagtggaatcctacatttatggaaagagaggtagaggaatgtcggagataatataggaagaggctgtaaaatggggcacgactactgtacaatcaaaccttatgtgcaagcgagcatcctggtctgttagatcgttatccaaccgtagatataattgtggttctttaggggattttttacacgaaatgatggaatacacccaaaggattagctttaaatagaaacaaatgaaaaacagatattcacgtgcctaaacctttggttgggttttaactctagcctatctcaacttgtttggaactaaaatattttgttgctattgttgttgttaacttgcaaatccacagtttccagacatggtttcggcagggggggaaaacgagctacccctgtaaaagctcggtctagctggatccggtggttttggttaactggattagtctctagctgatcacatagatagtgagtagctgttatgccagttgatcacttggccccatgccatcagatgatagccgacgcctgaggtaacatctacaggcaccctgacacacagtgaatggtttccatctgataatcccaaaaatctgttcccaacgaagggatcaccatccaatgaactgaggctgccgtttgtgtccaattatagtcagatgacagatccacctgttctcgtcagctccatcccactactgcaatccgaggcagccaaacccggattccactcagatccaatcccgactccaacagatctactgagaaaacagaagacagagacggagcaggcagcaacttacgccgctggcgatgatgactccagtaacgacgggcacgagggtgaggtaggtgatccacgactcgcgcttgacggtcatgatgtacgcgaa

SEQ ID NO: 81204 - DNA, 235 bp, Zea Mays
gtacgacctctgcagagtgttatgaaactgatatatcagccgtgctcacggttatgagcggccttgggatcctctttgattagagatacagatggttcaatatacaatgattctattgatggttttggttcgatgatgataatgatgtttcctcgatgaggaaatggttcacgggttggttattactaaaacttggcttccactgataataaatatctgaccaactaaaagcaac

SEQ ID NO: 81205 - DNA, 2902 bp, Zea Mays
cgtgctgactgtaggaccgctgacctagagtagcattggccgttttaaggacttattgattattacttcaccccatccttgattctgcttcaaaatattagtcagcttgactaattctatgttgttctcctatatgcccccttgccaaaagtattttattctagtatggtctatacttctctcaatctattagatctgatctcactcttatgcttgcgacatctttgttgatgccccctgaccatggcctttagtcttttgggactctttcctcatccattattaaattgctaccatttgaccatctctattccattttgttattgacatgctcgtatccttgcatttttaatacccttaccccttaatctaaagcacttactcttgtacatctactacctatttaaacatttcagtttatatgtccatgatcttaccgtcttttgagaccctttcctattctattgataagtcgctatcttttggcaatttgtactttcttggttttggtatgctcgtaccattggaatcttgcatactcttatttttatatatgcttacctttatgtcccaatatctgtttgaaatatttcagttaacacgcccttgaccacccttgtttcctaatgatccatgagtgatcattttattttgcacacctgtagtatctcgcgagtttgtaacctcatccttgttgtgcttttgtttcttattgcctttacccttctcatctcttaatcttaccttagcgattacgttatgtttgttatctaaaacctccaatctcccaccttagttcaagcgtggtctcttacttatctcacccttgactatatcctcttctttaccgcgtgtaggcccagacttaactccattcgttattgtatttgtaccacttgctcttctatgcctttatcttttatcttgcacccttgtccgttatcgcctttggcccttgcgatatttatgtcttctacctaaatgcttaccttaaacttatcctttaaatcctcccctttcttcaacccagtttgagagttgcgagttacctaccttacccttgattgttttctccacttcgtgagtcttgcctgagctctatccttatgcttttcattattagcacctttacctttgacacctctatatcgtacattgatgtttatcttatacctgccctttaaattcccctcttttccacctcaatttgggagtggcaatttacctatctggcccttgaatgcatcctttcctctaacacttgcaggtcctgtcttaactccatcctctgtggcatttatattctttgtcttatgcctgtttacctcctctcctacatccttgttcgttattactttcaaaaccctcgtgatatatatgcccttgtcttcctgcttaatttgaacctaccctttaaagcctcctcttctccatcccggtttgaggaataatgcctcacctacttcaccagtggttgcttacccttccttgacgccttgcaagtcttgtttaaaatacatcatttattgtgtgtttgtccgttatcaccttaacccttgtcatccctcaatctttatcttgatgcttatcctgtacctgcattttaaagccgccttttctatttcatttcaagagtgatgtcttacccattccgctcttgttcgttccctattcctctgtcgtgttgcaagtcttgtcttaactcgaccttttggtgtgcttttgcttgttacctcctttacctttttaatcatcagatctttccatgaagcttatcctatgcctaccttttgaaatatcatcgtttccatctcaatttgagaatggtgttttacctatcccgaccttgctttgcattttctcccagctcggttacaattcttgctttagctccatcctttattatgctcatgcccctatcttgtatgtcttatcattccccttgtcttttgatgaccttagattagtttcccctttgtaaggaaagaccaccatctagttaacattaacgtgtagcaacgagatgttttgttgctgtgtgctcgtgatgtttgtccttatgttatgactgatttgcttctttgtgatgagtgttgatgtgttgtggcccttggtctgcaatgacatcagtttattaggtgagtgccatatagttaagcagttgggttcccccctgctctctctaatccatttatacgtaccttttctcgctattctttcctcttgcacctgtccatttggcaaccttcaattccttcaaatcagacaagatcagagtcggcaacatcttcaccaagtgcatatcaacgctcttgttaagggggttagccgctaaccccaatgaagacaatgcgatccacgtcaaccaacaagatcagagtggcgcagcgaaagcgtgtgtgggtccagcccataggtcaaagagatcttcacgaattgcatcaaccgtctcaagcatctgaaggtcaaagcaaccaacccacaagtcaagccggcggagtcaaagccgtgttagaagaatctacaaaaaaaaccaataaaccaatctcattttcttgctagcctcttcttgaatctcgagggcgagattccgttaagggggttagatttgtaacaccctgaatttggggtataaaatttctttgctcatattcacaaattcgggtgttactcctctcttcacacctttcccaatctcctctttctcttttctatagaagaagagtggctatttttatgtgtaattatagtctagtaggctggactccaagggagtatgaaatgttgcatcatgttgaaccctaaacttcacttttgtttgatgcatatgcttgagggtgctaatttgaatttgtggcatatttgaatttgaatcaaatggagtaaataaaaataaaaggga

SEQ ID NO: 81206 - DNA, 1622 bp, Zea Mays
ttgctgttgccccttgccgtggaggcgtggcgtggacgtggagtgagtggggatggatcaggccggtggcacgctgctcgagaaatagtcagccggccagggccaccaaccgcgcgcctcatggtccaatcatgcgcgtccaaatgtgcatcctttctggccgcacgatcgctaggattaacggccacaatgcatcctacgagaagcttccctttctcccatcaatcctccggacctccgtcctataaaccgccggggagcctctctctgctcgcagccatggcgaagaattacccaaccgtgagcgccgagtacagcgaggccgtcgagaaggccaggcgcaagctccgcgccctcatcgccgagaagagctgcgcgcccctcatgctccgcctcgcgtggcactccgcggggacgttcgacgtgtcgtcgaggaccggcggtcccttcggtactatgaagtgcccggcggaactggctcacggcgccaacgcggggctggacatcgcggtgcggctgctcgagcccatcaaggaggagttccccaccctctcctatgccgatttctaccagcttgccggagttgtggccgtcgaggtcaccggtgggcctgagatccccttccaccccggcagggaggacaagcctcagccgccacctgagggccgtcttcctgatgccaccaagggttctgaccacctgaggcaagtctttggcaagcagatgggtttgagtgatcaggacattgttgccctctctggtggccacaccttgggaaggtgccacaaagagcggtctggttttgagggggcctggactacaaagaggcccacctcaagctctccgaactggggtatgctgatgcttaaatggtccatatcctggagcgggacacaaactgctgcctgtatggactcgtgcgattcagggtgaaccatcagattgtctagtgtcttctttgtaataaatttatctgttcttggtactttgtctatggttgaatcggaacccattttccgtttgcctagattcttaatttctggtgctgtatccagctgaaactagtagatctatgatcttgtggctgcagcatgttcttgtcacttttatctggtctccgttggttcggttcacaggttgtgtgctttaaaaggctgtgcttaagtcctgcaattcgagtccaccaaactgtagggtgcaagtcgagattttattagtgatgcaagttgctggtattggtgcattatcgggctaatacgcttgcgttgccttctgattttataagtgatgtaaattgctggttttaacgtgcattacctggtgggctggttctataactgatgcaaattcctggttttaacttggtgcattaatggtgcgtttggcaagcaggatctgctgtcatgcatttgtggcgcacccgtttcaagcgtgaaacgttcaacacttctacttgtcaaaagtcgtgcctaaaacaatctgcttgttacgttttctcgatttctgcttgtagggttgcaatggccagacgctagttttgcagtgattctggttttcaatttctgaaatatgaattattgctctaatccatttgttacataggcttttacccaaaaaaaaac

SEQ ID NO: 81207 - DNA, 1193 bp, Zea Mays
aggtacgggtgctccagcgcctcttccactgcacggcaccggcacaacagagtttatttagtgtaatgaaggtatgatcaatcactcgtcgtgaacttgtagagcaataagtataatgaaggtataatccaagtcctggatattctaatgtttaagatcatgtatagatagatagctgcctgccaatgccagtgttgccagtggaggaatctaatatttagggctagtttggcatcctatcttttcaaggaatttctattttctaaagaaaaattagtttttttttattttaaaaatagtgttaccaaactagcccttaagactatgtatcgatagttttttttctatcttaaaacatgtttattttctatgcacatagccccgtcatcgtcatttcggcaaaagcgatatggaggacaggaggaggatacaaagccgaggatgggtcaaagcagcagcacccaaagtactgtaatgtaaacgtagaaggtagtaacatcaaggcattaatttggatgcaaatggagaaagctcccgcagaccacagcgtgcacaactttgatgagctggatgcacaatattagaattgggaaacgcaggaggagaaagaaacaagcagttaatagcctattagctagagatattagatgtctctacctaaaaacagctaatagcctatatctccaactaattttaaacagcagctaactagaatcacagaactgacgccctgttttctgttatggtctctaactctgaatgaattcaacgaagaggagaggactaccaaatcgttccgttttgttggcgcgtgaaagtttctagttcagacaaagaagattgcatatgctcctgagtccttaccaggccagtccaacacccaaaattgcgcggacaaaccaaacgcatgcccccccctctctctctggaaatgcgacatgttgtcagctgcgttgccttgcctacatactacgcactatacactgcatcgcgagtgcatgcccccacatgctagtaccacagtgactaccgacgccaactaaagaacacgtgcggcggagttcaggattcagcagccacccagttgcaagttgcacatggagagaagaagctagggaggaaaaagaacaggctaagctgtagtaggcccgcgccgactgacctgtgatcctctgcagcgggttgaaggtgag

SEQ ID NO: 81208 - DNA, 1411 bp, Zea Mays
gccattgtttgtgttacaaaatattgtattttgtgatcaattcaaggagtgcgacagataattcccaagggacaccctcttgagaacgcaccccttcacccgtatataaacagagttctcgctgcaataaagatatacgactgtcatttgtcattctctcgcttctcgtttttcactgcgcttcaacacgttatcagcacgactcgcgagatcagagaaacaaatcagagaaaaaaaagaggaacaagttgccgctagcaagatggaaaggagtggcttcgatgtccagaaacagtacgtgcgaagtatccaattcctttttgacttctacaaaatacgttgtagcactgatgatgtatgtgtagtgctgcttgtggcctctgcgcccacgctcggtcgccgtgccgacgacgcacacagtgggacccatgccagtgccatggtgctggggctgtgtgcccgcccgcgcgaataggagcctgcgcccgcgctgtgccgtgccatcgggggcctgcccgcgtgcgccgagcagccagggccgccgggaccaagtgctcatgcgccggggcaggccgcagctcgccgggcagccgcgcgccatggccgggccgccgcgcccgcgcctcggccgggcagccgcacacgccgtgtgccatggcaggccgccgcgcctgcgctgccggggtgccctgcacgcgctacgccgaggccgccgtctgggggcctacgcgctgcttggcccgcgcccgcgacgcaccggtggggctcggccgcctcgccgggatggccgcgactaaggctgcgctcgccagagacgggggtcaccaaccgccagggccgcgcccacgacgcgagccgccggggccagtgccgtcgtgcccacgcgccgaggttggggctggggccgcgtgcccgcgccaccagagggccgcaccatggcaccgacgtcggggccgcgcacccgctcagtggccgcataggtcgtgcccacgtgttcgcgctgttgagaccgcgccgagccgccgcgaagcccgtacctgggcatcgcgccctgcctgctgcaccaggacggccggccgccgccaggagatggagtggttgcaaccctaactgccagcactcctctagatgtctgggtcgtctagtgggccggttgaggaggttgcctagccaactgcctggctggaatcggcctgaatgggctacctgcggttgggctgaatcctttaccattttttctgattttctgcaattataatcagacgaacattgtgttcatttaaattactgttttcaacagtgttgagtatctaaatttaaatatttagattgcttattatatatgtaattgtacatacttgtctgtttttagtataaaaaatgcagacttgttagtgaattatattttttt

SEQ ID NO: 81209 - DNA, 2757 bp, Zea Mays
cccagtttggaaacgcgtagcttccatctccactcccacagtcccgctcccccgccatggccttggccatgacctcctcgtccacgcagccaccgtcccctcaccaccgccgccgtcgccgctcgcaacctaccaccgccacccccaatgccaactccaaacctaaacccaaacccagggccaaggcgctccccctactctccgacgtcggcgtcggccgcgaccccgccgccatcaagtactacgcccgcgtcgcatctaacctcgcgggcgccggccgcctacgagacttcctcctagccgccgagggcctccgcgcagccgcgtgcaacgaccccagcttcgcggcccgcatcagcgcccgtctcctgtcgcgcggcgtcgccgccgctgtccgcgagcgcggactgcccttcatgctcgagttcttccgagacgccgagcgcgtgcgcgtgccggtagtcgagatgctcgacgccgacgcgtccaacgctgtcgccggcgcctgccggatgttgctggaggagcgacgaatggtggagttcgtggaggtcgtcgaggcgctagctcgatatggattctatgttcaagacatcgtgaaccccatggatgtactgaaaatatttgtcaagcagcgtgacccagatatagctataaggtatgcacgcatatttcctagttcccaacttttactctgcaataccatggaagcttttggaaaaagaaaggagttgaaaaatgctttattgatctttggagcccttaagaatcagcttggaggcatcaatatgtttgcatgccgaagtataatagatatatgtggccattgtggctcttctgtacaggctcgaattatatttgaggggctgcttgctgataagattactccaaatacctatgtcttcaacagcctaatgaatgttaatgcccatagcttgagctacaacttttcagtctacaagcatatgcaagtaatgcattttctactttattgttgctgttcatagaatcttggtgtccctcctgatttgacttcatataatattcttctcaagacatgctgcagtgtcagagaattcaacttggctcaagaaatttatgaggaaatgaagaaaaaggaacgtgatggccttttaaagctagatgttttcacatatagtacaatgatgaagatgcaaaaatgtggaagatggcttccaacatcaaagaggatatgcaagcaaacggggttcgtcttaacctagtaacatggtcatcgttaatcaatgcttatgcaaattctggtctggttgatcgtgcaatagagatcctcaaagaaatgataagggatggctgccaacctactgccccatgcttcaatattatccttactgcatgtgtcaagtcatgccaatatgatagagctttccgcttgttctacagttggaaggagtctggtatcaagatctctctatcctctgaacagaagagagttattgatggtggctttacattctgtaaagagtatcctaataatgacagtactatattggtggttccattcaggccaacagtcacaacctataacatcttaatgaaggcttgtggtactaatgcagaacgtgcaaagtctaccatgaacgaaatgaggcggaatggcctttgtcctgatcttattagctggtctatactcatagatatttatggatcttctcaaaatagggatggagctgttcaggcactaaggagaatgcagcgagttgggatgagacttaatgtctctgcatatactgttgctattaaggcgtgtgttgaaaacaaagatttgaagttagcactgcacttatttgaagaaatgaaaacacaccaactgaagcccaatttggtgacgtacaaaactctcctggcagcacgcatcaattatggatcactacaggaggtccaacagtgtttagcgatatatcaggagatgaggaaagcagggtttcaggcaaatgattattatctcaaggaattaatagtggaatggtgtgaaggagttctgtctagtcgcagtgataatcaagatttttacaatttggatctacaacctgagactgagaggaaagaatcgttcaacctgtttcttgagaaagtcgtaacagtcttgcaaaaagatactgatcagaaccaaattgtcgatgttcgtggcctttcaaaggttgaagctcgaattgttgttctctctgtccttcggaagatcaaagagcaatacctcctaggaagagtggtccaggatgatgtggttatcatcacgggtcatgagaagacatcaacaactgaagctgaaaccacaactagtgcagttgacgtcgtgcaggcaatagttactgttttgacggatgatctgggtcttgaagttttgattggacctggaagctgccctcccgtttcatcaaaacccaaagcaccgactaaatctagaagtaatttagagcaaatatccaaagaatttactaggagaccacagggaatgataaaaatccctatcaactcacttaaccattggttaaggaagaaagccgtgaggattgcagagtgacatttccttaaaggcttaaactacctttttggtccatttagtataccagtaaatcagcacagctattccaggattgggtgtacatatgaaaacaggttactgctcctggtattccaggcacactgacacgacttgaaaagggacttgttggcaggcaataaactgtgcttctgtgttgatttaatggtcgtgtttct

SEQ ID NO: 81210 - DNA, 2659 bp, Zea Mays
cccagtttggaaacgcgtagcttccatctccactcccacagtcccgctcccccgccatggccttggccatgacctcctcgtccacgcagccaccgtcccctcaccaccgccgccgtcgccgctcgcaacctaccaccgccacccccaatgccaactccaaacctaaacccaaacccagggccaaggcgctccccctactctccgacgtcggcgtcggccgcgaccccgccgccatcaagtactacgcccgcgtcgcatctaacctcgcgggcgccggccgcctacgagacttcctcctagccgccgagggcctccgcgcagccgcgtgcaacgaccccagcttcgcggcccgcatcagcgcccgtctcctgtcgcgcggcgtcgccgccgctgtccgcgagcgcggactgcccttcatgctcgagttcttccgagacgccgagcgcgtgcgcgtgccggtagtcgagatgctcgacgccgacgcgtccaacgctgtcgccggcgcctgccggatgttgctggaggagcgacgaatggtggagttcgtggaggtcgtcgaggcgctagctcgatatggattctatgttcaagacatcgtgaaccccatggatgtactgaaaatatttgtcaagcagcgtgacccagatatagctataaggtatgcacgcatatttcctagttcccaacttttactctgcaataccatggaagcttttggaaaaagaaaggagttgaaaaatgctttattgatctttggagcccttaagaatcagcttggaggcatcaatatgtttgcatgccgaagtataatagatatatgtggccattgtggctcttctgtacaggctcgaattatatttgaggggctgcttgctgataagattactccaaatacctatgtcttcaacagcctaatgaatgttaatgcccatagcttgagctacaacttttcagtctacaagcatatgcaagtaatgcattttctactttattgttgctgttcatagaatcttggtgtccctcctgatttgacttcatataatattcttctcaagacatgctgcagtgtcagagaattcaacttggctcaagaaatttatgaggaaatgaagaaaaaggaacgtgatggccttttaaagctagatgttttcacatatagtacaatgatgaagatgcaaaaatgtggaagatggcttccaacatcaaagaggatatgcaagcaaacggggttcgtcttaacctagtaacatggtcatcgttaatcaatgcttatgcaaattctggtctggttgatcgtgcaatagagatcctcaaagaaatgataagggatggctgccaacctactgccccatgcttcaatattatccttactgcatgtgtcaagtcatgccaatatgatagagctttccgcttgttctacagttggaaggagtctggtatcaagatctctctatcctctgaacagaagagagttattgatggtggctttacattctgtaaagagtatcctaataatgacagtactatattggtggttccattcaggccaacagtcacaacctataacatcttaatgaaggcttgtggtactaatgcagaacgtgcaaagtctaccatgaacgaaatgaggcggaatggcctttgtcctgatcttattagctggtctatactcatagatatttatggatcttctcaaaatagggatggagctgttcaggcactaaggagaatgcagcgagttgggatgagacttaatgtctctgcatatactgttgctattaaggcgtgtgttgaaaacaaagatttgaagttagcactgcacttatttgaagaaatgaaaacacaccaactgaagcccaatttggtttcaggcaaatgattattatctcaaggaattaatagtggaatggtgtgaaggagttctgtctagtcgcagtgataatcaagatttttacaatttggatctacaacctgagactgagaggaaagaatcgttcaacctgtttcttgagaaagtcgtaacagtcttgcaaaaagatactgatcagaaccaaattgtcgatgttcgtggcctttcaaaggttgaagctcgaattgttgttctctctgtccttcggaagatcaaagagcaatacctcctaggaagagtggtccaggatgatgtggttatcatcacgggtcatgagaagacatcaacaactgaagctgaaaccacaactagtgcagttgacgtcgtgcaggcaatagttactgttttgacggatgatctgggtcttgaagttttgattggacctggaagctgccctcccgtttcatcaaaacccaaagcaccgactaaatctagaagtaatttagagcaaatatccaaagaatttactaggagaccacagggaatgataaaaatccctatcaactcacttaaccattggttaaggaagaaagccgtgaggattgcagagtgacatttccttaaaggcttaaactacctttttggtccatttagtataccagtaaatcagcacagctattccaggattgggtgtacatatgaaaacaggttactgctcctggtattccaggcacactgacacgacttgaaaagggacttgttggcaggcaataaactgtgcttctgtgttgatttaatggtcgtgtttct

SEQ ID NO: 81211 - DNA, 2731 bp, Zea Mays
cccagtttggaaacgcgtagcttccatctccactcccacagtcccgctcccccgccatggccttggccatgacctcctcgtccacgcagccaccgtcccctcaccaccgccgccgtcgccgctcgcaacctaccaccgccacccccaatgccaactccaaacctaaacccaaacccagggccaaggcgctccccctactctccgacgtcggcgtcggccgcgaccccgccgccatcaagtactacgcccgcgtcgcatctaacctcgcgggcgccggccgcctacgagacttcctcctagccgccgagggcctccgcgcagccgcgtgcaacgaccccagcttcgcggcccgcatcagcgcccgtctcctgtcgcgcggcgtcgccgccgctgtccgcgagcgcggactgcccttcatgctcgagttcttccgagacgccgagcgcgtgcgcgtgccggtagtcgagatgctcgacgccgacgcgtccaacgctgtcgccggcgcctgccggatgttgctggaggagcgacgaatggtggagttcgtggaggtcgtcgaggcgctagctcgatatggattctatgttcaagacatcgtgaaccccatggatgtactgaaaatatttgtcaagcagcgtgacccagatatagctataaggtatgcacgcatatttcctagttcccaacttttactctgcaataccatggaagcttttggaaaaagaaaggagttgaaaaatgctttattgatctttggagcccttaagaatcagcttggaggcatcaatatgtttgcatgccgaagtataatagatatatgtggccattgtggctcttctgtacaggctcgaattatatttgaggggctgcttgctgataagattactccaaatacctatgtcttcaacagcctaatgaatgttaatgcccatagcttgagctacaacttttcagtctacaagcatatgcaaaatcttggtgtccctcctgatttgacttcatataatattcttctcaagacatgctgcagtgtcagagaattcaacttggctcaagaaatttatgaggaaatgaagaaaaaggaacgtgatggccttttaaagctagatgttttcacatatagtacaatgatgaaggtgtttgcagatgcaaaaatgtggaagatggcttccaacatcaaagaggatatgcaagcaaacggggttcgtcttaacctagtaacatggtcatcgttaatcaatgcttatgcaaattctggtctggttgatcgtgcaatagagatcctcaaagaaatgataagggatggctgccaacctactgccccatgcttcaatattatccttactgcatgtgtcaagtcatgccaatatgatagagctttccgcttgttctacagttggaaggagtctggtatcaagatctctctatcctctgaacagaagagagttattgatggtggctttacattctgtaaagagtatcctaataatgacagtactatattggtggttccattcaggccaacagtcacaacctataacatcttaatgaaggcttgtggtactaatgcagaacgtgcaaagtctaccatgaacgaaatgaggcggaatggcctttgtcctgatcttattagctggtctatactcatagatatttatggatcttctcaaaatagggatggagctgttcaggcactaaggagaatgcagcgagttgggatgagacttaatgtctctgcatatactgttgctattaaggcgtgtgttgaaaacaaagatttgaagttagcactgcacttatttgaagaaatgaaaacacaccaactgaagcccaatttggtgacgtacaaaactctcctggcagcacgcatcaattatggatcactacaggaggtccaacagtgtttagcgatatatcaggagatgaggaaagcagggtttcaggcaaatgattattatctcaaggaattaatagtggaatggtgtgaaggagttctgtctagtcgcagtgataatcaagatttttacaatttggatctacaacctgagactgagaggaaagaatcgttcaacctgtttcttgagaaagtcgtaacagtcttgcaaaaagatactgatcagaaccaaattgtcgatgttcgtggcctttcaaaggttgaagctcgaattgttgttctctctgtccttcggaagatcaaagagcaatacctcctaggaagagtggtccaggatgatgtggttatcatcacgggtcatgagaagacatcaacaactgaagctgaaaccacaactagtgcagttgacgtcgtgcaggcaatagttactgttttgacggatgatctgggtcttgaagttttgattggacctggaagctgccctcccgtttcatcaaaacccaaagcaccgactaaatctagaagtaatttagagcaaatatccaaagaatttactaggagaccacagggaatgataaaaatccctatcaactcacttaaccattggttaaggaagaaagccgtgaggattgcagagtgacatttccttaaaggcttaaactacctttttggtccatttagtataccagtaaatcagcacagctattccaggattgggtgtacatatgaaaacaggttactgctcctggtattccaggcacactgacacgacttgaaaagggacttgttggcaggcaataaactgtgcttctgtgttgatttaatggtcgtgtttct

SEQ ID NO: 81212 - DNA, 2774 bp, Zea Mays
cccagtttggaaacgcgtagcttccatctccactcccacagtcccgctcccccgccatggccttggccatgacctcctcgtccacgcagccaccgtcccctcaccaccgccgccgtcgccgctcgcaacctaccaccgccacccccaatgccaactccaaacctaaacccaaacccagggccaaggcgctccccctactctccgacgtcggcgtcggccgcgaccccgccgccatcaagtactacgcccgcgtcgcatctaacctcgcgggcgccggccgcctacgagacttcctcctagccgccgagggcctccgcgcagccgcgtgcaacgaccccagcttcgcggcccgcatcagcgcccgtctcctgtcgcgcggcgtcgccgccgctgtccgcgagcgcggactgcccttcatgctcgagttcttccgagacgccgagcgcgtgcgcgtgccggtagtcgagatgctcgacgccgacgcgtccaacgctgtcgccggcgcctgccggatgttgctggaggagcgacgaatggtggagttcgtggaggatatggattctatgttcaagacatcgtgaaccccatggatgtactgaaaatatttgtcaagcagcgtgacccagatatagctataaggtatgcacgcatatttcctagttcccaacttttactctgcaataccatggaagcttttggaaaaagaaaggagttgaaaaatgctttattgatctttggagcccttaagaatcagcttggaggcatcaatatgtttgcatgccgaagtataatagatatatgtggccattgtggctcttctgtacaggctcgaattatatttgaggggctgcttgctgataagattactccaaatacctatgtcttcaacagcctaatgaatgttaatgcccatagcttgagctacaacttttcagtctacaagcatatgcaagtaatgcattttctactttattgttgctgttcatagaatcttggtgtccctcctgatttgacttcatataatattcttctcaagacatgctgcagtgtcagagaattcaacttggctcaagaaatttatgaggaaatgaagaaaaaggaacgtgatggccttttaaagctagatgttttcacatatagtacaatgatgaaggtgtttgcagatgcaaaaatgtggaagatggcttccaacatcaaagaggatatgcaagcaaacggggttcgtcttaacctagtaacatggtcatcgttaatcaatgcttatgcaaattctggtctggttgatcgtgcaatagagatcctcaaagaaatgataagggatggctgccaacctactgccccatgcttcaatattatccttactgcatgtgtcaagtcatgccaatatgatagagctttccgcttgttctacagttggaaggagtctggtatcaagatctctctatcctctgaacagaagagagttattgatggtggctttacattctgtaaagagtatcctaataatgacagtactatattggtggttccattcaggccaacagtcacaacctataacatcttaatgaaggcttgtggtactaatgcagaacgtgcaaagtctaccatgaacgaaatgaggcggaatggcctttgtcctgatcttattagctggtctatactcatagatatttatggatcttctcaaaatagggatggagctgttcaggcactaaggagaatgcagcgagttgggatgagacttaatgtctctgcatatactgttgctattaagtaagtttttgctacaatatcctccaggcgtgtgttgaaaacaaagatttgaagttagcactgcacttatttgaagaaatgaaaacacaccaactgaagcccaatttggtgacgtacaaaactctcctggcagcacgcatcaattatggatcactacaggaggtccaacagtgtttagcgatatatcaggagatgaggaaagcagggtttcaggcaaatgattattatctcaaggaattaatagtggaatggtgtgaaggagttctgtctagtcgcagtgataatcaagatttttacaatttggatctacaacctgagactgagaggaaagaatcgttcaacctgtttcttgagaaagtcgtaacagtcttgcaaaaagatactgatcagaaccaaattgtcgatgttcgtggcctttcaaaggttgaagctcgaattgttgttctctctgtccttcggaagatcaaagagcaatacctcctaggaagagtggtccaggatgatgtggttatcatcacgggtcatgagaagacatcaacaactgaagctgaaaccacaactagtgcagttgacgtcgtgcaggcaatagttactgttttgacggatgatctgggtcttgaagttttgattggacctggaagctgccctcccgtttcatcaaaacccaaagcaccgactaaatctagaagtaatttagagcaaatatccaaagaatttactaggagaccacagggaatgataaaaatccctatcaactcacttaaccattggttaaggaagaaagccgtgaggattgcagagtgacatttccttaaaggcttaaactacctttttggtccatttagtataccagtaaatcagcacagctattccaggattgggtgtacatatgaaaacaggttactgctcctggtattccaggcacactgacacgacttgaaaagggacttgttggcaggcaataaactgtgcttctgtgttgatttaatggtcgtgtttct

SEQ ID NO: 81213 - DNA, 2712 bp, Zea Mays
cccagtttggaaacgcgtagcttccatctccactcccacagtcccgctcccccgccatggccttggccatgacctcctcgtccacgcagccaccgtcccctcaccaccgccgccgtcgccgctcgcaacctaccaccgccacccccaatgccaactccaaacctaaacccaaacccagggccaaggcgctccccctactctccgacgtcggcgtcggccgcgaccccgccgccatcaagtactacgcccgcgtcgcatctaacctcgcgggcgccggccgcctacgagacttcctcctagccgccgagggcctccgcgcagccgcgtgcaacgaccccagcttcgcggcccgcatcagcgcccgtctcctgtcgcgcggcgtcgccgccgctgtccgcgagcgcggactgcccttcatgctcgagttcttccgagacgccgagcgcgtgcgcgtgccggtagtcgagatgctcgacgccgacgcgtccaacgctgtcgccggcgcctgccggatgttgctggaggagcgacgaatggtggagttcgtggaggatatggattctatgttcaagacatcgtgaaccccatggatgtactgaaaatatttgtcaagcagcgtgacccagatatagctataaggtatgcacgcatatttcctagttcccaacttttactctgcaataccatggaagcttttggaaaaagaaaggagttgaaaaatgctttattgatctttggagcccttaagaatcagcttggaggcatcaatatgtttgcatgccgaagtataatagatatatgtggccattgtggctcttctgtacaggctcgaattatatttgaggggctgcttgctgataagattactccaaatacctatgtcttcaacagcctaatgaatgttaatgcccatagcttgagctacaacttttcagtctacaagcatatgcaaaatcttggtgtccctcctgatttgacttcatataatattcttctcaagacatgctgcagtgtcagagaattcaacttggctcaagaaatttatgaggaaatgaagaaaaaggaacgtgatggccttttaaagctagatgttttcacatatagtacaatgatgaaggtgtttgcagatgcaaaaatgtggaagatggcttccaacatcaaagaggatatgcaagcaaacggggttcgtcttaacctagtaacatggtcatcgttaatcaatgcttatgcaaattctggtctggttgatcgtgcaatagagatcctcaaagaaatgataagggatggctgccaacctactgccccatgcttcaatattatccttactgcatgtgtcaagtcatgccaatatgatagagctttccgcttgttctacagttggaaggagtctggtatcaagatctctctatcctctgaacagaagagagttattgatggtggctttacattctgtaaagagtatcctaataatgacagtactatattggtggttccattcaggccaacagtcacaacctataacatcttaatgaaggcttgtggtactaatgcagaacgtgcaaagtctaccatgaacgaaatgaggcggaatggcctttgtcctgatcttattagctggtctatactcatagatatttatggatcttctcaaaatagggatggagctgttcaggcactaaggagaatgcagcgagttgggatgagacttaatgtctctgcatatactgttgctattaaggcgtgtgttgaaaacaaagatttgaagttagcactgcacttatttgaagaaatgaaaacacaccaactgaagcccaatttggtgacgtacaaaactctcctggcagcacgcatcaattatggatcactacaggaggtccaacagtgtttagcgatatatcaggagatgaggaaagcagggtttcaggcaaatgattattatctcaaggaattaatagtggaatggtgtgaaggagttctgtctagtcgcagtgataatcaagatttttacaatttggatctacaacctgagactgagaggaaagaatcgttcaacctgtttcttgagaaagtcgtaacagtcttgcaaaaagatactgatcagaaccaaattgtcgatgttcgtggcctttcaaaggttgaagctcgaattgttgttctctctgtccttcggaagatcaaagagcaatacctcctaggaagagtggtccaggatgatgtggttatcatcacgggtcatgagaagacatcaacaactgaagctgaaaccacaactagtgcagttgacgtcgtgcaggcaatagttactgttttgacggatgatctgggtcttgaagttttgattggacctggaagctgccctcccgtttcatcaaaacccaaagcaccgactaaatctagaagtaatttagagcaaatatccaaagaatttactaggagaccacagggaatgataaaaatccctatcaactcacttaaccattggttaaggaagaaagccgtgaggattgcagagtgacatttccttaaaggcttaaactacctttttggtccatttagtataccagtaaatcagcacagctattccaggattgggtgtacatatgaaaacaggttactgctcctggtattccaggcacactgacacgacttgaaaagggacttgttggcaggcaataaactgtgcttctgtgttgatttaatggtcgtgtttct

SEQ ID NO: 81214 - DNA, 2527 bp, Zea Mays
cccagtttggaaacgcgtagcttccatctccactcccacagtcccgctcccccgccatggccttggccatgacctcctcgtccacgcagccaccgtcccctcaccaccgccgccgtcgccgctcgcaacctaccaccgccacccccaatgccaactccaaacctaaacccaaacccagggccaaggcgctccccctactctccgacgtcggcgtcggccgcgaccccgccgccatcaagtactacgcccgcgtcgcatctaacctcgcgggcgccggccgcctacgagacttcctcctagccgccgagggcctccgcgcagccgcgtgcaacgaccccagcttcgcggcccgcatcagcgcccgtctcctgtcgcgcggcgtcgccgccgctgtccgcgagcgcggactgcccttcatgctcgagttcttccgagacgccgagcgcgtgcgcgtgccggtagtcgagatgctcgacgccgacgcgtccaacgctgtcgccggcgcctgccggatgttgctggaggagcgacgaatggtggagttcgtggaggtcgtcgaggcgctagctcgatatggattctatgttcaagacatcgtgaaccccatggatgtactgaaaatatttgtcaagcagcgtgacccagatatagctataaggtatgcacgcatatttcctagttcccaacttttactctgcaataccatggaagcttttggaaaaagaaaggagttgaaaaatgctttattgatctttggagcccttaagaatcagcttggaggcatcaatatgtttgcatgccgaagtataatagatatatgtggccattgtggctcttctgtacaggctcgaattatatttgaggggctgcttgctgataagattactccaaatacctatgtcttcaacagcctaatgaatgttaatgcccatagcttgagctacaacttttcagtctacaagcatatgcaaaatcttggtgtccctcctgatttgacttcatataatattcttctcaagacatgctgcagtgtcagagaattcaacttggctcaagaaatttatgaggaaatgaagaaaaaggaacgtgatggccttttaaagctagatgttttcacatatagtacaatgatgaagatgcaaaaatgtggaagatggcttccaacatcaaagaggatatgcaagcaaacgggttggaaggagtctggtatcaagatctctctatcctctgaacagaagagagttattgatggtggctttacattctgtaaagagtatcctaataatgacagtactatattggtggttccattcaggccaacagtcacaacctataacatcttaatgaaggcttgtggtactaatgcagaacgtgcaaagtctaccatgaacgaaatgaggcggaatggcctttgtcctgatcttattagctggtctatactcatagatatttatggatcttctcaaaatagggatggagctgttcaggcactaaggagaatgcagcgagttgggatgagacttaatgtctctgcatatactgttgctattaaggcgtgtgttgaaaacaaagatttgaagttagcactgcacttatttgaagaaatgaaaacacaccaactgaagcccaatttggtgacgtacaaaactctcctggcagcacgcatcaattatggatcactacaggaggtccaacagtgtttagcgatatatcaggagatgaggaaagcagggtttcaggcaaatgattattatctcaaggaattaatagtggaatggtgtgaaggagttctgtctagtcgcagtgataatcaagatttttacaatttggatctacaacctgagactgagaggaaagaatcgttcaacctgtttcttgagaaagtcgtaacagtcttgcaaaaagatactgatcagaaccaaattgtcgatgttcgtggcctttcaaaggttgaagctcgaattgttgttctctctgtccttcggaagatcaaagagcaatacctcctaggaagagtggtccaggatgatgtggttatcatcacgggtcatgagaagacatcaacaactgaagctgaaaccacaactagtgcagttgacgtcgtgcaggcaatagttactgttttgacggatgatctgggtcttgaagttttgattggacctggaagctgccctcccgtttcatcaaaacccaaagcaccgactaaatctagaagtaatttagagcaaatatccaaagaatttactaggagaccacagggaatgataaaaatccctatcaactcacttaaccattggttaaggaagaaagccgtgaggattgcagagtgacatttccttaaaggcttaaactacctttttggtccatttagtataccagtaaatcagcacagctattccaggattgggtgtacatatgaaaacaggttactgctcctggtattccaggcacactgacacgacttgaaaagggacttgttggcaggcaataaactgtgcttctgtgttgatttaatggtcgtgtttct

SEQ ID NO: 81215 - DNA, 2526 bp, Zea Mays
cccagtttggaaacgcgtagcttccatctccactcccacagtcccgctcccccgccatggccttggccatgacctcctcgtccacgcagccaccgtcccctcaccaccgccgccgtcgccgctcgcaacctaccaccgccacccccaatgccaactccaaacctaaacccaaacccagggccaaggcgctccccctactctccgacgtcggcgtcggccgcgaccccgccgccatcaagtactacgcccgcgtcgcatctaacctcgcgggcgccggccgcctacgagacttcctcctagccgccgagggcctccgcgcagccgcgtgcaacgaccccagcttcgcggcccgcatcagcgcccgtctcctgtcgcgcggcgtcgccgccgctgtccgcgagcgcggactgcccttcatgctcgagttcttccgagacgccgagcgcgtgcgcgtgccggtagtcgagatgctcgacgccgacgcgtccaacgctgtcgccggcgcctgccggatgttgctggaggagcgacgaatggtggagttcgtggaggtcgtcgaggcgctagctcgatatggattctatgttcaagacatcgtgaaccccatggatgtactgaaaatatttgtcaagcagcgtgacccagatatagctataaggggctgcttgctgataagattactccaaatacctatgtcttcaacagcctaatgaatgttaatgcccatagcttgagctacaacttttcagtctacaagcatatgcaaaatcttggtgtccctcctgatttgacttcatataatattcttctcaagacatgctgcagtgtcagagaattcaacttggctcaagaaatttatgaggaaatgaagaaaaaggaacgtgatggccttttaaagctagatgttttcacatatagtacaatgatgaaggtgtttgcagatgcaaaaatgtggaagatggcttccaacatcaaagaggatatgcaagcaaacggggttcgtcttaacctagtaacatggtcatcgttaatcaatgcttatgcaaattctggtctggttgatcgtgcaatagagatcctcaaagaaatgataagggatggctgccaacctactgccccatgcttcaatattatccttactgcatgtgtcaagtcatgccaatatgatagagctttccgcttgttctacagttggaaggagtctggtatcaagatctctctatcctctgaacagaagagagttattgatggtggctttacattctgtaaagagtatcctaataatgacagtactatattggtggttccattcaggccaacagtcacaacctataacatcttaatgaaggcttgtggtactaatgcagaacgtgcaaagtctaccatgaacgaaatgaggcggaatggcctttgtcctgatcttattagctggtctatactcatagatatttatggatcttctcaaaatagggatggagctgttcaggcactaaggagaatgcagcgagttgggatgagacttaatgtctctgcatatactgttgctattaaggcgtgtgttgaaaacaaagatttgaagttagcactgcacttatttgaagaaatgaaaacacaccaactgaagcccaatttggtgacgtacaaaactctcctggcagcacgcatcaattatggatcactacaggaggtccaacagtgtttagcgatatatcaggagatgaggaaagcagggtttcaggcaaatgattattatctcaaggaattaatagtggaatggtgtgaaggagttctgtctagtcgcagtgataatcaagatttttacaatttggatctacaacctgagactgagaggaaagaatcgttcaacctgtttcttgagaaagtcgtaacagtcttgcaaaaagatactgatcagaaccaaattgtcgatgttcgtggcctttcaaaggttgaagctcgaattgttgttctctctgtccttcggaagatcaaagagcaatacctcctaggaagagtggtccaggatgatgtggttatcatcacgggtcatgagaagacatcaacaactgaagctgaaaccacaactagtgcagttgacgtcgtgcaggcaatagttactgttttgacggatgatctgggtcttgaagttttgattggacctggaagctgccctcccgtttcatcaaaacccaaagcaccgactaaatctagaagtaatttagagcaaatatccaaagaatttactaggagaccacagggaatgataaaaatccctatcaactcacttaaccattggttaaggaagaaagccgtgaggattgcagagtgacatttccttaaaggcttaaactacctttttggtccatttagtataccagtaaatcagcacagctattccaggattgggtgtacatatgaaaacaggttactgctcctggtattccaggcacactgacacgacttgaaaagggacttgttggcaggcaataaactgtgcttctgtgttgatttaatggtcgtgtttct

SEQ ID NO: 81216 - DNA, 2028 bp, Zea Mays
agattgattctgttgcatcacattttgccttttttgtggccggcctaatgtatctagttcttctaatttgctatgttctgcccaatttctgtctgctattgcatggttgttcatgttgttttaaattatattcactaaaacaatatttacactgcttttggttgttcctttgattcacttttccttcatccatgaccgaatatgttttataatcttatgcacagtgcagacacacagtgaccttaagctactgtttacaccattttgtgtttttgcagaatcttggtgtccctcctgatttgacttcatataatattcttctcaagacatgctgcagtgtcagagaattcaacttggctcaagaaatttatgaggaaatgaagaaaaaggaacgtgatggccttttaaagctagatgttttcacatatagtacaatgatgaagatgcaaaaatgtggaagatggcttccaacatcaaagaggatatgcaagcaaacggggttcgtcttaacctagtaacatggtcatcgttaatcaatgcttatgcaaattctggtctggttgatcgtgcaatagagatcctcaaagaaatgataagggatggctgccaacctactgccccatgcttcaatattatccttactgcatgtgtcaagtcatgccaatatgatagagctttccgcttgttctacagttggaaggagtctggtatcaagatctctctatcctctgaacagaagagagttattgatggtggctttacattctgtaaagagtatcctaataatgacagtactatattggtggttccattcaggccaacagtcacaacctataacatcttaatgaaggcttgtggtactaatgcagaacgtgcaaagtctaccatgaacgaaatgaggcggaatggcctttgtcctgatcttattagctggtctatactcatagatatttatggatcttctcaaaatagggatggagctgttcaggcactaaggagaatgcagcgagttgggatgagacttaatgtctctgcatatactgttgctattaaggcgtgtgttgaaaacaaagatttgaagttagcactgcacttatttgaagaaatgaaaacacaccaactgaagcccaatttggtgacgtacaaaactctcctggcagcacgcatcaattatggatcactacaggaggtccaacagtgtttagcgatatatcaggagatgaggaaagcagggtttcaggcaaatgattattatctcaaggaattaatagtggaatggtgtgaaggagttctgtctagtcgcagtgataatcaagatttttacaatttggatctacaacctgagactgagaggaaagaatcgttcaacctgtttcttgagaaagtcgtaacagtcttgcaaaaagatactgatcagaaccaaattgtcgatgttcgtggcctttcaaaggttgaagctcgaattgttgttctctctgtccttcggaagatcaaagagcaatacctcctaggaagagtggtccaggatgatgtggttatcatcacgggtcatgagaagacatcaacaactgaagctgaaaccacaactagtgcagttgacgtcgtgcaggcaatagttactgttttgacggatgatctgggtcttgaagttttgattggacctggaagctgccctcccgtttcatcaaaacccaaagcaccgactaaatctagaagtaatttagagcaaatatccaaagaatttactaggagaccacagggaatgataaaaatccctatcaactcacttaaccattggttaaggaagaaagccgtgaggattgcagagtgacatttccttaaaggcttaaactacctttttggtccatttagtataccagtaaatcagcacagctattccaggattgggtgtacatatgaaaacaggttactgctcctggtattccaggcacactgacacgacttgaaaagggacttgttggcaggcaataaactgtgcttctgtgttgatttaatggtcgtgtttct

SEQ ID NO: 81217 - DNA, 1549 bp, Zea Mays
agattgattctgttgcatcacattttgccttttttgtggccggcctaatgtatctagttcttctaatttgctatgttctgcccaatttctgtctgctattgcatggttgttcatgttgttttaaattatattcactaaaacaatatttacactgcttttggttgttcctttgattcacttttccttcatccatgaccgaatatgttttataatcttatgcacagtgcagacacacagtgaccttaagctactgtttacaccattttgtgtttttgcagaatcttggtgtccctcctgatttgacttcatataatattcttctcaagacatgctgcagtgtcagagaattcaacttggctcaagaaatttatgaggaaatgaagaaaaaggaacgtgatggccttttaaagctagatgttttcacatatagtacaatgatgaaggtgtttgcagatgcaaaaatgtggaagatggcttccaacatcaaagaggatatgcaagcaaacggggcactaaggagaatgcagcgagttgggatgagacttaatgtctctgcatatactgttgctattaaggcgtgtgttgaaaacaaagatttgaagttagcactgcacttatttgaagaaatgaaaacacaccaactgaagcccaatttggtgacgtacaaaactctcctggcagcacgcatcaattatggatcactacaggaggtccaacagtgtttagcgatatatcaggagatgaggaaagcagggtttcaggcaaatgattattatctcaaggaattaatagtggaatggtgtgaaggagttctgtctagtcgcagtgataatcaagatttttacaatttggatctacaacctgagactgagaggaaagaatcgttcaacctgtttcttgagaaagtcgtaacagtcttgcaaaaagatactgatcagaaccaaattgtcgatgttcgtggcctttcaaaggttgaagctcgaattgttgttctctctgtccttcggaagatcaaagagcaatacctcctaggaagagtggtccaggatgatgtggttatcatcacgggtcatgagaagacatcaacaactgaagctgaaaccacaactagtgcagttgacgtcgtgcaggcaatagttactgttttgacggatgatctgggtcttgaagttttgattggacctggaagctgccctcccgtttcatcaaaacccaaagcaccgactaaatctagaagtaatttagagcaaatatccaaagaatttactaggagaccacagggaatgataaaaatccctatcaactcacttaaccattggttaaggaagaaagccgtgaggattgcagagtgacatttccttaaaggcttaaactacctttttggtccatttagtataccagtaaatcagcacagctattccaggattgggtgtacatatgaaaacaggttactgctcctggtattccaggcacactgacacgacttgaaaagggacttgttggcaggcaataaactgtgcttctgtgttgatttaatggtcgtgtttct

SEQ ID NO: 81218 - DNA, 1930 bp, Zea Mays
agattgattctgttgcatcacattttgccttttttgtggccggcctaatgtatctagttcttctaatttgctatgttctgcccaatttctgtctgctattgcatggttgttcatgttgttttaaattatattcactaaaacaatatttacactgcttttggttgttcctttgattcacttttccttcatccatgaccgaatatgttttataatcttatgcacagtgcagacacacagtgaccttaagctactgtttacaccattttgtgtttttgcagaatcttggtgtccctcctgatttgacttcatataatattcttctcaagacatgctgcagtgtcagagaattcaacttggctcaagaaatttatgaggaaatgaagaaaaaggaacgtgatggccttttaaagctagatgttttcacatatagtacaatgatgaagatgcaaaaatgtggaagatggcttccaacatcaaagaggatatgcaagcaaacggggttcgtcttaacctagtaacatggtcatcgttaatcaatgcttatgcaaattctggtctggttgatcgtgcaatagagatcctcaaagaaatgataagggatggctgccaacctactgccccatgcttcaatattatccttactgcatgtgtcaagtcatgccaatatgatagagctttccgcttgttctacagttggaaggagtctggtatcaagatctctctatcctctgaacagaagagagttattgatggtggctttacattctgtaaagagtatcctaataatgacagtactatattggtggttccattcaggccaacagtcacaacctataacatcttaatgaaggcttgtggtactaatgcagaacgtgcaaagtctaccatgaacgaaatgaggcggaatggcctttgtcctgatcttattagctggtctatactcatagatatttatggatcttctcaaaatagggatggagctgttcaggcactaaggagaatgcagcgagttgggatgagacttaatgtctctgcatatactgttgctattaaggcgtgtgttgaaaacaaagatttgaagttagcactgcacttatttgaagaaatgaaaacacaccaactgaagcccaatttggtttcaggcaaatgattattatctcaaggaattaatagtggaatggtgtgaaggagttctgtctagtcgcagtgataatcaagatttttacaatttggatctacaacctgagactgagaggaaagaatcgttcaacctgtttcttgagaaagtcgtaacagtcttgcaaaaagatactgatcagaaccaaattgtcgatgttcgtggcctttcaaaggttgaagctcgaattgttgttctctctgtccttcggaagatcaaagagcaatacctcctaggaagagtggtccaggatgatgtggttatcatcacgggtcatgagaagacatcaacaactgaagctgaaaccacaactagtgcagttgacgtcgtgcaggcaatagttactgttttgacggatgatctgggtcttgaagttttgattggacctggaagctgccctcccgtttcatcaaaacccaaagcaccgactaaatctagaagtaatttagagcaaatatccaaagaatttactaggagaccacagggaatgataaaaatccctatcaactcacttaaccattggttaaggaagaaagccgtgaggattgcagagtgacatttccttaaaggcttaaactacctttttggtccatttagtataccagtaaatcagcacagctattccaggattgggtgtacatatgaaaacaggttactgctcctggtattccaggcacactgacacgacttgaaaagggacttgttggcaggcaataaactgtgcttctgtgttgatttaatggtcgtgtttct

SEQ ID NO: 81219 - DNA, 904 bp, Zea Mays
ctaaaacttaggtgacgtacaaaactctcctggcagcacgcatcaattatggatcactacaggaggtccaacagtgtttagcgatatatcaggagatgaggaaagcagggtttcaggcaaatgattattatctcaaggaattaatagtggaatggtgtgaaggagttctgtctagtcgcagtgataatcaagatttttacaatttggatctacaacctgagactgagaggaaagaatcgttcaacctgtttcttgagaaagtcgtaacagtcttgcaaaaagatactgatcagaaccaaattgtcgatgttcgtggcctttcaaaggttgaagctcgaattgttgttctctctgtccttcggaagatcaaagagcaatacctcctaggaagagtggtccaggatgatgtggttatcatcacgggtcatgagaagacatcaacaactgaagctgaaaccacaactagtgcagttgacgtcgtgcaggcaatagttactgttttgacggatgatctgggtcttgaagttttgattggacctggaagctgccctcccgtttcatcaaaacccaaagcaccgactaaatctagaagtaatttagagcaaatatccaaagaatttactaggagaccacagggaatgataaaaatccctatcaactcacttaaccattggttaaggaagaaagccgtgaggattgcagagtgacatttccttaaaggcttaaactacctttttggtccatttagtataccagtaaatcagcacagctattccaggattgggtgtacatatgaaaacaggttactgctcctggtattccaggcacactgacacgacttgaaaagggacttgttggcaggcaataaactgtgcttctgtgttgatttaatggtcgtgtttct

SEQ ID NO: 81220 - DNA, 1983 bp, Zea Mays
tccaaattttctgaggtggagcagtccccgcttggcggcttgtctagagaactcacccgccgccacgcgcgaacgcaaccagcgacgcctcgcggccgcggacagcgcggagccagacgcctcgcattcgctgagaagccgaagcccgtagagcacaggagttgtggacttctagagcacggcgggtctggtatgagaggcttccgctttgcgttggtccgtgcggcgcggtcgcggtcgcgggcggagcaccagaccgtgcagcgccgccggccgtccgatgtggcccaacgtttttcccacaccgcgccggcgccggcgaggccatctttcggcatcgcgttcgacatcgatggggtcatcctgcgcggccgaagtccgatcgggggcgcgccgcgggccatccgacgcctatattccgaagaaggtaccctgaagatcccgtttctgtttttaacgaatggaggaggtgttccagagcacagaagggcccttgagctaagccaacttttaggagtcaatatttctccaacacaggttgtgcatggacattctccttacagagagctggtgaagcgttttgaagatgaccttattgttgctgttggaaaaggagagcctgcagtagtgatgtccgcgtacggatttagaaaagttctgtccatagatgaatatgcatcatattataaagatattgacccccttgctcctttcaagacttggaaagttgggcaaacagacagtcacatgtctgcaaaagtgcacccatcatatgatgtttattcagagcgagttaaaggagtatttgttgtcagcgatcctgtcgattggggaagagatctacagctgatgatcttgaataccaggcagcatttccttctgagcggcttgggatgggcgccttcaggatagctttggaaagcatcttcaatgaaataaatgatcatccactgaagtatacatcttatgggaaacctaatccatttgtgttcaagaatgcagcaaacatacttgaaaaacttgttatgagtatgtatcctaattcacagacaccaatggaaggaaaagattatcagttttcaactatttacatggttggagataatcctaaagtggatatcaatggagctatgaaggctggccacccatggtcatctgttcttacaaggacgggtgtttttaggggaaaggataacgacccacagtttcctgcagatgtggttgttgatactgttgaagatgccatcaactatattctggagaaggaacgtatacagtgatgataccatgtatgctcccttgatcattatcatttgacatgcttgacaagacaagatgtagccctttttttttggtctagtaaatttataatccttggctggaactggaggtcgactcttagaactccacctcgtgaacagtgcagtctacagtataaaataatgtttttgttaaactataggtagactgttgcaaacagctttattcgttctgccaacaaatacacgttagagtcagcaagacatattttattgcattttttgggtcctgaagagggtatttattactatgtgtacaaaggctaaggcaggctccacgcagtggaaccaaaactgaaatgagcgtcgcttgtaatagatgttcttgtttccatgtagaatatttgcttctcgggctgctctttacttgttcgaagttatgaattatataacgttccattattataataattaattcaccaaattgaacattcaaatatctatctttccacaacttttttaactacctgataacttcaaatttacggagtcagcattgattctgctgcttcttgcatggaactgattggctcaagttgttctctacgtcctcaatgtttcttcattttggtcttttccaactcttttatggctggtctacatctactgatgtacgtgaaaaatgttgtcatgctgctgaattctttcgatgttgtgtgtacta

SEQ ID NO: 81221 - DNA, 2121 bp, Zea Mays
tccaaattttctgaggtggagcagtccccgcttggcggcttgtctagagaactcacccgccgccacgcgcgaacgcaaccagcgacgcctcgcggccgcggacagcgcggagccagacgcctcgcattcgctgagaagccgaagcccgtagagcacaggagttgtggacttctagagcacggcgggtctggtatgagaggcttccgctttgcgttggtccgtgcggcgcggtcgcggtcgcgggcggagcaccagaccgtgcagcgccgccggccgtccgatgtggcccaacgtttttcccacaccgcgccggcgccggcgaggccatctttcggcatcgcgttcgacatcgatggggtcatcctgcgcggccgaagtccgatcgggggcgcgccgcgggccatccgacgcctatattccgaagaaggtaccctgaagatcccgtttctgtttttaacgaatggaggaggtgttccagagcacagaagggcccttgagctaagccaacttttaggagtcaatatttctccaacacaggttgtgcatggacattctccttacagagagctggtgaagcgttttgaagatgaccttattgttgctgttggaaaaggagagcctgcagtagtgatgtccgcgtacggatttagaaaagttctgtccatagatgaatatgcatcatattataaagatattgacccccttgctcctttcaagacttggaaagttgggcaaacagacagtcacatgtctgcaaaagtgcacccatcatatgatgtttattcagagcgagttaaaggagtatttgttgtcagcgatcctgtcgattggggaagagatctacaggtactctgtgacatcttgtctactcatggacttcctgggactgaaaaaggtgatcaacctcctttgtattttgcagctgatgatcttgaataccaggttcagtaatactaagataaccattgcactggaagaaacttagttttgagatcctatggcaggcagcatttccttctgagcggcttgggatgggcgccttcaggatagctttggaaagcatcttcaatgaaataaatgatcatccactgaagtatacatcttatgggaaacctaatccatttgtgttcaagaatgcagcaaacatacttgaaaaacttgttatgagtatgtatcctaattcacagacaccaatggaaggaaaagattatcagttttcaactatttacatggttggagataatcctaaagtggatatcaatggagctatgaaggctggccacccatggtcatctgttcttacaaggacgggtgtttttaggggaaaggataacgacccacagtttcctgcagatgtggttgttgatactgttgaagatgccatcaactatattctggagaaggaacgtatacagtgatgataccatgtatgctcccttgatcattatcatttgacatgcttgacaagacaagatgtagccctttttttttggtctagtaaatttataatccttggctggaactggaggtcgactcttagaactccacctcgtgaacagtgcagtctacagtataaaataatgtttttgttaaactataggtagactgttgcaaacagctttattcgttctgccaacaaatacacgttagagtcagcaagacatattttattgcattttttgggtcctgaagagggtatttattactatgtgtacaaaggctaaggcaggctccacgcagtggaaccaaaactgaaatgagcgtcgcttgtaatagatgttcttgtttccatgtagaatatttgcttctcgggctgctctttacttgttcgaagttatgaattatataacgttccattattataataattaattcaccaaattgaacattcaaatatctatctttccacaacttttttaactacctgataacttcaaatttacggagtcagcattgattctgctgcttcttgcatggaactgattggctcaagttgttctctacgtcctcaatgtttcttcattttggtcttttccaactcttttatggctggtctacatctactgatgtacgtgaaaaatgttgtcatgctgctgaattctttcgatgttgtgtgtacta

SEQ ID NO: 81222 - DNA, 1996 bp, Zea Mays
tccaaattttctgaggtggagcagtccccgcttggcggcttgtctagagaactcacccgccgccacgcgcgaacgcaaccagcgacgcctcgcggccgcggacagcgcggagccagacgcctcgcattcgctgagaagccgaagcccgtagagcacaggagttgtggacttctagagcacggcgggtctggtatgagaggcttccgctttgcgttggtccgtgcggcgcggtcgcggtcgcgggcggagcaccagaccgtgcagcgccgccggccgtccgatgtggcccaacgtttttcccacaccgcgccggcgccggcgaggccatctttcggcatcgcgttcgacatcgatggggtcatcctgcgcggccgaagtccgatcgggggcgcgccgcgggccatccgacgcctatattccgaagaaggtaccctgaagatcccgtttctgtttttaacgaatggaggaggtgttccagagcacagaagggcccttgagctaagccaacttttaggagtcaatatttctccaacacaggttgtgcatggacattctccttacagagagctggtgaagcggtgtgcctttcaattttgaagatgaccttattgttgctgttggaaaaggagagcctgcagtagtgatgtccgcgtacggatttagaaaagttctgtccatagatgaatatgcatcatattataaagatattgacccccttgctcctttcaagacttggaaagttgggcaaacagacagtcacatgtctgcaaaagtgcacccatcatatgatgtttattcagagcgagttaaaggagtatttgttgtcagcgatcctgtcgattggggaagagatctacagctgatgatcttgaataccaggcagcatttccttctgagcggcttgggatgggcgccttcaggatagctttggaaagcatcttcaatgaaataaatgatcatccactgaagtatacatcttatgggaaacctaatccatttgtgttcaagaatgcagcaaacatacttgaaaaacttgttatgagtatgtatcctaattcacagacaccaatggaaggaaaagattatcagttttcaactatttacatggttggagataatcctaaagtggatatcaatggagctatgaaggctggccacccatggtcatctgttcttacaaggacgggtgtttttaggggaaaggataacgacccacagtttcctgcagatgtggttgttgatactgttgaagatgccatcaactatattctggagaaggaacgtatacagtgatgataccatgtatgctcccttgatcattatcatttgacatgcttgacaagacaagatgtagccctttttttttggtctagtaaatttataatccttggctggaactggaggtcgactcttagaactccacctcgtgaacagtgcagtctacagtataaaataatgtttttgttaaactataggtagactgttgcaaacagctttattcgttctgccaacaaatacacgttagagtcagcaagacatattttattgcattttttgggtcctgaagagggtatttattactatgtgtacaaaggctaaggcaggctccacgcagtggaaccaaaactgaaatgagcgtcgcttgtaatagatgttcttgtttccatgtagaatatttgcttctcgggctgctctttacttgttcgaagttatgaattatataacgttccattattataataattaattcaccaaattgaacattcaaatatctatctttccacaacttttttaactacctgataacttcaaatttacggagtcagcattgattctgctgcttcttgcatggaactgattggctcaagttgttctctacgtcctcaatgtttcttcattttggtcttttccaactcttttatggctggtctacatctactgatgtacgtgaaaaatgttgtcatgctgctgaattctttcgatgttgtgtgtacta

SEQ ID NO: 81223 - DNA, 2072 bp, Zea Mays
tccaaattttctgaggtggagcagtccccgcttggcggcttgtctagagaactcacccgccgccacgcgcgaacgcaaccagcgacgcctcgcggccgcggacagcgcggagccagacgcctcgcattcgctgagaagccgaagcccgtagagcacaggagttgtggacttctagagcacggcgggtctggtatgagaggcttccgctttgcgttggtccgtgcggcgcggtcgcggtcgcgggcggagcaccagaccgtgcagcgccgccggccgtccgatgtggcccaacgtttttcccacaccgcgccggcgccggcgaggccatctttcggcatcgcgttcgacatcgatggggtcatcctgcgcggccgaagtccgatcgggggcgcgccgcgggccatccgacgcctatattccgaagaaggtaccctgaagatcccgtttctgtttttaacgaatggaggaggtgttccagagcacagaagggcccttgagctaagccaacttttaggagtcaatatttctccaacacaggttgtgcatggacattctccttacagagagctggtgaagcggtgtgcctttcaattttgaagatgaccttattgttgctgttggaaaaggagagcctgcagtagtgatgtccgcgtacggatttagaaaagttctgtccatagatgaatatgcatcatattataaagatattgacccccttgctcctttcaagacttggaaagttgggcaaacagacagtcacatgtctgcaaaagtgcacccatcatatgatgtttattcagagcgagttaaaggagtatttgttgtcagcgatcctgtcgattggggaagagatctacaggtactctgtgacatcttgtctactcatggacttcctgggactgaaaaaggtgatcaacctcctttgtattttgcagctgatgatcttgaataccaggcagcatttccttctgagcggcttgggatgggcgccttcaggatagctttggaaagcatcttcaatgaaataaatgatcatccactgaagtatacatcttatgggaaacctaatccatttgtgttcaagaatgcagcaaacatacttgaaaaacttgttatgagtatgtatcctaattcacagacaccaatggaaggaaaagattatcagttttcaactatttacatggttggagataatcctaaagtggatatcaatggagctatgaaggctggccacccatggtcatctgttcttacaaggacgggtgtttttaggggaaaggataacgacccacagtttcctgcagatgtggttgttgatactgttgaagatgccatcaactatattctggagaaggaacgtatacagtgatgataccatgtatgctcccttgatcattatcatttgacatgcttgacaagacaagatgtagccctttttttttggtctagtaaatttataatccttggctggaactggaggtcgactcttagaactccacctcgtgaacagtgcagtctacagtataaaataatgtttttgttaaactataggtagactgttgcaaacagctttattcgttctgccaacaaatacacgttagagtcagcaagacatattttattgcattttttgggtcctgaagagggtatttattactatgtgtacaaaggctaaggcaggctccacgcagtggaaccaaaactgaaatgagcgtcgcttgtaatagatgttcttgtttccatgtagaatatttgcttctcgggctgctctttacttgttcgaagttatgaattatataacgttccattattataataattaattcaccaaattgaacattcaaatatctatctttccacaacttttttaactacctgataacttcaaatttacggagtcagcattgattctgctgcttcttgcatggaactgattggctcaagttgttctctacgtcctcaatgtttcttcattttggtcttttccaactcttttatggctggtctacatctactgatgtacgtgaaaaatgttgtcatgctgctgaattctttcgatgttgtgtgtacta

SEQ ID NO: 81224 - DNA, 1991 bp, Zea Mays
tccaaattttctgaggtggagcagtccccgcttggcggcttgtctagagaactcacccgccgccacgcgcgaacgcaaccagcgacgcctcgcggccgcggacagcgcggagccagacgcctcgcattcgctgagaagccgaagcccgtagagcacaggagttgtggacttctagagcacggcgggtctggtatgagaggcttccgctttgcgttggtccgtgcggcgcggtcgcggtcgcgggcggagcaccagaccgtgcagcgccgccggccgtccgatgtggcccaacgtttttcccacaccgcgccggcgccggcgaggccatctttcggcatcgcgttcgacatcgatggggtcatcctgcgcggccgaagtccgatcgggggcgcgccgcgggccatccgacgcctatattccgaagaaggtaccctgaagatcccgtttctgtttttaacgaatggaggaggtgttccagagcacagaagggcccttgagctaagccaacttttaggagtcaatatttctccaacacaggttgtgcatggacattctccttacagagagctggtgaagcgttttgaagatgaccttattgttgctgttggaaaaggagagcctgcagtagtgatgtccgcgtacggatttagaaaagttctgtccatagatgaatatgcatcatattataaagatattgacccccttgctcctttcaagacttggaaagttgggcaaacagacagtcacatgtctgcaaaagtgcacccatcatatgatgtttattcagagcgagttaaaggagtatttgttgtcagcgatcctgtcgattggggaagagatctacaggtactctgtgacatcttgtctactcatggacttcctgggactgaaaaaggtgatcaacctcctttgtattttgcagctgatgatcttgaataccaggcagcatttccttctgagcggcttgggatgggcgccttcaggatagctttggaaagcatcttcaatgacaaacatacttgaaaaacttgttatgagtatgtatcctaattcacagacaccaatggaaggaaaagattatcagttttcaactatttacatggttggagataatcctaaagtggatatcaatggagctatgaaggctggccacccatggtcatctgttcttacaaggacgggtgtttttaggggaaaggataacgacccacagtttcctgcagatgtggttgttgatactgttgaagatgccatcaactatattctggagaaggaacgtatacagtgatgataccatgtatgctcccttgatcattatcatttgacatgcttgacaagacaagatgtagccctttttttttggtctagtaaatttataatccttggctggaactggaggtcgactcttagaactccacctcgtgaacagtgcagtctacagtataaaataatgtttttgttaaactataggtagactgttgcaaacagctttattcgttctgccaacaaatacacgttagagtcagcaagacatattttattgcattttttgggtcctgaagagggtatttattactatgtgtacaaaggctaaggcaggctccacgcagtggaaccaaaactgaaatgagcgtcgcttgtaatagatgttcttgtttccatgtagaatatttgcttctcgggctgctctttacttgttcgaagttatgaattatataacgttccattattataataattaattcaccaaattgaacattcaaatatctatctttccacaacttttttaactacctgataacttcaaatttacggagtcagcattgattctgctgcttcttgcatggaactgattggctcaagttgttctctacgtcctcaatgtttcttcattttggtcttttccaactcttttatggctggtctacatctactgatgtacgtgaaaaatgttgtcatgctgctgaattctttcgatgttgtgtgtacta

SEQ ID NO: 81225 - DNA, 2053 bp, Zea Mays
tccaaattttctgaggtggagcagtccccgcttggcggcttgtctagagaactcacccgccgccacgcgcgaacgcaaccagcgacgcctcgcggccgcggacagcgcggagccagacgcctcgcattcgctgagaagccgaagcccgtagagcacaggagttgtggacttctagagcacggcgggtctggtatgagaggcttccgctttgcgttggtccgtgcggcgcggtcgcggtcgcgggcggagcaccagaccgtgcagcgccgccggccgtccgatgtggcccaacgtttttcccacaccgcgccggcgccggcgaggccatctttcggcatcgcgttcgacatcgatggggtcatcctgcgcggccgaagtccgatcgggggcgcgccgcgggccatccgacgcctatattccgaagaaggtaccctgaagatcccgtttctgtttttaacgaatggtgttccagagcacagaagggcccttgagctaagccaacttttaggagtcaatatttctccaacacaggttgtgcatggacattctccttacagagagctggtgaagcgttttgaagatgaccttattgttgctgttggaaaaggagagcctgcagtagtgatgtccgcgtacggatttagaaaagttctgtccatagatgaatatgcatcatattataaagatattgacccccttgctcctttcaagacttggaaagttgggcaaacagacagtcacatgtctgcaaaagtgcacccatcatatgatgtttattcagagcgagttaaaggagtatttgttgtcagcgatcctgtcgattggggaagagatctacaggtactctgtgacatcttgtctactcatggacttcctgggactgaaaaaggtgatcaacctcctttgtattttgcagctgatgatcttgaataccaggcagcatttccttctgagcggcttgggatgggcgccttcaggatagctttggaaagcatcttcaatgaaataaatgatcatccactgaagtatacatcttatgggaaacctaatccatttgtgttcaagaatgcagcaaacatacttgaaaaacttgttatgagtatgtatcctaattcacagacaccaatggaaggaaaagattatcagttttcaactatttacatggttggagataatcctaaagtggatatcaatggagctatgaaggctggccacccatggtcatctgttcttacaaggacgggtgtttttaggggaaaggataacgacccacagtttcctgcagatgtggttgttgatactgttgaagatgccatcaactatattctggagaaggaacgtatacagtgatgataccatgtatgctcccttgatcattatcatttgacatgcttgacaagacaagatgtagccctttttttttggtctagtaaatttataatccttggctggaactggaggtcgactcttagaactccacctcgtgaacagtgcagtctacagtataaaataatgtttttgttaaactataggtagactgttgcaaacagctttattcgttctgccaacaaatacacgttagagtcagcaagacatattttattgcattttttgggtcctgaagagggtatttattactatgtgtacaaaggctaaggcaggctccacgcagtggaaccaaaactgaaatgagcgtcgcttgtaatagatgttcttgtttccatgtagaatatttgcttctcgggctgctctttacttgttcgaagttatgaattatataacgttccattattataataattaattcaccaaattgaacattcaaatatctatctttccacaacttttttaactacctgataacttcaaatttacggagtcagcattgattctgctgcttcttgcatggaactgattggctcaagttgttctctacgtcctcaatgtttcttcattttggtcttttccaactcttttatggctggtctacatctactgatgtacgtgaaaaatgttgtcatgctgctgaattctttcgatgttgtgtgtacta

SEQ ID NO: 81226 - DNA, 1768 bp, Zea Mays
tccaaattttctgaggtggagcagtccccgcttggcggcttgtctagagaactcacccgccgccacgcgcgaacgcaaccagcgacgcctcgcggccgcggacagcgcggagccagacgcctcgcattcgctgagaagccgaagcccgtagagcacaggagttgtggacttctagagcacggcgggtctggtatgagaggcttccgctttgcgttggtccgtgcggcgcggtcgcggtcgcgggcggagcaccagaccgtgcagcgccgccggccgtccgatgtggcccaacgtttttcccacaccgcgccggcgccggcgaggccatctttcggcatcgcgttcgacatcgatggggtcatcctgcgcggccgaagtccgatcgggggcgcgccgcgggccatccgacgcctatattccgaagaaggtaccctgaagatcccgtttctgtttttaacgaatggaggaggtgttccagagcacagaagggcccttgagctaagccaacttttaggagtcaatatttctccaacacaggttgtgcatggacattctccttacagagagctggtgaagcggtgtgcctttcaattttgaagatgaccttattgttgctgttggaaaaggagagcctgcagtagtgatgtccgcgtacggatttagaaaagttctgtccatagatgaatatgcatcatattataaagatattgacccccttgctcctttcaagacttggaaagttgggcaaacagacagtcacatgtctgcaaaagtgcacccatcatatgatgtttattcagagcgagttaaaggagtatttgttgtcagcgatcctgtcgattggggaagagatctacaggtactctgtgacatcttgtctactcatggacttcctgggactgaaaaaggtgatcaacctcctttgtattttgcagctgatgatcttgaataccaggcagcatttccttctgagcggcttgggatgggcgccttcaggatagctttggaaagcatcttcaatgaaataaatgatcatccactgaagtatacatcttatgggaaacctaatccatttgtgttcaagaatgcagcaaacatacttgaaaaacttgttatgagtatgtatcctaattcacagacaccaatggaaggaaaagattatcagttttcaactatttacatggttggagataatcctaaagtggatatcaatggagctatgaaggctggccacccatggtcatctgttcttacaaggacgggtgtttttaggggaaaggataacgacccacagtttcctgcagatgtggttgttgatactgttgaagatgccatcaactatattctggagaaggaacgtatacagtgatgataccattgaatatgctggagtgtcatgagatataaattggcactgtcatttcagaaactctgacagtaaaaggggaagtccacttatgcactgacagaactcaagcattcaaataagttgtaacaatcgaagcagagttagaaattcttctggatagctagagagactcgcttattcaatgtgcacaatatcttgattgtatgaacattcacttgctctggaatcacatccacgtaaccatctgtttggtgtgtgctaattgccttcattggtattggttgttatcataaactcataatttgacgaatgtagctagtctaatggaggacacttgagtcatgtgattgttgacaatggtttgagttgcactagctgcaaggtaggtgagtttgcgtt

SEQ ID NO: 81227 - DNA, 1891 bp, Zea Mays
tccaaattttctgaggtggagcagtccccgcttggcggcttgtctagagaactcacccgccgccacgcgcgaacgcaaccagcgacgcctcgcggccgcggacagcgcggagccagacgcctcgcattcgctgagaagccgaagcccgtagagcacaggagttgtggacttctagagcacggcgggtctggtatgagaggcttccgctttgcgttggtccgtgcggcgcggtcgcggtcgcgggcggagcaccagaccgtgcagcgccgccggccgtccgatgtggcccaacgtttttcccacaccgcgccggcgccggcgaggccatctttcggcatcgcgttcgacatcgatggggtcatcctgcgcggccgaagtccgatcgggggcgcgccgcgggccatccgacgcctatattccgaagaaggtaccctgaagatcccgtttctgtttttaacgaatggaggaggtgttccagagcacagaagggcccttgagctaagccaacttttaggagtcaatatttctccaacacaggttgtgcatggacattctccttacagagagctggtgaagcgttttgaagatgaccttattgttgctgttggaaaaggagagcctgcagtagtgatgtccgcgtacggatttagaaaagttctgtccatagatgaatatgcatcatattataaagatattgacccccttgctcctttcaagacttggaaagttgggcaaacagacagtcacatgtctgcaaaagtgcacccatcatatgatgtttattcagagcgagttaaaggagtatttgttgtcagcgatcctgtcgattggggaagagatctacaggtactctgtgacatcttgtctactcatggacttcctgggactgaaaaaggtgatcaacctcctttgtattttgcagctgatgatcttgaataccaggtatgatgatatgttaagaatggtgctatattgtgaacaccctacaggccaaattttctcttatttccatccaggttcagtaatactaagataaccattgcactggaagaaacttagttttgagatcctatggcaggcagcatttccttctgagcggcttgggatgggcgccttcaggatagctttggaaagcatcttcaatgaaataaatgatcatccactgaagtatacatcttatgggaaacctaatccatttgtgttcaagaatgcagcaaacatacttgaaaaacttgttatgagtatgtatcctaattcacagacaccaatggaaggaaaagattatcagttttcaactatttacatggttggagataatcctaaagtggatatcaatggagctatgaaggctggccacccatggtcatctgttcttacaaggacgggtgtttttaggggaaaggataacgacccacagtttcctgcagatgtggttgttgatactgttgaagatgccatcaactatattctggagaaggaacgtatacagtgatgataccattgaatatgctggagtgtcatgagatataaattggcactgtcatttcagaaactctgacagtaaaaggggaagtccacttatgcactgacagaactcaagcattcaaataagttgtaacaatcgaagcagagttagaaattcttctggatagctagagagactcgcttattcaatgtgcacaatatcttgattgtatgaacattcacttgctctggaatcacatccacgtaaccatctgtttggtgtgtgctaattgccttcattggtattggttgttatcataaactcataatttgacgaatgtagctagtctaatggaggacacttgagtcatgtgattgttgacaatggtttgagttgcactagctgcaaggtaggtgagtttgcgtt

SEQ ID NO: 81228 - DNA, 1469 bp, Zea Mays
tccaaattttctgaggtggagcagtccccgcttggcggcttgtctagagaactcacccgccgccacgcgcgaacgcaaccagcgacgcctcgcggccgcggacagcgcggagccagacgcctcgcattcgctgagaagccgaagcccgtagagcacaggagttgtggacttctagagcacggcgggtctggtatgagaggcttccgctttgcgttggtccgtgcggcgcggtcgcggtcgcgggcggagcaccagaccgtgcagcgccgccggccgtccgatgtggcccaacgtttttcccacaccgcgccggcgccggcgaggccatctttcggcatcgcgttcgacatcgatggggtcatcctgcgcggccgaagtccgatcgggggcgcgccgcgggccatccgacgcctatattccgaagaaggtaccctgaagatcccgtttctgtttttaacgaatggaggaggtgttccagagcacagaagggcccttgagctaagccaacttttaggagtcaatatttctccaacacaggttgtgcatggacattctccttacagagagctggtgaagcgttttgaagatgaccttattgttgctgttggaaaaggagagcctgcagtagtgatgtccgcgtacggatttagaaaagttctgtccatagatgaatatgcatcatattataaagatattgacccccttgctcctttcaagacttggaaagttgggcaaacagacagtcacatgtctgcaaaagtgcacccatcatatgatgtttattcagagcgagttaaaggagtatttgttgtcagcgatcctgtcgattggggaagagatctacaggtactctgtgacatcttgtctactcatggacttcctgggactgaaaaaggtgatcaacctcctttgtattttgcagctgatgatcttgaataccaggcagcatttccttctgagcggcttgggatgggcgccttcaggatagctttggaaagcatcttcaatgaaataaatgatcatccactgaagtatacatcttatgggaaacctaatccatttgtgttcaagaatgcagcaaacatacttgaaaaacttgttatgagtatgtatcctaattcacagacaccaatggaaggaaaagattatcagttttcaactatttacatggttggagataatcctaaagtggatatcaatggagctatgaaggctggccacccatggtcatctgttcttacaaggacgggtgtttttaggggaaaggataacgacccacagtttcctgcagatgtggttgttgatactgttgaagatgccatcaactatattctggagaaggaacgtatacagtgatgataccatgaacggtccctccccaggcattatttggtgcacaggttattgtaatgtagttgtaggtcctggtcttctcgttgtgttatgtatttacacccacaataccttct

SEQ ID NO: 81229 - DNA, 3841 bp, Zea Mays
gcccgccccactccctgcccacctccacttgctccacgtcacggcgagcgcttcccctcccccctggttatctatcgcatcctccgcggccctcctccctcccactcctgtcctctcctctcctctccccgccatttggctccgaaccctcacaacagtgcatcgtctctcctgtccccgccatttggttcggaactctcgcggcctcaactcctcctcgtcatcgtaacacccacgcttagagttcgtgagggtcgcccccaggggatctcgagacgtccgtttccaagagtggaccggctcgcaggcgctgctgttaccttgggtggagctcggacctgcggatcagttggattctcaagggagacggagtcgggagcaactggttttgggcgtcgcggagcacatggcttaagaataatttcttccagcccggcgacaaattcgcagttggattcagcatatgcattttttatgctgacataggatgtgctcaaccatccgtggactccctctagttgcacaaaccacctcagtgctctctctttcttcgaatcgggctaataatgggcagtgcttgccaagctggcacagacgggccttcccgcaaggatgtgttagggatagggaatgccgccttagagaatggccaccatcaggctgaagctgacgcagatgaatggagggaaaaggaagaggacttggccaacaacgggcacagtgcgccaccgccaggcatgcagcaggtggatgagcataaggaggaacaaagacaaagcattcactgggagaggttcctacctgtgaagacactgagagtcttgctggtggagaatgatgactctactcgtcaggtggtcagtgccctgctccgtaagtgctgctatgaagttattcctgctgaaaatggtttgcatgcatggcgatatcttgaagatctgcagaacaacatcgaccttgtattgactgaggttttcatgccttgtctatctggtatcggtctgcttagcaaaatcacaagtcacaaaatttgcaaagacattcctgtgattagtaagtagatttcctcaactaccctaatgcacgtgaaattttatcttgttaattgttgggtttaaatacttttagctgctacactgatgtgttttgcatgcagtgatgtctacgaatgattctatgagtatggtgtttaagtgtttgtcgaagggagcagttgatttcttggtaaaaccactacgtaagaatgagcttaagaacctttggcagcatgtttggaggcgatgccacagttccagtggaagtgaaagtggcatccagacacagaagtgtgccaaactaaatactggcgacgagtatgagaacggcagtgacagcaatcatgatgatgaagaaaatgatgacggcgacgatgacgacttcagtgttggactcaatgctagggatggaagtgacaatggcagtggtactcaaagctcatggacaaagcgtgctgtggagattgacagcccacaacctatatctcccgatcaactagttgatccacctgatagtacatgtgcacaagtaattcaccctagatcagagatatgcagtaacaagtggttaccgacagcaaacaaaaggaatgtcaagaaacagaaggagaataaagatgaatctatgggaagatacttaggaataggtgctcctaggaactcaagtgcagaatatcaatcatctctcaatgatgtatctgttaatccaatagaaaaaggacatgagaatcacatgtccaaatgcaaatctaaaaaggaaacaatggcagaagatgattgtacaaacatgcctagtgcaacaaatgctgaaactgctgatttgattagctcaatagccagaaacacagaaggccaacaagcagtacaagccgttgacgcaccagatggcccttccaaaatggctaatggaaatgataagaatcatgattctcatatcgaagtgacaccccatgagttgggtttgaagagatcgagaacaaatggagctacagcggaaatccatgatgagcgaaatattctgaaaagatcagatcagtcagccttcaccaggtaccatacatctgtggcttccaatcaaggtggagcaagatatggggaaagctcttcaccacaagataacagttctgaggccatgaaaacggactctacatgcaagatgaagtcaaattcagatgctgctccaataaagcagggctccaatggcagtagcaataacgatgtgggatccagtacaaagaatgttgctgcaaggccttcgggtgacagggagagagtagcgtcaccattagccatcaaatctacccagcatgcctcagcatttcatactatacagaatcaaacgtcaccagctaatctgattggggaagacaaagctgatgaaggaatttccaatacagtgaaaatgagccacccaacagaggttccacaaggctgcgtccagcatcatcatcatgtgcattattacctccatgttatgacacagaaacagccatcaacagaccgtggatcatcagatgttcactgtggttcgtcaaatgtgtttgatcctcctgttgaaggacatgctgcaaactacagtgtgaatgggggtgtctcagttggtcataatgggtgcaatgggcagaatggaagtagcgctgtccccaatattgcaagaccaaacatagagagtattaatggtaccatgagccaaaatattgccggaggtggcattgtaagtgggagtgggagtggcaatgacatgtatcagaatcggttcctgcaacgagaagctgcattgaacaaattcagactgaagcggaaagatcggaactttggtaaaaaggttcgctaccaaagcaggaagaggcttgctgagcagcggccacgggtccgaggacagtttgtgcgacaatctgagcaagaagatcaaacagcgcaaggttcagaaagatgacacgtaatttctaatacaacgtatcatcttcttcggcagatctgagaattaggcggttcttcctattgcgcatcttcgtcgacagatctgagaattaagtggtccttcccattgctgatagtagcccactgattcccaacgttagagtacacaataaataagactctagttgtcaatttctgtggttgactgcagatgatcaccctagcgctatggagtcaacaatgtaatatttatatactatgttcgtgccttggcgccttggcggtttgcaatcttcagtttcctttctgagagattcttggccaagtgccttgaggaggagcaaactagcagcgtcgccattgctatattaatagctggaatcatgtagtagtagttcatccattcattcgaagatcgtgttccaaatcaacacaagtaggggtttgcttctcctctttccaagaaaagtggttgtagcgtgagatgcaaataggtctcttgtgctagatcaagctcaataaactttaggccgtgttaggcagctgatctacttcaccaatgtggcaaggcattcgtcgtattctgttgacagaaacaaggtgttcactgcacgggcatgccgcacgactcctcgcagatcaaaagagggaacacggcatgcttttaccaaaattattttcgaataacattgtgaggaacagacaataattaacttcccaaaacgtctcgctatactggatttttcgatgttggattcgtaatcagatccttttgacaataattttcgtacatcaggcatgtcaacagtaactgaagaatatgttagagccacatgtctcaaaagaaaaaaaaaacagagataatctcttcagtggttcagacattt

SEQ ID NO: 81230 - DNA, 4632 bp, Zea Mays
cccacctccacttgctccacgtcacggcgagcgcttcccctcccccctggttatctatcgcatcctccgcggccctcctccctcccactcctgtcctctcctctcctctccccgccatttggctccgaaccctcacaacagtgcatcgtctctcctgtccccgccatttggttcggaactctcgcggcctcaactcctcctcgtcatcgtaacacccacgcttagagttcgtgagggtcgcccccaggggatctcgagacgtccgtttccaagagtggaccggctcgcaggcgctgctgttaccttgggtggagctcggacctgcggatcagttggattctcaagggagacggtggtttctgatttcctttctctaagcataccaaatcctttgtctcgagtcgggagcaactggttttgggcgtcgcggagcacatggcttaagaataatttcttccagcccggcgacaaattcgcagttggattcagcatatgcattttttatgctgacataggatgtgctcaaccatccgtggactccctctagttgcacaaaccacctcagtgctctctctttcttcgaatcgggctaataatgggcagtgcttgccaagctggcacagacgggccttcccgcaaggatgtgttagggatagggaatgccgccttagagaatggccaccatcaggctgaagctgacgcagatgaatggagggaaaaggaagaggacttggccaacaacgggcacagtgcgccaccgccaggcatgcagcaggtggatgagcataaggaggaacaaagacaaagcattcactgggagaggttcctacctgtgaagacactgagagtcttgctggtggagaatgatgactctactcgtcaggtggtcagtgccctgctccgtaagtgctgctatgaagttattcctgctgaaaatggtttgcatgcatggcgatatcttgaagatctgcagaacaacatcgaccttgtattgactgaggttttcatgccttgtctatctggtatcggtctgcttagcaaaatcacaagtcacaaaatttgcaaagacattcctgtgattatgatgtctacgaatgattctatgagtatggtgtttaagtgtttgtcgaagggagcagttgatttcttggtaaaaccactacgtaagaatgagcttaagaacctttggcagcatgtttggaggcgatgccacagttccagtggaagtgaaagtggcatccagacacagaagtgtgccaaactaaatactggcgacgagtatgagaacggcagtgacagcaatcatgatgatgaagaaaatgatgacggcgacgatgacgacttcagtgttggactcaatgctagggatggaagtgacaatggcagtggtactcaaagctcatggacaaagcgtgctgtggagattgacagcccacaacctatatctcccgatcaactagttgatccacctgatagtacatgtgcacaagtaattcaccctagatcagagatatgcagtaacaagtggttaccgacagcaaacaaaaggaatgtcaagaaacagaaggagaataaagatgaatctatgggaagatacttaggaataggtgctcctaggaactcaagtgcagaatatcaatcatctctcaatgatgtatctgttaatccaatagaaaaaggacatgagaatcacatgtccaaatgcaaatctaaaaaggaaacaatggcagaagatgattgtacaaacatgcctagtgcaacaaatgctgaaactgctgatttgattagctcaatagccagaaacacagaaggccaacaagcagtacaagccgttgacgcaccagatggcccttccaaaatggctaatggaaatgataagaatcatgattctcatatcgaagtgacaccccatgagttgggtttgaagagatcgagaacaaatggagctacagcggaaatccatgatgagcgaaatattctgaaaagatcagatcagtcagccttcaccaggtggagcaagatatggggaaagctcttcaccacaagataacagttctgaggccatgaaaacggactctacatgcaagatgaagtcaaattcagatgctgctccaataaagcagggctccaatggcagtagcaataacgatgtgggatccagtacaaagaatgttgctgcaaggccttcgggtgacagggagagagtagcgtcaccattagccatcaaatctacccagcatgcctcagcatttcatactatacagaatcaaacgtcaccagctaatctgattggggaagacaaagctgatgaaggaatttccaatacagtgaaaatgagccacccaacagaggttccacaaggctgcgtccagcatcatcatcatgtgcattattacctccatgttatgacacagaaacagccatcaacagaccgtggatcatcagatgttcactgtggttcgtcaaatgtgtttgatcctcctgttgaaggacatgctgcaaactacagtgtgaatgggggtgtctcagttggtcataatgggtgcaatgggcagaatggaagtagcgctgtccccaatattgcaagaccaaacatagagagtattaatggtaccatgagccaaaatattgccggaggtggcattgtaagtgggagtgggagtggcaatgacatgtatcagaatcggttcctgcaacgagaagctgcattgaacaaattcagactgaagcggaaagatcggaactttggtaaaaaggtagcctgttttcagttacatgcctgttgtagctatgacttgaaatcagtaatagttatttgagggttgaagggccttccacttaatatataaaagtaagggtagggattcaaatggtttgcacaattataatcagaaaaaagatagaagtgattattaataatctctacctttggaggatataaaaatgcttatgctacttccagctatgccttttgtctttttttagaaaaacttccagttatgacttaattgttaatattgacaataccagtgtaggaatactgaaattagtcttgaaagtaagacattagttgctgctgtttgcgtgatggcccctagcttgaggatactttgccgctactcttgcggatgctttgccgctccatgtcatctctagcggacgctctgctgtcgtgctgctggatgtttgtctcgtctcctctcaggggatgctctgccactgcagtgtcttcgtctttattggcaacctggagttgatgtgcttttccttctgcaggttcagtcggttagattttaggtggagagtccttcttactgcattttctttctctggttctttgggtcggtttaggttgctaaccacttctgtgcttttgtaatatgggcgacggggtctctcagtagctttgtcataaaacaattctacttccccttaatatagtacatgtgactctgacatgttatcgaacaaaaaaaaacattgctcgctctaaattttatgagatctggcatgatttcaaactattcttcttttcaaaatcctgttttctgactgcagtttttacaagattttatggtcttgccgcttcatttttctgactgtttgcattggaccgataccttctgatggccttgtccgcctattttcaggttcgctaccaaagcaggaagaggcttgctgagcagcggccacgggtccgaggacagtttgtgcgacaatctgagcaagaagatcaaacagcgcaaggttcagaaagatgacacgtaatttctaatacaacgtatcatcttcttcggcagatctgagaattaggcggttcttcctattgcgcatcttcgtcgacagatctgagaattaagtggtccttcccattgctgatagtagcccactgattcccaacgttagagtacacaataaataagactctagttgtcaatttctgtggttgactgcagatgatcaccctagcgctatggagtcaacaatgtaatatttatatactatgttcgtgccttggcgccttggcggtttgcaatcttcagtttcctttctgagagattcttggccaagtgccttgaggaggagcaaactagcagcgtcgccattgctatattaatagctggaatcatgtagtagtagttcatccattcattcgaagatcgtgttccaaatcaacacaagtaggggtttgcttctcctctttccaagaaaagtggttgtagcgtgagatgcaaataggtctcttgtgctagatcaagctcaataaactttaggccgtgttaggcagctgatctacttcaccaatgtggcaaggcattcgtcgtattctgttgacagaaacaaggtgttcactgcacgggcatgccgcacgactcctcgcagatcaaaagagggaacacggcatgcttttaccaaaattattttcgaataacattgtgaggaacagacaataattaacttcccaaaacgtctcgctatactggatttttcgatgttggattcgtaatcagatccttttgacaataattttcgtacatcaggcatgtcaacagtaactgaagaatatgttagagccacatgtctcaaaagaaaaaaaaaacagagataatctcttcagtggttcagacattt

SEQ ID NO: 81231 - DNA, 4703 bp, Zea Mays
cgcatcctccgcggccctcctccctcccactcctgtcctctcctctcctctccccgccatttggctccgaaccctcacaacagtgcatcgtctctcctgtccccgccatttggttcggaactctcgcggcctcaactcctcctcgtcatcgtaacacccacgcttagagttcgtgagggtcgcccccaggggatctcgagacgtccgtttccaagagtggaccggctcgcaggcgctgctgttaccttgggtggagctcggacctgcggatcagttggattctcaagggagacggtggtttctgatttcctttctctaagcataccaaatcctttgtctcgagtcgggagcaactggttttgggcgtcgcggagcacatggcttaagaataatttcttccagcccggcgacaaattcgcagttggattcagcatatgcattttttatgctgacataggatgtgctcaaccatccgtggactccctctagttgcacaaaccacctcagtgctctctctttcttcgaatcgggctaataatgggcagtgcttgccaagctggcacagacgggccttcccgcaaggatgtgttagggatagggaatgccgccttagagaatggccaccatcaggctgaagctgacgcagatgaatggagggaaaaggaagaggacttggccaacaacgggcacagtgcgccaccgccaggcatgcagcaggtggatgagcataaggaggaacaaagacaaagcattcactgggagaggttcctacctgtgaagacactgagagtcttgctggtggagaatgatgactctactcgtcaggtggtcagtgccctgctccgtaagtgctgctatgaagttattcctgctgaaaatggtttgcatgcatggcgatatcttgaagatctgcagaacaacatcgaccttgtattgactgaggttttcatgccttgtctatctggtatcggtctgcttagcaaaatcacaagtcacaaaatttgcaaagacattcctgtgattatgatgtctacgaatgattctatgagtatggtgtttaagtgtttgtcgaagggagcagttgatttcttggtaaaaccactacgtaagaatgagcttaagaacctttggcagcatgtttggaggcgatgccacagtgtaagctgtttgtttttgtccagtggaagtgaaagtggcatccagacacagaagtgtgccaaactaaatactggcgacgagtatgagaacggcagtgacagcaatcatgatgatgaagaaaatgatgacggcgacgatgacgacttcagtgttggactcaatgctagggatggaagtgacaatggcagtggtactcaaagctcatggacaaagcgtgctgtggagattgacagcccacaacctatatctcccgatcaactagttgatccacctgatagtacatgtgcacaagtaattcaccctagatcagagatatgcagtaacaagtggttaccgacagcaaacaaaaggaatgtcaagaaacagaaggagaataaagatgaatctatgggaagatacttaggaataggtgctcctaggaactcaagtgcagaatatcaatcatctctcaatgatgtatctgttaatccaatagaaaaaggacatgagaatcacatgtccaaatgcaaatctaaaaaggaaacaatggcagaagatgattgtacaaacatgcctagtgcaacaaatgctgaaactgctgatttgattagctcaatagccagaaacacagaaggccaacaagcagtacaagccgttgacgcaccagatggcccttccaaaatggctaatggaaatgataagaatcatgattctcatatcgaagtgacaccccatgagttgggtttgaagagatcgagaacaaatggagctacagcggaaatccatgatgagcgaaatattctgaaaagatcagatcagtcagccttcaccaggtgcaaaacataatatcagtgtcattactaggttattaacataacagtaagttgcatgctaacccattatgatttctgcaaggtaccatacatctgtggcttccaatcaaggtggagcaagatatggggaaagctcttcaccacaagataacagttctgaggccatgaaaacggactctacatgcaagatgaagtcaaattcagatgctgctccaataaagcagggctccaatggcagtagcaataacgatgtgggatccagtacaaagaatgttgctgcaaggccttcgggtgacagggagagagtagcgtcaccattagccatcaaatctacccagcatgcctcagcatttcatactatacagaatcaaacgtcaccagctaatctgattggggaagacaaagctgatgaaggaatttccaatacagtgaaaatgagccacccaacagaggttccacaaggctgcgtccagcatcatcatcatgtgcattattacctccatgttatgacacagaaacagccatcaacagaccgtggatcatcagatgttcactgtggttcgtcaaatgtgtttgatcctcctgttgaaggacatgctgcaaactacagtgtgaatgggggtgtctcagttggtcataatgggtgcaatgggcagaatggaagtagcgctgtccccaatattgcaagaccaaacatagagagtattaatggtaccatgagccaaaatattgccggaggtggcattgtaagtgggagtgggagtggcaatgacatgtatcagaatcggttcctgcaacgagaagctgcattgaacaaattcagactgaagcggaaagatcggaactttggtaaaaaggtagcctgttttcagttacatgcctgttgtagctatgacttgaaatcagtaatagttatttgagggttgaagggccttccacttaatatataaaagtaagggtagggattcaaatggtttgcacaattataatcagaaaaaagatagaagtgattattaataatctctacctttggaggatataaaaatgcttatgctacttccagctatgccttttgtctttttttagaaaaacttccagttatgacttaattgttaatattgacaataccagtgtaggaatactgaaattagtcttgaaagtaagacattagttgctgctgtttgcgtgatggcccctagcttgaggatactttgccgctactcttgcggatgctttgccgctccatgtcatctctagcggacgctctgctgtcgtgctgctggatgtttgtctcgtctcctctcaggggatgctctgccactgcagtgtcttcgtctttattggcaacctggagttgatgtgcttttccttctgcaggttcagtcggttagattttaggtggagagtccttcttactgcattttctttctctggttctttgggtcggtttaggttgctaaccacttctgtgcttttgtaatatgggcgacggggtctctcagtagctttgtcataaaacaattctacttccccttaatatagtacatgtgactctgacatgttatcgaacaaaaaaaaacattgctcgctctaaattttatgagatctggcatgatttcaaactattcttcttttcaaaatcctgttttctgactgcagtttttacaagattttatggtcttgccgcttcatttttctgactgtttgcattggaccgataccttctgatggccttgtccgcctattttcaggttcgctaccaaagcaggaagaggcttgctgagcagcggccacgggtccgaggacagtttgtgcgacaatctgagcaagaagatcaaacagcgcaaggttcagaaagatgacacgtaatttctaatacaacgtatcatcttcttcggcagatctgagaattaggcggttcttcctattgcgcatcttcgtcgacagatctgagaattaagtggtccttcccattgctgatagtagcccactgattcccaacgttagagtacacaataaataagactctagttgtcaatttctgtggttgactgcagatgatcaccctagcgctatggagtcaacaatgtaatatttatatactatgttcgtgccttggcgccttggcggtttgcaatcttcagtttcctttctgagagattcttggccaagtgccttgaggaggagcaaactagcagcgtcgccattgctatattaatagctggaatcatgtagtagtagttcatccattcattcgaagatcgtgttccaaatcaacacaagtaggggtttgcttctcctctttccaagaaaagtggttgtagcgtgagatgcaaataggtctcttgtgctagatcaagctcaataaactttaggccgtgttaggcagctgatctacttcaccaatgtggcaaggcattcgtcgtattctgttgacagaaacaaggtgttcactgcacgggcatgccgcacgactcctcgcagatcaaaagagggaacacggcatgcttttaccaaaattattttcgaataacattgtgaggaacagacaataattaacttcccaaaacgtctcgctatactggatttttcgatgttggattcgtaatcagatccttttgacaataattttcgtacatcaggcatgtcaacagtaactgaagaatatgttagagccacatgtctcaaaagaaaaaaaaaacagagataatctcttcagtggttcagacattt

SEQ ID NO: 81232 - DNA, 2969 bp, Zea Mays
cagctccatagcatcttagttattcctgctgaaaatggtttgcatgcatggcgatatcttgaagatctgcagaacaacatcgaccttgtattgactgaggttttcatgccttgtctatctggtatcggtctgcttagcaaaatcacaagtcacaaaatttgcaaagacattcctgtgattagtaagtagatttcctcaactaccctaatgcacgtgaaattttatcttgttaattgttgggtttaaatacttttagctgctacactgatgtgttttgcatgcagtgatgtctacgaatgattctatgagtatggtgtttaagtgtttgtcgaagggagcagttgatttcttggtaaaaccactacgtaagaatgagcttaagaacctttggcagcatgtttggaggcgatgccacagttccagtggaagtgaaagtggcatccagacacagaagtgtgccaaactaaatactggcgacgagtatgagaacggcagtgacagcaatcatgatgatgaagaaaatgatgacggcgacgatgacgacttcagtgttggactcaatgctagggatggaagtgacaatggcagtggtactcaaagctcatggacaaagcgtgctgtggagattgacagcccacaacctatatctcccgatcaactagttgatccacctgatagtacatgtgcacaagtaattcaccctagatcagagatatgcagtaacaagtggttaccgacagcaaacaaaaggaatgtcaagaaacagaaggagaataaagatgaatctatgggaagatacttaggaataggtgctcctaggaactcaagtgcagaatatcaatcatctctcaatgatgtatctgttaatccaatagaaaaaggacatgagaatcacatgtccaaatgcaaatctaaaaaggaaacaatggcagaagatgattgtacaaacatgcctagtgcaacaaatgctgaaactgctgatttgattagctcaatagccagaaacacagaaggccaacaagcagtacaagccgttgacgcaccagatggcccttccaaaatggctaatggaaatgataagaatcatgattctcatatcgaagtgacaccccatgagttgggtttgaagagatcgagaacaaatggagctacagcggaaatccatgatgagcgaaatattctgaaaagatcagatcagtcagccttcaccaggtaccatacatctgtggcttccaatcaaggtggagcaagatatggggaaagctcttcaccacaagataacagttctgaggccatgaaaacggactctacatgcaagatgaagtcaaattcagatgctgctccaataaagcagggctccaatggcagtagcaataacgatgtgggatccagtacaaagaatgttgctgcaaggccttcgggtgacagggagagagtagcgtcaccattagccatcaaatctacccagcatgcctcagcatttcatactatacagaatcaaacgtcaccagctaatctgattggggaagacaaagctgatgaaggaatttccaatacagtgaaaatgagccacccaacagaggttccacaaggctgcgtccagcatcatcatcatgtgcattattacctccatgttatgacacagaaacagccatcaacagaccgtggatcatcagatgttcactgtggttcgtcaaatgtgtttgatcctcctgttgaaggacatgctgcaaactacagtgtgaatgggggtgtctcagttggtcataatgggtgcaatgggcagaatggaagtagcgctgtccccaatattgcaagaccaaacatagagagtattaatggtaccatgagccaaaatattgccggaggtggcattgtaagtgggagtgggagtggcaatgacatgtatcagaatcggttcctgcaacgagaagctgcattgaacaaattcagactgaagcggaaagatcggaactttggtaaaaaggttcgctaccaaagcaggaagaggcttgctgagcagcggccacgggtccgaggacagtttgtgcgacaatctgagcaagaagatcaaacagcgcaaggttcagaaagatgacacgtaatttctaatacaacgtatcatcttcttcggcagatctgagaattaggcggttcttcctattgcgcatcttcgtcgacagatctgagaattaagtggtccttcccattgctgatagtagcccactgattcccaacgttagagtacacaataaataagactctagttgtcaatttctgtggttgactgcagatgatcaccctagcgctatggagtcaacaatgtaatatttatatactatgttcgtgccttggcgccttggcggtttgcaatcttcagtttcctttctgagagattcttggccaagtgccttgaggaggagcaaactagcagcgtcgccattgctatattaatagctggaatcatgtagtagtagttcatccattcattcgaagatcgtgttccaaatcaacacaagtaggggtttgcttctcctctttccaagaaaagtggttgtagcgtgagatgcaaataggtctcttgtgctagatcaagctcaataaactttaggccgtgttaggcagctgatctacttcaccaatgtggcaaggcattcgtcgtattctgttgacagaaacaaggtgttcactgcacgggcatgccgcacgactcctcgcagatcaaaagagggaacacggcatgcttttaccaaaattattttcgaataacattgtgaggaacagacaataattaacttcccaaaacgtctcgctatactggatttttcgatgttggattcgtaatcagatccttttgacaataattttcgtacatcaggcatgtcaacagtaactgaagaatatgttagagccacatgtctcaaaagaaaaaaaaaacagagataatctcttcagtggttcagacattt

SEQ ID NO: 81233 - DNA, 1442 bp, Zea Mays
tgcttccagtgacgccagtaacgcacctcacgggcgggcgttcacggtctcgcggacaaaaaccgggccggccccccattgttacgcttcttttcgaggcctcggcgctggtactcctctgtcctctcccagtgtcccagacatcccacagggagcgtagtgctctgtgcctgtgggctgtggcgcggcgcggtgcctcgtcacctcacgcctcacgccccgaacagaggcgtccgtccgacaccttccgcctcaagccgccgcgccgtcccctgcccgcgagctcaaaagtcagagccgcacgcaagaagcagaagcgccccggggccgccgccaaaggctgcgcagattacctacccacagcactcccagtctcccacagcccaagcaacatccggtatcaatatcacaagctcaaaagtcagagtcgggaaggatcggagaatggctgcgcaggcggcgcaatgcagggtgagcggtggggatggcggtggcggtggcatgaggacggtggagtgcctgagagggaggcttctcgcagagagggtggcgtccaaggctgcaaaggaggaggccgaccaactggccaaaaggctggacgagctagagaggaagctcgccgacgaggtcaaggagaggaacggccctggctcgttgaccaccgatggctctgcgccatccgctccttccggagacgccgacagggtcgtgtcgtcggagggatcgtgcacccagctcaactcgtcctcccaggacgggagctggtgctccgttgcgtcagagcaatcccagcctggtccttgcatggatcctgccggacacaccaccaactgccgttcggcggggagcggcggctgtgaccgtgattcagagaggcaacacctcgatgcatcatcccgtggctgtggcccagctaaacccgaagaagccgtcaacgagagcgacgacacgctagcgctggtgctggtagatccccagctcgttgcagccgcggcaggcggcggtccaagaacgcaggcaggagaggtccgccgtggcaggagtcacgaggaggaagaagaagaggagagcgacaggctcgcgatcgttctagctgagccgcagcgacaggccgccgctgggcgcggcgacgtggagtccgttctcctggcgctgcggcgggtgaaggagcagctgcgctacaccatcgagcggcggtcgcgggcgcggctcgtcgtcgcccaccaggaactctacggccactagctgtgagccgtacgtgtgtgaatcattcgcagcgccgcactgctgctgtgcagcgattttataaatatagctgtctcgggggtcgatggagtatccgtagagaatggaataagatgtcataatttacaaagagtgaattgcttatttgcttctgtttactgatgaggaacacaatgtgatacggttggaagcaccca

SEQ ID NO: 81234 - DNA, 1247 bp, Zea Mays
tcacctgcaccgcgttcgcgtccaagtccaagtgaggccggccgccgttgggcgggcccaggacggctgtagacctgtacatgtcatccaatcaatccgtcacacgattcagactgcattcactcacctccggcggcctcccacgaagaattcgctcgctttccccggttgcccgtcaccactgacgcccgcctcccccgcggcccttcccatcgccgcgtataaaggttcgctgccggcaacgagaagatgcagctcaccgccacctccacgctcgaagctcctcccgaaccggccgcatcgccgccatggcagccgccgctcctgcaagggtctgcaggacaagattaagatagttgccatcgatctcgctgacaggccagcgtggtacaaggagaaggtttatccagaaaacaaggtgccttctctagagcacgacaaccaggtgaaaggagagagcttggatttggttaagtacattgacagcaacttcgaaggtccatcgttgctccccgaggatcatgcaaagcagcagttcgctgaggagctgctcggatacactgacgcattcaacaaagcattttactcatgtttagtcgacagggaagatgtgtctgaggaagccgttgctgccttggacaaaatagaagacgccctggggaaattcaacgatggcccgttcttccttggtcagttcagtctggtggacgttgcgtatgtaccgttcatcgagaggtttcagatactctattccaatataaagaactatgacgtcacaaagggcagacccaaccttcagaaattcatcgaggaagtgaacaagatcgatgcgtacacacagactaaactggacccgcagtttttgcttgagcaaacaaagaagcggcttgggattgcttaaagcctgtgaccaaggacgagactttcgccagaagcaccagcgtagtagatcggagctcgttttagtcggttgtgtgcttggatattacatctggtcttcaataaggcatggccttctgtaatggctgtgcttctgaaaataaataaactagttgtccaggtattatatttgctttggtgacgtgtcgatgtcactgtatatatatgaatgggtcggaaagaatgatgatgtgcagtgtgttctgtgcaaatgttgccgagatgaaggatcagtgtccatgtagacattcatgtattgctcatatcgtgacacggcgcatgaaaggtttcggcccctaccacgctca

SEQ ID NO: 81235 - DNA, 1404 bp, Zea Mays
tcacctgcaccgcgttcgcgtccaagtccaagtgaggccggccgccgttgggcgggcccaggacggctgtagacctgtacatgtcatccaatcaatccgtcacacgattcagactgcattcactcacctccggcggcctcccacgaagaattcgctcgctttccccggttgcccgtcaccactgacgcccgcctcccccgcggcccttcccatcgccgcgtataaaggttcgctgccggcaacgagaagatgcagctcaccgccacctccacgctcgaagctcctcccgaaccggccgcatcgccgccatggcagccgccgctcctgcaagtcctccctccttcctgtgcagctccgtgaaggaagtgctgccgtctcccctgacctccgcctccgagccccctccccttttcgatggcaccaccaggttgtacgtggcctatctttgcccgttcgcgcagcgcgcttggattgctagaaactacaagggtctgcaggacaagattaagatagttgccatcgatctcgctgacaggccagcgtggtacaaggagaaggtttatccagaaaacaaggtgccttctctagagcacgacaaccaggtgaaaggagagagcttggatttggttaagtacattgacagcaacttcgaaggtccatcgttgctccccgaggatcatgcaaagcagcagttcgctgaggagctgctcggatacactgacgcattcaacaaagcattttactcatgtttagtcgacagggaagatgtgtctgaggaagccgttgctgccttggacaaaatagaagacgccctggggaaattcaacgatggcccgttcttccttggtcagttcagtctggtggacgttgcgtatgtaccgttcatcgagaggtttcagatactctattccaatataaagaactatgacgtcacaaagggcagacccaaccttcagaaattcatcgaggaagtgaacaagatcgatgcgtacacacagactaaactggacccgcagtttttgcttgagcaaacaaagaagcggcttgggattgcttaaagcctgtgaccaaggacgagactttcgccagaagcaccagcgtagtagatcggagctcgttttagtcggttgtgtgcttggatattacatctggtcttcaataaggcatggccttctgtaatggctgtgcttctgaaaataaataaactagttgtccaggtattatatttgctttggtgacgtgtcgatgtcactgtatatatatgaatgggtcggaaagaatgatgatgtgcagtgtgttctgtgcaaatgttgccgagatgaaggatcagtgtccatgtagacattcatgtattgctcatatcgtgacacggcgcatgaaaggtttcggcccctaccacgctca

SEQ ID NO: 81236 - DNA, 959 bp, Zea Mays
cgtctttgttctcccacgaacttcattgacgaaggcgaaaagagaagaatcagctccatttctctcgtttgggaggaggaggaggcgcgcgccggtgcccgaccgtcgaccagccgctacgacgcggcaccaggatagggacattttcatcgaggcttgtcacactcgatactgttgagatatttactactcatgaatggtttgccaagccaacagtggctttccggtgcaatggagcaaacaaaacatatctgccagatgtaacggaggcgcacacgccatatacctttaagggtgaagaatcatggcagcccttaacagagcttccagaaaagaaatgcaagcgatgtggtttgtatgaggagggcacatttaagcctgatgctgtctttgatgaatgggagatgtgttcgagtgatttcaagggcggaaaatacacccgctttaaggaaggccagttcaatgcaacattcctatgcccaaactgcactgcctctactggacatggaaaccctagaccaagcgaagatttggaaactaagaagacatctattgctgtcatcataatagctagtgttctcgcttcagtccttgtcgtcactgccttgttcgggggcttcaagtattggcagaagaagaagagggagcgagaccaggtgcggttcctcaagctctttgaagagggagatgaccttgaagatgagctgggccttagtaatgaattctaaaatagtgcgtacagtcttacttccgatgttttcagatgtagtttccacgtatgatgtatagaatgtgtgtttttggtgacctcctagtagcttttgcagagggagtgaatcttgcaacagtttgcacaagccccgtaacgtacatatataaaagtgcaaaaatgaatggattcacgtatagccttcaattcttcatcgaatgcttcacgtttccctttttctgtgagtttg

SEQ ID NO: 81237 - DNA, 1090 bp, Zea Mays
cgtctttgttctcccacgaacttcattgacgaaggcgaaaagagaagaatcagctccatttctctcgtttgggaggaggaggaggcgcgcgccggtgcccgaccgtcgaccagccgctacgacgcggcaccaggataggtgctcctgagctacgaacccacaccccacggccaaactgttgcgtgcgccccggccttagcatgaggtggccgctggcgatctcgactcgccgccgccccctccttttcgtccttctcatcgccctctacacgattcctaggacattttcatcgaggcttgtcacactcgatactgttgagatatttactactcatgaatggtttgccaagccaacagtggctttccggtgcaatggagcaaacaaaacatatctgccagatgtaacggaggcgcacacgccatatacctttaagggtgaagaatcatggcagagcttccagaaaagaaatgcaagcgatgtggtttgtatgaggagggcacatttaagcctgatgctgtctttgatgaatgggagatgtgttcgagtgatttcaagggcggaaaatacacccgctttaaggaaggccagttcaatgcaacattcctatgcccaaactgcactgcctctactggacatggaaaccctagaccaagcgaagatttggaaactaagaagacatctattgctgtcatcataatagctagtgttctcgcttcagtccttgtcgtcactgccttgttcgggggcttcaagtattggcagaagaagaagagggagcgagaccaggtgcggttcctcaagctctttgaagagggagatgaccttgaagatgagctgggccttagtaatgaattctaaaatagtgcgtacagtcttacttccgatgttttcagatgtagtttccacgtatgatgtatagaatgtgtgtttttggtgacctcctagtagcttttgcagagggagtgaatcttgcaacagtttgcacaagccccgtaacgtacatatataaaagtgcaaaaatgaatggattcacgtatagccttcaattcttcatcgaatgcttcacgtttccctttttctgtgagtttg

SEQ ID NO: 81238 - DNA, 949 bp, Zea Mays
cgtctttgttctcccacgaacttcattgacgaaggcgaaaagagaagaatcagctccatttctctcgtttgggaggaggaggaggcgcgcgccggtgcccgaccgtcgaccagccgctacgacgcggcaccaggatagggacattttcatcgaggcttgtcacactcgatactgttgagatatttactactcatgaatggtttgccaagccaacagtggctttccggtgcaatggagcaaacaaaacatatctgccagatgtaacggaggcgcacacgccatatacctttaagggtgaagaatcatggcagagcttccagaaaagaaatgcaagcgatgtggtttgtatgaggagggcacatttaagcctgatgctgtctttgatgaatgggagatgtgttcgagtgatttcaagggcggaaaatacacccgctttaaggaaggccagttcaatgcaacattcctatgcccaaactgcactgcctctactggacatggaaaccctagaccaagcgaagatttggaaactaagaagacatctattgctgtcatcataatagctagtgttctcgcttcagtccttgtcgtcactgccttgttcgggggcttcaagtattggcagaagaagaagagggagcgagaccaggtgcggttcctcaagctctttgaagagggagatgaccttgaagatgagctgggccttagtaatgaattctaaaatagtgcgtacagtcttacttccgatgttttcagatgtagtttccacgtatgatgtatagaatgtgtgtttttggtgacctcctagtagcttttgcagagggagtgaatcttgcaacagtttgcacaagccccgtaacgtacatatataaaagtgcaaaaatgaatggattcacgtatagccttcaattcttcatcgaatgcttcacgtttccctttttctgtgagtttg

SEQ ID NO: 81239 - DNA, 871 bp, Zea Mays
caaagataaacgtgttatagttgatggaccattcttacacagatcaaagagttgtggcctggacattttcatcgaggcttgtcacactcgatactgttgagatatttactactcatgaatggtttgccaagccaacagtggctttccggtgcaatggagcaaacaaaacatatctgccagatgtaacggaggcgcacacgccatatacctttaagggtgaagaatcatggcagagcttccagaaaagaaatgcaagcgatgtggtttgtatgaggagggcacatttaagcctgatgctgtctttgatgaatgggagatgtgttcgagtgatttcaagggcggaaaatacacccgctttaaggaaggccagttcaatgcaacattcctatgcccaaactgcactgcctctactggacatggaaaccctagaccaagcgaagatttggaaactaagaagacatctattgctgtcatcataatagctagtgttctcgcttcagtccttgtcgtcactgccttgttcgggggcttcaagtattggcagaagaagaagagggagcgagaccaggtgcggttcctcaagctctttgaagagggagatgaccttgaagatgagctgggccttagtaatgaattctaaaatagtgcgtacagtcttacttccgatgttttcagatgtagtttccacgtatgatgtatagaatgtgtgtttttggtgacctcctagtagcttttgcagagggagtgaatcttgcaacagtttgcacaagccccgtaacgtacatatataaaagtgcaaaaatgaatggattcacgtatagccttcaattcttcatcgaatgcttcacgtttccctttttctgtgagtttg

SEQ ID NO: 81240 - DNA, 848 bp, Zea Mays
cttacacagatcaaagagttgtggcctggacattttcatcgaggcttgtcacactcgatactgttgagatatttactactcatgaatggtttgccaagccaacagtggctttccggtgcaatggagcaaacaaaacatatctgccagatgtaacggaggcgcacacgccatatacctttaagggtgaagaatcatggcagcccttaacagagcttccagaaaagaaatgcaagcgatgtggtttgtatgaggagggcacatttaagcctgatgctgtctttgatgaatgggagatgtgttcgagtgatttcaagggcggaaaatacacccgctttaaggaaggccagttcaatgcaacattcctatgcccaaactgcactgcctctactggacatggaaaccctagaccaagcgaagatttggaaactaagaagacatctattgctgtcatcataatagctagtgttctcgcttcagtccttgtcgtcactgccttgttcgggggcttcaagtattggcagaagaagaagagggagcgagaccaggtgcggttcctcaagctctttgaagagggagatgaccttgaagatgagctgggccttagtaatgaattctaaaatagtgcgtacagtcttacttccgatgttttcagatgtagtttccacgtatgatgtatagaatgtgtgtttttggtgacctcctagtagcttttgcagagggagtgaatcttgcaacagtttgcacaagccccgtaacgtacatatataaaagtgcaaaaatgaatggattcacgtatagccttcaattcttcatcgaatgcttcacgtttccctttttctgtgagtttg

SEQ ID NO: 81241 - DNA, 484 bp, Zea Mays
ctgcgcgtcgtcgttttacacctctggacatggaaaccctagaccaagcgaagatttggaaactaagaagacatctattgctgtcatcataatagctagtgttctcgcttcagtccttgtcgtcactgccttgttcgggggcttcaagtattggcagaagaagaagagggagcgagaccaggtgcggttcctcaagctctttgaagagggagatgaccttgaagatgagctgggccttagtaatgaattctaaaatagtgcgtacagtcttacttccgatgttttcagatgtagtttccacgtatgatgtatagaatgtgtgtttttggtgacctcctagtagcttttgcagagggagtgaatcttgcaacagtttgcacaagccccgtaacgtacatatataaaagtgcaaaaatgaatggattcacgtatagccttcaattcttcatcgaatgcttcacgtttccctttttctgtgagtttg

SEQ ID NO: 81242 - DNA, 3627 bp, Zea Mays
ccaggcctccacattgcttctgcgctgcgccaccaatcgccatcgcctcgttgcccagtctccgcgccgccgcctcctccgctccctccctccctcccctcttctagggtttccatcccatgcgatctcgcggccttggtgttccgggacagtagggacgcctcctctccgttcgaatcaagggagtcagcgacccaatgggtaagggcgggcaggacgaaggcaaccgccggcgggacggatccgccgcctcggggccggaccgccccgcgccggtcttcccggcgtgggcgcgcaccccgagcgagtgcctcgcggagctgggcgtctcggcggaccgcggcctcagctccgaggaggcggcggcgcggctgcagcgacacgggcccaacgagctcgagcggcacgcgccgccgtcggtctggaagctcgtcctcgagcagtttaacgacacgctcgtgcgcatcctgctcctggcggccgtcgtctccttcgtgctcgcgctctacgacggcgcagagggcggcgaggtggggctcaccgccttcgtcgagccgctcgtcatcttccttatcctcatcgtcaacgccgtcgtcggcgtctggcaggagagcaacgccgagaaggcgctcgaggctctcaaggagattcagtcggagcacgcaaccgtcaggcgtgatgggcgctggtcgcatggcctccccgcgcgcgacctcgtccccggggacatcgttgagctccgggtcggggacaaggttcccgcggacatgcgcgtgctccagctcatcagctccaccctccgcgtcgagcaggggtctctcaccggcgagaccgcctctgttaacaagaccagccacaagatcgagctggaggacactgacatccagggaaaggagtgcatggtttttgccggtaccactgttgtcaacggcagtgctgtctgtgttgtgacgggcactggcatggctaccgaaattggcaagatccatgcgcagatccaggaggcatctcaggaggaggacgacacgccactgaagaagaagctcaatgagtttggtgaggcgctaactgccataatcggggtgatctgtgccttggtctggctcatcaacttgaagtatttcctttcctgggagtatgtggacgggtggcctacgaatttcaagttctcatttgagaagtgcacgtattactttgagattgcggtggcactggccgttgcagcaattccagagggtttgcctgctgtgatcaccacgtgcttggcactcggtacaaggaagatggcacagaagaatgcccttgtgaggaagctgccgagtgtggagacattgggttgtacaactgtgatttgctctgataagaccggaactttgaccacgaaccagatgtcagcagtgaagcttgtagcaattgggaggtggcctgatacacttaggagctttaaggttgatggaaccacttatgatccgactgatgggaagatacacgattggccaagcttgagcatggatgaaaatctccagatgatcggaaagatagctgcggtttgcaatgatgcaagcattgcccactctgagcatcagtacgttgctactgggatgcccacagaagctgctctgaaggttttggttgagaaaatggggcttcctggtggttatactccatctcttgattcatctgatttgctaaggtgttgtcagtggtggaataatgctgccaagagagtagcaactctggaatttgatcgcaccagaaagtcaatgggagttattgtgaaagcaaactctgggaagaacttgctgcttgttaagggagcagtagaaaatctgctagagagatgtacccacattcagttgctcgatggatctgttgtgctattggatgatggtgccaaggcgctcatattatctacactccgtgacatgtctgccagtgctttgcgctgcttgggttttgcttacaaggatgaattgtcagaatttgcaacatatgatggtgaagaacatgcagctcacaagtatctgcttgatccttcatattactcatccatagagagtaatatgatcttttgtggttttgttggtctaagggatcctccacgagaagaagtccacaaagcaattgaagattgcagagctgctgggatacgtgttatggtgataacaggagataacaaggaaacagcagaggccatttgtcgtgagattggggtttttggccctcatgaagatatcagttcaaaaagcttcacagggaaggaattcatgggtctttctgataaaaaggagctcttaagacaacagggtggccttctcttctccagggcagagccaaaacacaagcaggagatagttagactgctcaaagaagatggtgaagtggttgcaatgactggtgatggggtgaatgatgcaccagctcttaaactggctgatattggagttgcaatgggcattactggaactgaggttgccaaagaagcttcagatatggtacttgcagatgataactttagtactatagtcgcagcagttggtgaagggagatctatttacaacaacatgaaggcttttattagatatatgatctcctcaaacatcggagaggtcgcgtccatattcctgacatcggctttgggtattccagaaggtctcatcccagtgcaactcctatgggtcaatctagttacagatggccctccagcgactgctttggggttcaacccgccagataaagatatcatgaagaaacctcctcgaagaagtgatgactcgttgatcactccttggatcctgtttcgctatatggttattggcctttatgttggggttgcaacagtgggaatcttcatcatctggtacacgcatgacagtttcctgggaattgacctggctagtgatggtcatacacttgtatcgtactcccagctctcaaactgggacaagtgctcctcatgggagggcttcaaggtgtcaccattcaccgcaggagcgaggacattcagcttcgatgcaaatccatgcgattacttccagggtggcaagattaaagcaacgaccctctccctgtcagtcttggtggccattgagatgttcaactcactgaatgccctgtcagaggacggcagccttgtgagcatgccaccatgggttaatccgtggcttcttctggccatgtcggtttctttcgggctgcatttcttgatcctctacgtgcctttcctcgctcaagtgtttgggatcgtgcccctcagtttgaacgaatggctcttggtggtggcagtggccttccccgttgtgctgatcgacgaggttctcaaatttgtggggcggtgcctgacagcgcgtgcccggaaacaatcagggaagaggaaggcagagtagatgctagtgatcatcggtatttagaatctgtagtgccacggggaatcgatattcaatgtgacacccccattgtttttgagctgctaagggctctcgatcctttcagagtgttttaggttgggaatatgaccgtgcatgacaggctaggatactctatagaattgatgatgatccgcatcattgtgatgtacattggtgcttctacatatgctatatgcattgttgaaggagtagacatcgg

SEQ ID NO: 81243 - DNA, 2147 bp, Zea Mays
ggccattgctatcaccaaatttttcgcgggcgcacgcattcctaggccgcaccgcgccaccgggacgggaagagcgtcccctgcaccggccatttgctccgctcgcgtccccgcctcctgcgcacgagacgctctccgctttttttttatcgacgagtttgagacagaccaaagaggcggaagaagcggggaagccgacgggcaacgaccggggcgtgaggcgatgtcgtggctccgcagcgcggtgcaccgcgccgtggaggcgagcgggggtcacagctccctccttacccgcaccgtccgcacctcccttgacaccgtcgtccaccatgccggccaggctgtcgcgggcggcgccaggctcatcaccgggagccggagttacaagagcgcgaaggtggcagcgaagaggctggaagaggaggcgctctcctgcaaaggggacgaacgggtgcagctgctgcgccggtggctcgtcgcgctcaaggagacccagcgcgcgaccacggcggtccgggagccgcaatttggggacaatccggaccagactgcgcccctgctggatttgtacatcgattacgacagcggtgcggagccgatgaactttttccatgtcttcctctacagtcaagccctcgagtgtgttgttctctccttgattagggaagccccaactgaggaagaagttccactggtctcagaagtttttggaatgtgcctttcgggagggaaggatgtgcacaatgcactcttaagtagtgtaaaggacctggcaaggttattctcaagttatagtgacgaagtgttggcaaaacgtgacgagctgcttcagtttgctcagggtgcgatctcagggctaaagataaatgctgacattgcaagattagataatgaaattactcagttgcaacagcagataaattcaatggatgcgctccatgctacatcaatcgtcaatcagaataaaaaagctcaaacagccactgagggtttcagaaaggcagtttctgaagttcggctttgctctagaatggaagaacttctattgaagaagaaatcaatacaccccggtgattcattggagactcattttgagaaggtagataaactgaaggttttgtctgaatcccttgcaaattcatctgcaaaagcagaaaagcgtatcatggaaaataggctacaaaaggaagaatctcttatcttccgggtcaccaaaacaaatgaagttagtggtatagaaaagaaaatacaacaccccatgatttcccattgaaacaaaaggaagacattcatatccatcattgcaattgcaaaagaaaaaaaatagcaggatgtgcaagctgttccaattgttttttcttttccaattcttagtccatgcaattgtctttatgcttctgcaatctgtctgattgatgattaatcaattaagttttgtaaaaggaattagttgctgagatctctggacttgaggagcaaaggaatcaactcgaggcagaactgaaaaaggtgaatactaaattgaaagttgctacagtgaagcttaaaaaaactagagaggaacgggaccaatttgatgaagcaagcaatcagattgtgttgcacctaaaaacaaaggaagacgaactttcaagatccatagcttcatgcaaagtagaagcaagtactgtcagtgcatggatcaactttttgaaagatacgtggaaattgcagtccttgtttgaagagctaagagaaaaacaggccaacgaagaattggatagatgtggactctgctttgcgaaattgatgaagtatcatgtttctgcatccatggaagagctaagcacttctattgaccgtatcaaaacctttgttgataacttgaaaatatttggtaacagatccgtgtcagcagaggatggagctaatggtccgtctaagcaatcaaaccctcgtagatatcttgaggaagaatatctccaaactgagaaaaaggtcgtagctgcattcagtttggttgatagtatcagagcaatatattcttcaaaccaggattactataaaacgagtttgtgcagaagggatgacactgaggtaaaaaatctgtttacctccattgacaatctgcggatcgagttcgaatccgtgccacgtccagtgcttca

SEQ ID NO: 81244 - DNA, 2167 bp, Zea Mays
cgcacgcattcctaggccgcaccgcgccaccgggacgggaagagcgtcccctgcaccggccatttgctccgctcgcgtccccgcctcctgcgcacgagacgctctccgctttttttttatcgacgagtttgagacagaccaaagaggcggaagaagcggggaagccgacgggcaacgaccggggcgtgaggcgatgtcgtggctccgcagcgcggtgcaccgcgccgtggaggcgagcgggggtcacagctccctccttacccgcaccgtccgcacctcccttgacaccgtcgtccaccatgccggccaggctgtcgcgggcggcgccaggctcatcaccgggagccggagttacaagagcgcgaaggtggcagcgaagaggctggaagaggaggcgctctcctgcaaaggggacgaacgggtgcagctgctgcgccggtggctcgtcgcgctcaaggagacccagcgcgcgaccacggcggtccgggagccgcaatttggggacaatccggaccagactgcgcccctgctggatttgtacatcgattacgacagcggtgcggagccgatgaactttttccatgtcttcctctacagtcaagccctcgagtgtgttgttctctccttgattagggaagccccaactgaggaagaagttccactggtctcagaagtttttggaatgtgcctttcgggagggaaggatgtgcacaatgcactcttaagtagtgtaaaggacctggcaaggttattctcaagttatagtgacgaagtgttggcaaaacgtgacgagctgcttcagtttgctcagggtgcgatctcagggctaaagataaatgctgacattgcaagattagataatgaaattactcagttgcaacagcagataaattcaatggatgcgctccatgctacatcaatcgtcaatcagaataaaaaagctcaaacagccactgagggtttcagaaaggcagtttctgaagttcggctttgctctagaatggaagaacttctattgaagaagaaatcaatacaccccggtgattcattggagactcattttgagaaggtagataaactgaaggttttgtctgaatcccttgcaaattcatctgcaaaagcagaaaagcgtatcatggaaaataggctacaaaaggaagaatctcttatcttccgggtcaccaaaacaaatgaagttagtggtatagaaaaggaattagttgctgagatctctggacttgaggagcaaaggaatcaactcgaggcagaactgaaaaaggcaatattattctctctatttccaccttcatgaagatctatcgttcaatatatttcttccaaaatatttcagcaacttacatagtggcaaaattgctgattttttttttggctaaacagttcagggtggagacaaccaacagattttgctgtgaacattaatctttgttagttaggtttacttattcatagagggtaatgtttacatgagaggtttgtttttaagagtgattctgaaactcagattacaggtgaatactaaattgaaagttgctacagtgaagcttaaaaaaactagagaggaacgggaccaatttgatgaagcaagcaatcagattgtgttgcacctaaaaacaaaggaagacgaactttcaagatccatagcttcatgcaaagtagaagcaagtactgtcagtgcatggatcaactttttgaaagatacgtggaaattgcagtccttgtttgaagagctaagagaaaaacaggccaacgaagaattggatagatgtggactctgctttgcgaaattgatgaagtatcatgtttctgcatccatggaagagctaagcacttctattgaccgtatcaaaacctttgttgataacttgaaaatatttggtaacagatccgtgtcagcagaggatggagctaatggtccgtctaagcaatcaaaccctcgtagatatcttgaggaagaatatctccaaactgagaaaaaggtcgtagctgcattcagtttggttgatagtatcagagcaatatattcttcaaaccaggattactataaaacgagtttgtgcagaagggatgacactgaggtaaaaaatctgtttacctccattgacaatctgcggatcgagttcgaatccgtgccacgtccagtgcttca

SEQ ID NO: 81245 - DNA, 1909 bp, Zea Mays
cgcattcctaggccgcaccgcgccaccgggacgggaagagcgtcccctgcaccggccatttgctccgctcgcgtccccgcctcctgcgcacgagacgctctccgctttttttttatcgacgagtttgagacagaccaaagaggcggaagaagcggggaagccgacgggcaacgaccggggcgtgaggcgatgtcgtggctccgcagcgcggtgcaccgcgccgtggaggcgagcgggggtcacagctccctccttacccgcaccgtccgcacctcccttgacaccgtcgtccaccatgccggccaggctgtcgcgggcggcgccaggctcatcaccgggagccggagttacaagagcgcgaaggtggcagcgaagaggctggaagaggaggcgctctcctgcaaaggggacgaacgggtgcagctgctgcgccggtggctcgtcgcgctcaaggagacccagcgcgcgaccacggcggtccgggagccgcaatttggggacaatccggaccagactgcgcccctgctggatttgtacatcgattacgacagcggtgcggagccgatgaactttttccatgtcttcctctacagtcaagccctcgagtgtgttgttctctccttgattagggaagccccaactgaggaagaagttccactggtctcagaagtttttggaatgtgcctttcgggagggaaggatgtgcacaatgcactcttaagtagtgtaaaggacctggcaaggttattctcaagttatagtgacgaagtgttggcaaaacgtgacgagctgcttcagtttgctcagggtgcgatctcagggctaaagataaatgctgacattgcaagattagataatgaaattactcagttgcaacagcagataaattcaatggatgcgctccatgctacatcaatcgtcaatcagaataaaaaagctcaaacagccactgagggtttcagaaaggcagtttctgaagttcggctttgctctagaatggaagaacttctattgaagaagaaatcaatacaccccggtgattcattggagactcattttgagaaggtagataaactgaaggttttgtctgaatcccttgcaaattcatctgcaaaagcagaaaagcgtatcatggaaaataggctacaaaaggaagaatctcttatcttccgggtcaccaaaacaaatgaagttagtggtatagaaaaggaattagttgctgagatctctggacttgaggagcaaaggaatcaactcgaggcagaactgaaaaaggtgaatactaaattgaaagttgctacagtgaagcttaaaaaaactagagaggaacgggaccaatttgatgaagcaagcaatcagattgtgttgcacctaaaaacaaagacgaactttcaagatccatagcttcatgcaaagtagaagcaagtactgtcagtgcatggatcaactttttgaaagatacgtggaaattgcagtccttgtttgaagagctaagagaaaaacaggccaacgaagaattggatagatgtggactctgctttgcgaaattgatgaagtatcatgtttctgcatccatggaagagctaagcacttctattgaccgtatcaaaacctttgttgataacttgaaaatatttggtaacagatccgtgtcagcagaggatggagctaatggtccgtctaagcaatcaaaccctcgtagatatcttgaggaagaatatctccaaactgagaaaaaggtcgtagctgcattcagtttggttgatagtatcagagcaatatattcttcaaaccaggattactataaaacgagtttgtgcagaagggatgacactgaggtaaaaaatctgtttacctccattgacaatctgcggatcgagttcgaatccgtgccacgtccagtgcttca

SEQ ID NO: 81246 - DNA, 2123 bp, Zea Mays
gcgccaccgggacgggaagagcgtcccctgcaccggccatttgctccgctcgcgtccccgcctcctgcgcacgagacgctctccgctttttttttatcgacgagtttgagacagaccaaagaggcggaagaagcggggaagccgacgggcaacgaccggggcgtgaggcgatgtcgtggctccgcagcgcggtgcaccgcgccgtggaggcgagcgggggtcacagctccctccttacccgcaccgtccgcacctcccttgacaccgtcgtccaccatgccggccaggctgtcgcgggcggcgccaggctcatcaccgggagccggagttacaagagcgcgaaggtggcagcgaagaggctggaagaggaggcgctctcctgcaaaggggacgaacgggtgcagctgctgcgccggtggctcgtcgcgctcaaggagacccagcgcgcgaccacggcggtccgggagccgcaatttggggacaatccggaccagactgcgcccctgctggatttgtacatcgattacgacagcggtgcggagccgatgaactttttccatgtcttcctctacagtcaagccctcgagtgtgttgttctctccttgattagggaagccccaactgaggaagaagttccactggtctcagaagtttttggaatgtgcctttcgggagggaaggatgtgcacaatgcactcttaagtagtgtaaaggacctggcaaggttattctcaagttatagtgacgaagtgttggcaaaacgtgacgagctgcttcagtttgctcagggtgcgatctcagggctaaagataaatgctgacattgcaaggttctgtcttttctgttgggcagttgaagattagataatgaaattactcagttgcaacagcagataaattcaatggatgcgctccatgctacatcaatcgtcaatcagaataaaaaagctcaaacagccactgagggtttcagaaaggcagtttctgaagttcggctttgctctagaatggaagaacttctattgaagaagaaatcaatacaccccggtgattcattggagactcattttgagaaggtagataaactgaaggttttgtctgaatcccttgcaaattcatctgcaaaagcagaaaagcgtatcatggaaaataggctacaaaaggaagaatctcttatcttccgggtcaccaaaacaaatgaagttagtggtatagaaaagaaaatacaacaccccatgatttcccattgaaacaaaaggaagacattcatatccatcattgcaattgcaaaagaaaaaaaatagcaggatgtgcaagctgttccaattgttttttcttttccaattcttagtccatgcaattgtctttatgcttctgcaatctgtctgattgatgattaatcaattaagttttgtaaaaggaattagttgctgagatctctggacttgaggagcaaaggaatcaactcgaggcagaactgaaaaaggtgaatactaaattgaaagttgctacagtgaagcttaaaaaaactagagaggaacgggaccaatttgatgaagcaagcaatcagattgtgttgcacctaaaaacaaaggaagacgaactttcaagatccatagcttcatgcaaagtagaagcaagtactgtcagtgcatggatcaactttttgaaagatacgtggaaattgcagtccttgtttgaagagctaagagaaaaacaggccaacgaagaattggatagatgtggactctgctttgcgaaattgatgaagtatcatgtttctgcatccatggaagagctaagcacttctattgaccgtatcaaaacctttgttgataacttgaaaatatttggtaacagatccgtgtcagcagaggatggagctaatggtccgtctaagcaatcaaaccctcgtagatatcttgaggaagaatatctccaaactgagaaaaaggtcgtagctgcattcagtttggttgatagtatcagagcaatatattcttcaaaccaggattactataaaacgagtttgtgcagaagggatgacactgaggtaaaaaatctgtttacctccattgacaatctgcggatcgagttcgaatccgtgccacgtccagtgcttca

SEQ ID NO: 81247 - DNA, 1714 bp, Zea Mays
ggccatttgctccgctcgcgtccccgcctcctgcgcacgagacgctctccgctttttttttatcgacgagtttgagacagaccaaagaggcggaagaagcggggaagccgacgggcaacgaccggggcgtgaggcgatgtcgtggctccgcagcgcggtgcaccgcgccgtggaggcgagcgggggtcacagctccctccttacccgcaccgtccgcacctcccttgacaccgtcgtccaccatgccggccaggctgtcgcgggcggcgccaggctcatcaccgggagccggagttacaagagcgcgaaggtggcagcgaagaggctggaagaggaggcgctctcctgcaaaggggacgaacgggtgcagctgctgcgccggtggctcgtcgcgctcaaggagacccagcgcgcgaccacggcggtccgggagccgcaatttggggacaatccggaccagactgcgcccctgctggatttgtacatcgattacgacagcggtgcggagccgatgaactttttccatgtcttcctctacagtcaagccctcgagtgtgttgttctctccttgattagggaagccccaactgaggaagaagttccactggtctcagaagtttttggaatgtgcctttcgggagggaaggatgtgcacaatgcactcttaagtagtgtaaaggacctggcaaggttattctcaagttatagtgacgaagtgttggcaaaacgtgacgagctgcttcagtttgctcagggtgcgatctcagggctaaagataaatgctgacattgcaagattagataatgaaattactcagttgcaacagcagataaattcaatggatgcgctccatgctacatcaatcgtcaatcagaataaaaaagctcaaacagccactgagggtttcagaaaggcagtttctgaagttcggctttgctctagaatggaagaacttctattgaagaagaaatcaatacaccccggtgattcattggagactcattttgagaaggtagataaactgaaggttttgtctgaatcccttgcaaattcatctgcaaaagcagaaaagcgtatcatggaaaataggctacaaaaggaagaatctcttatcttccgggtcaccaaaacaaatgaagttagtggtatagaaaaggaattagttgctgagatctctggacttgaggagcaaaggaatcaactcgaggcagaactgaaaaaggtgaatactaaattgaaagttgctacagtgaagcttaaaaaaactagagaggaacgggaccaatttgatgaagcaagcaatcagattgtgttgcacctaaaaacaaaggaagacgaactttcaagatccatagcttcatgcaaagtagaagcaagtactgtcagtgcatggatcaactttttgaaagatacgtggaaattgcagtccttgtttgaagagctaagagaaaaacaggccaacgaagaattggatagatgtggactctgctttgcgaaattgatgaagtatcatgtttctgcatccatggaagagctaagcacttctattgaccgtatcaaaacctttgttgataacttgaaaatatttggtaacagatccgtgtcagcagaggatggagctaatggtccgtctaagcaatcaaaccctcgtagatatcttgaggaagaatatctccaaactgagaaaaagtgccacataattattcaatatgtg

SEQ ID NO: 81248 - DNA, 2155 bp, Zea Mays
ggccatttgctccgctcgcgtccccgcctcctgcgcacgagacgctctccgctttttttttatcgacgagtttgagacagaccaaagaggcggaagaagcggggaagccgacgggcaacgaccggggcgtgaggcgatgtcgtggctccgcagcgcggtgcaccgcgccgtggaggcgagcgggggtcacagctccctccttacccgcaccgtccgcacctcccttgacaccgtcgtccaccatgccggccaggctgtcgcgggcggcgccaggctcatcaccgggagccggagttacaagagcgcgaaggtggcagcgaagaggctggaagaggaggcgctctcctgcaaaggggacgaacgggtgcagctgctgcgccggtggctcgtcgcgctcaaggagacccagcgcgcgaccacggcggtccgggagccgcaatttggggacaatccggaccagactgcgcccctgctggatttgtacatcgattacgacagcggtgcggagccgatgaactttttccatgtcttcctctacagtcaagccctcgagtgtgttgttctctccttgattagggaagccccaactgaggaagaagttccactggtctcagaagtttttggaatgtgcctttcgggagggaaggatgtgcacaatgcactcttaagtagtgtaaaggacctggcaaggttattctcaagttatagtgacgaagtgttggcaaaacgtgacgagctgcttcagtttgctcagggtgcgatctcagggctaaagataaatgctgacattgcaagattagataatgaaattactcagttgcaacagcagataaattcaatggatgcgctccatgctacatcaatcgtcaatcagaataaaaaagctcaaacagccactgagggtttcagaaaggcagtttctgaagttcggctttgctctagaatggaagaacttctattgaagaagaaatcaatacaccccggtgattcattggagactcattttgagaaggtagataaactgaaggttttgtctgaatcccttgcaaattcatctgcaaaagcagaaaagcgtatcatggaaaataggctacaaaaggaagaatctcttatcttccgggtcaccaaaacaaatgaagttagtggtatagaaaagaaaatacaacaccccatgatttcccattgaaacaaaaggaagacattcatatccatcattgcaattgcaaaagaaaaaaaatagcaggatgtgcaagctgttccaattgttttttcttttccaattcttagtccatgcaattgtctttatgcttctgcaatctgtctgattgatgattaatcaattaagttttgtaaaaggaattagttgctgagatctctggacttgaggagcaaaggaatcaactcgaggcagaactgaaaaagattacaggtgaatactaaattgaaagttgctacagtgaagcttaaaaaaactagagaggaacgggaccaatttgatgaagcaagcaatcagattgtgttgcacctaaaaacaaaggttaagtttttgtttgttgctttctagtttaagaaatgcgttgtgttagcacagttcacttgcttacttttaattttctgacatatccccaggaagacgaactttcaagatccatagcttcatgcaaagtagaagcaagtactgtcagtgcatggatcaactttttgaaagatacgtggaaattgcagtccttgtttgaagagctaagagaaaaacaggccaacgaagaattggatagatgtggactctgctttgcgaaattgatgaagtatcatgtttctgcatccatgagctaagcacttctattgaccgtatcaaaacctttgttgataacttgaaaatatttggtaacagatccgtgtcagcagaggatggagctaatggtccgtctaagcaatcaaaccctcgtagatatcttgaggaagaatatctccaaactgagaaaaaggtcgtagctgcattcagtttggttgatagtatcagagcaatatattcttcaaaccaggattactataaaacgagtttgtgcagaagggatgacactgaggtaaaaaatctgtttacctccattgacaatctgcggatcgagttcgaatccgtgccacgtccagtgcttca

SEQ ID NO: 81249 - DNA, 2055 bp, Zea Mays
ggccatttgctccgctcgcgtccccgcctcctgcgcacgagacgctctccgctttttttttatcgacgagtttgagacagaccaaagaggcggaagaagcggggaagccgacgggcaacgaccggggcgtgaggcgatgtcgtggctccgcagcgcggtgcaccgcgccgtggaggcgagcgggggtcacagctccctccttacccgcaccgtccgcacctcccttgacaccgtcgtccaccatgccggccaggctgtcgcgggcggcgccaggctcatcaccgggagccggagttacaagagcgcgaaggtggcagcgaagaggctggaagaggaggcgctctcctgcaaaggggacgaacgggtgcagctgctgcgccggtggctcgtcgcgctcaaggagacccagcgcgcgaccacggcggtccgggagccgcaatttggggacaatccggaccagactgcgcccctgctggatttgtacatcgattacgacagcggtgcggagccgatgaactttttccatgtcttcctctacagtcaagccctcgagtgtgttgttctctccttgggaagccccaactgaggaagaagttccactggtctcagaagtttttggaatgtgcctttcgggagggaaggatgtgcacaatgcactcttaagtagtgtaaaggacctggcaaggttattctcaagttatagtgacgaagtgttggcaaaacgtgacgagctgcttcagtttgctcagggtgcgatctcagggctaaagataaatgctgacattgcaagattagataatgaaattactcagttgcaacagcagataaattcaatggatgcgctccatgctacatcaatcgtcaatcagaataaaaaagctcaaacagccactgagggtttcagaaaggcagtttctgaagttcggctttgctctagaatggaagaacttctattgaagaagaaatcaatacaccccggtgattcattggagactcattttgagaaggtagataaactgaaggttttgtctgaatcccttgcaaattcatctgcaaaagcagaaaagcgtatcatggaaaataggctacaaaaggaagaatctcttatcttccgggtcaccaaaacaaatgaagttagtggtatagaaaagaaaatacaacaccccatgatttcccattgaaacaaaaggaagacattcatatccatcattgcaattgcaaaagaaaaaaaatagcaggatgtgcaagctgttccaattgttttttcttttccaattcttagtccatgcaattgtctttatgcttctgcaatctgtctgattgatgattaatcaattaagttttgtaaaaggaattagttgctgagatctctggacttgaggagcaaaggaatcaactcgaggcagaactgaaaaaggtgaatactaaattgaaagttgctacagtgaagcttaaaaaaactagagaggaacgggaccaatttgatgaagcaagcaatcagattgtgttgcacctaaaaacaaaggaagacgaactttcaagatccatagcttcatgcaaagtagaagcaagtactgtcagtgcatggatcaactttttgaaagatacgtggaaattgcagtccttgtttgaagagctaagagaaaaacaggccaacgaagaattggatagatgtggactctgctttgcgaaattgatgaagtatcatgtttctgcatccatggaagagctaagcacttctattgaccgtatcaaaacctttgttgataacttgaaaatatttggtaacagatccgtgtcagcagaggatggagctaatggtccgtctaagcaatcaaaccctcgtagatatcttgaggaagaatatctccaaactgagaaaaaggtcgtagctgcattcagtttggttgatagtatcagagcaatatattcttcaaaccaggattactataaaacgagtttgtgcagaagggatgacactgaggtaaaaaatctgtttacctccattgacaatctgcggatcgagttcgaatccgtgccacgtccagtgcttca

SEQ ID NO: 81250 - DNA, 1783 bp, Zea Mays
ggccatttgctccgctcgcgtccccgcctcctgcgcacgagacgctctccgctttttttttatcgacgagtttgagacagaccaaagaggcggaagaagcggggaagccgacgggcaacgaccggggcgtgaggcgatgtcgtggctccgcagcgcggtgcaccgcgccgtggaggcgagcgggggtcacagctccctccttacccgcaccgtccgcacctcccttgacaccgtcgtccaccatgccggccaggctgtcgcgggcggcgccaggctcatcaccgggagccggagttacaagagcgcgaaggtggcagcgaagaggctggaagaggaggcgctctcctgcaaaggggacgaacgggtgcagctgctgcgccggtggctcgtcgcgctcaaggagacccagcgcgcgaccacggcggtccgggagccgcaatttggggacaatccggaccagactgcgcccctgctggatttgtacatcgattacgacagcggtgcggagccgatgaactttttccatgtcttcctctacagtcaagccctcgagtgtgttgttctctccttgattagggaagccccaactgaggaagaagttccactggtctcagaagtttttggaatgtgcctttcgggagggaaggatgtgcacaatgcactcttaagtagtgtaaaggacctggcaaggttattctcaagttatagtgacgaagtgttggcaaaacgtgacgagctgcttcagtttgctcagggtgcgatctcagggctaaagataaatgctgacattgcaagattagataatgaaattactcagttgcaacagcagataaattcaatggatgcgctccatgctacatcaatcgtcaatcagaataaaaaagctcaaacagccactgagggtttcagaaaggcagtttctgaagttcggctttgctctagaatggaagaacttctattgaagaagaaatcaatacaccccggtgattcattggagactcattttgagaaggctacaaaaggaagaatctcttatcttccgggtcaccaaaacaaatgaagttagtggtatagaaaaggaattagttgctgagatctctggacttgaggagcaaaggaatcaactcgaggcagaactgaaaaaggtgaatactaaattgaaagttgctacagtgaagcttaaaaaaactagagaggaacgggaccaatttgatgaagcaagcaatcagattgtgttgcacctaaaaacaaaggaagacgaactttcaagatccatagcttcatgcaaagtagaagcaagtactgtcagtgcatggatcaactttttgaaagatacgtggaaattgcagtccttgtttgaagagctaagagaaaaacaggccaacgaagaattggatagatgtggactctgctttgcgaaattgatgaagtatcatgtttctgcatccatggaagagctaagcacttctattgaccgtatcaaaacctttgttgataacttgaaaatatttggtaacagatccgtgtcagcagaggatggagctaatggtccgtctaagcaatcaaaccctcgtagatatcttgaggaagaatatctccaaactgagaaaaaggtcgtagctgcattcagtttggttgatagtatcagagcaatatattcttcaaaccaggattactataaaacgagtttgtgcagaagggatgacactgaggtaaaaaatctgtttacctccattgacaatctgcggatcgagttcgaatccgtgccacgtccagtgcttca

SEQ ID NO: 81251 - DNA, 1863 bp, Zea Mays
ggccatttgctccgctcgcgtccccgcctcctgcgcacgagacgctctccgctttttttttatcgacgagtttgagacagaccaaagaggcggaagaagcggggaagccgacgggcaacgaccggggcgtgaggcgatgtcgtggctccgcagcgcggtgcaccgcgccgtggaggcgagcgggggtcacagctccctccttacccgcaccgtccgcacctcccttgacaccgtcgtccaccatgccggccaggctgtcgcgggcggcgccaggctcatcaccgggagccggagttacaagagcgcgaaggtggcagcgaagaggctggaagaggaggcgctctcctgcaaaggggacgaacgggtgcagctgctgcgccggtggctcgtcgcgctcaaggagacccagcgcgcgaccacggcggtccgggagccgcaatttggggacaatccggaccagactgcgcccctgctggatttgtacatcgattacgacagcggtgcggagccgatgaactttttccatgtcttcctctacagtcaagccctcgagtgtgttgttctctccttgattagggaagccccaactgaggaagaagttccactggtctcagaagtttttggaatgtgcctttcgggagggaaggatgtgcacaatgcactcttaagtagtgtaaaggacctggcaaggttattctcaagttatagtgacgaagtgttggcaaaacgtgacgagctgcttcagtttgctcagggtgcgatctcagggctaaagataaatgctgacattgcaagattagataatgaaattactcagttgcaacagcagataaattcaatggatgcgctccatgctacatcaatcgtcaatcagaataaaaaagctcaaacagccactgagggtttcagaaaggcagtttctgaagttcggctttgctctagaatggaagaacttctattgaagaagaaatcaatacaccccggtgattcattggagactcattttgagaaggtagataaactgaaggttttgtctgaatcccttgcaaattcatctgcaaaagcagaaaagcgtatcatggaaaataggctacaaaaggaagaatctcttatcttccgggtcaccaaaacaaatgaagttagtggtatagaaaaggaattagttgctgagatctctggacttgaggagcaaaggaatcaactcgaggcagaactgaaaaaggtgaatactaaattgaaagttgctacagtgaagcttaaaaaaactagagaggaacgggaccaatttgatgaagcaagcaatcagattgtgttgcacctaaaaacaaaggaagacgaactttcaagatccatagcttcatgcaaagtagaagcaagtactgtcagtgcatggatcaactttttgaaagatacgtggaaattgcagtccttgtttgaagagctaagagaaaaacaggccaacgaagaattggatagatgtggactctgctttgcgaaattgatgaagtatcatgtttctgcatccatggaagagctaagcacttctattgaccgtatcaaaacctttgttgataacttgaaaatatttggtaacagcagatccgtgtcagcagaggatggagctaatggtccgtctaagcaatcaaaccctcgtagatatcttgaggaagaatatctccaaactgagaaaaaggtcgtagctgcattcagtttggttgatagtatcagagcaatatattcttcaaaccaggattactataaaacgagtttgtgcagaagggatgacactgaggtaaaaaatctgtttacctccattgacaatctgcggatcgagttcgaatccgtgccacgtccagtgcttca

SEQ ID NO: 81252 - DNA, 2191 bp, Zea Mays
ggccatttgctccgctcgcgtccccgcctcctgcgcacgagacgctctccgctttttttttatcgacgagtttgagacagaccaaagaggcggaagaagcggggaagccgacgggcaacgaccggggcgtgaggcgatgtcgtggctccgcagcgcggtgcaccgcgccgtggaggcgagcgggggtcacagctccctccttacccgcaccgtccgcacctcccttgacaccgtcgtccaccatgccggccaggctgtcgcgggcggcgccaggctcatcaccgggagccggagttacaagagcgcgaaggtggcagcgaagaggctggaagaggaggcgctctcctgcaaaggggacgaacgggtgcagctgctgcgccggtggctcgtcgcgctcaaggagacccagcgcgcgaccacggcggtccgggagccgcaatttggggacaatccggaccagactgcgcccctgctggatttgtacatcgattacgacagcggtgcggagccgatgaactttttccatgtcttcctctacagtcaagccctcgagtgtgttgttctctccttgattagggaagccccaactgaggaagaagttccactggtctcagaagtttttggaatgtgcctttcgggagggaaggatgtgcacaatgcactcttaagtagtgtaaaggacctggcaaggttattctcaagttatagtgacgaagtgttggcaaaacgtgacgagctgcttcagtttgctcagggtgcgatctcagggctaaagataaatgctgacattgcaagattagataatgaaattactcagttgcaacagcagataaattcaatggatgcgctccatgctacatcaatcgtcaatcagaataaaaaagctcaaacagccactgagggtttcagaaaggcagtttctgaagttcggctttgctctagaatggaagaacttctattgaagaagaaatcaatacaccccggtgattcattggagactcattttgagaaggtagataaactgaaggttttgtctgaatcccttgcaaattcatctgcaaaagcagaaaagcgtatcatggaaaataggctacaaaaggaagaatctcttatcttccgggtcaccaaaacaaatgaagttagtggtatagaaaagaaaatacaacaccccatgatttcccattgaaacaaaaggaagacattcatatccatcattgcaattgcaaaagaaaaaaaatagcaggatgtgcaagctgttccaattgttttttcttttccaattcttagtccatgcaattgtctttatgcttctgcaatctgtctgattgatgattaatcaattaagttttgtaaaaggaattagttgctgagatctctggacttgaggagcaaaggaatcaactcgaggcagaactgaaaaagttcagggtggagacaaccaacagattttgctgtgaacattaatctttgttagttaggtttacttattcatagagggtaatgtttacatgagaggtttgtttttaagagtgattctgaaactcagattacaggtgaatactaaattgaaagttgctacagtgaagcttaaaaaaactagagaggaacgggaccaatttgatgaagcaagcaatcagattgtgttgcacctaaaaacaaaggaagacgaactttcaagatccatagcttcatgcaaagtagaagcaagtactgtcagtgcatggatcaactttttgaaagatacgtggaaattgcagtccttgtttgaagagctaagagaaaaacaggccaacgaagaattggatagatgtggactctgctttgcgaaattgatgaagtatcatgtttctgcatccatggaagagctaagcacttctattgaccgtatcaaaacctttgttgataacttgaaaatatttggtaacagatccgtgtcagcagaggatggagctaatggtccgtctaagcaatcaaaccctcgtagatatcttgaggaagaatatctccaaactgagaaaaaggtcgtagctgcattcagtttggttgatagtatcagagcaatatattcttcaaaccaggattactataaaacgagtttgtgcagaagggatgacactgaggtaaaaaatctgtttacctccattgacaatctgcggatcgagttcgaatccgtgccacgtccagtgcttca

SEQ ID NO: 81253 - DNA, 1742 bp, Zea Mays
ggccatttgctccgctcgcgtccccgcctcctgcgcacgagacgctctccgctttttttttatcgacgagtttgagacagaccaaagaggcggaagaagcggggaagccgacgggcaacgaccggggcgtgaggcgatgtcgtggctccgcagcgcggtgcaccgcgccgtggaggcgagcgggggtcacagctccctccttacccgcaccgtccgcacctcccttgacaccgtcgtccaccatgccggccaggctgtcgcgggcggcgccaggctcatcaccgggagccggagttacaagagcgcgaaggtggcagcgaagaggctggaagaggaggcgctctcctgcaaaggggacgaacgggtgcagctgctgcgccggtggctcgtcgcgctcaaggagacccagcgcgcgaccacggcggtccgggagccgcaatttggggacaatccggaccagactgcgcccctgctggatttgtacatcgattacgacagcggtgcggagccgatgaactttttccatgtcttcctctacagtcaagccctcgagtgtgttgttctctccttgattagggaagccccaactgaggaagaagttccactggtctcagaagtttttggaatgtgcctttcgggagggaaggatgtgcacaatgcactcttaagtagtgtaaaggacctggcaaggttattctcaagttatagtgacgaagtgttggcaaaacgtgacgagctgcttcagtttgctcagggtgcgatctcagggctaaagataaatgctgacattgcaagattagataatgaaattactcagttgcaacagcagataaattcaatggatgcgctccatgctacatcaatcgtcaatcagaataaaaaagctcaaacagccactgagaatggaagaacttctattgaagaagaaatcaatacaccccggtgattcattggagactcattttgagaaggctacaaaaggaagaatctcttatcttccgggtcaccaaaacaaatgaagttagtggtatagaaaaggaattagttgctgagatctctggacttgaggagcaaaggaatcaactcgaggcagaactgaaaaaggtgaatactaaattgaaagttgctacagtgaagcttaaaaaaactagagaggaacgggaccaatttgatgaagcaagcaatcagattgtgttgcacctaaaaacaaaggaagacgaactttcaagatccatagcttcatgcaaagtagaagcaagtactgtcagtgcatggatcaactttttgaaagatacgtggaaattgcagtccttgtttgaagagctaagagaaaaacaggccaacgaagaattggatagatgtggactctgctttgcgaaattgatgaagtatcatgtttctgcatccatggaagagctaagcacttctattgaccgtatcaaaacctttgttgataacttgaaaatatttggtaacagatccgtgtcagcagaggatggagctaatggtccgtctaagcaatcaaaccctcgtagatatcttgaggaagaatatctccaaactgagaaaaaggtcgtagctgcattcagtttggttgatagtatcagagcaatatattcttcaaaccaggattactataaaacgagtttgtgcagaagggatgacactgaggtaaaaaatctgtttacctccattgacaatctgcggatcgagttcgaatccgtgccacgtccagtgcttca

SEQ ID NO: 81254 - DNA, 1846 bp, Zea Mays
ggccatttgctccgctcgcgtccccgcctcctgcgcacgagacgctctccgctttttttttatcgacgagtttgagacagaccaaagaggcggaagaagcggggaagccgacgggcaacgaccggggcgtgaggcgatgtcgtggctccgcagcgcggtgcaccgcgccgtggaggcgagcgggggtcacagctccctccttacccgcaccgtccgcacctcccttgacaccgtcgtccaccatgccggccaggctgtcgcgggcggcgccaggctcatcaccgggagccggagttacaagagcgcgaaggtggcagcgaagaggctggaagaggaggcgctctcctgcaaaggggacgaacgggtgcagctgctgcgccggtggctcgtcgcgctcaaggagacccagcgcgcgaccacggcggtccgggagccgcaatttggggacaatccggaccagactgcgcccctgctggatttgtacatcgattacgacagcggtgcggagccgatgaactttttccatgtcttcctctacagtcaagccctcgagtgtgttgttctctccttgattagggaagccccaactgaggaagaagttccactggtctcagaagtttttggaatgtgcctttcgggagggaaggatgtgcacaatgcactcttaagtagtgtaaaggacctggcaaggttattctcaagttatagtgacgaagtgttggcaaaacgtgacgagctgcttcagtttgctcagggtgcgatctcagggctaaagataaatgctgacattgcaagattagataatgaaattactcagttgcaacagcagataaattcaatggatgcgctccatgctacatcaatcgtcaatcagaataaaaaagctcaaacagccactgagggtttcagaaaggcagtttctgaagttcggctttgctctagaatggaagaacttctattgaagaagaaatcaatacaccccggtgattcattggagactcattttgagaaggtagataaactgaaggttttgtctgaatcccttgcaaattcatctgcaaaagcagaaaagcgtatcatggaaaataggctacaaaaggaagaatctcttatcttccgggtcaccaaaacaaatgaagttagtggtatagaaaaggaattagttgctgagatctctggacttgaggagcaaaggaatcaactcgaggcagaactgaaaaaggtgaatactaaattgaaagttgctacagtgaagcttaaaaaaactagagaggaacgggaccaatttgatgaagcaagcaatcagattgtgttgcacctaaaaacaaaggaagacgaactttcaagatccatagcttcatgcaaagtagaagcaagtactgtcagtgcatggatcaactttttgaaagatacgtggaaattgcagtccttgtttgaagagctaagagaaaaacaggccaacgaagaattggatagatgtggactctgctttgcgaaattgatgaagtatcatgtttctgcatccatggaagagctaagcacttctattgaccgtatcaaaacctttgttgataacttgaaaatatttggtaacagaggatggagctaatggtccgtctaagcaatcaaaccctcgtagatatcttgaggaagaatatctccaaactgagaaaaaggtcgtagctgcattcagtttggttgatagtatcagagcaatatattcttcaaaccaggattactataaaacgagtttgtgcagaagggatgacactgaggtaaaaaatctgtttacctccattgacaatctgcggatcgagttcgaatccgtgccacgtccagtgcttca

SEQ ID NO: 81255 - DNA, 2096 bp, Zea Mays
ggccatttgctccgctcgcgtccccgcctcctgcgcacgagacgctctccgctttttttttatcgacgagtttgagacagaccaaagaggcggaagaagcggggaagccgacgggcaacgaccggggcgtgaggcgatgtcgtggctccgcagcgcggtgcaccgcgccgtggaggcgagcgggggtcacagctccctccttacccgcaccgtccgcacctcccttgacaccgtcgtccaccatgccggccaggctgtcgcgggcggcgccaggctcatcaccgggagccggagttacaagagcgcgaaggtggcagcgaagaggctggaagaggaggcgctctcctgcaaaggggacgaacgggtgcagctgctgcgccggtggctcgtcgcgctcaaggagacccagcgcgcgaccacggcggtccgggagccgcaatttggggacaatccggaccagactgcgcccctgctggatttgtacatcgattacgacagcggtgcggagccgatgaactttttccatgtcttcctctacagtcaagccctcgagtgtgttgttctctccttgattagggaagccccaactgaggaagaagttccactggtctcagaagtttttggaatgtgcctttcgggagggaaggatgtgcacaatgcactcttaagtagtgtaaaggacctggcaaggttattctcaagttatagtgacgaagtgttggcaaaacgtgacgagctgcttcagtttgctcagggtgcgatctcagggctaaagataaatgctgacattgcaagattagataatgaaattactcagttgcaacagcagataaattcaatggatgcgctccatgctacatcaatcgtcaatcagaataaaaaagctcaaacagccactgagggtttcagaaaggcagtttctgaagttcggctttgctctagaatggaagaacttctattgaagaagaaatcaatacaccccggtgattcattggagactcattttgagaaggctacaaaaggaagaatctcttatcttccgggtcaccaaaacaaatgaagttagtggtatagaaaaggtaatttttgtggtactagcttgtcatctgcaaaccaccacagtattttttattagctaaatgatatgtcaatgggttaacaaggatttactttacatccatattgacagaaaatacaacaccccatgatttcccattgaaacaaaaggaagacattcatatccatcattgcaattgcaaaagaaaaaaaatagcaggatgtgcaagctgttccaattgttttttcttttccaattcttagtccatgcaattgtctttatgcttctgcaatctgtctgattgatgattaatcaattaagttttgtaaaaggaattagttgctgagatctctggacttgaggagcaaaggaatcaactcgaggcagaactgaaaaaggtgaatactaaattgaaagttgctacagtgaagcttaaaaaaactagagaggaacgggaccaatttgatgaagcaagcaatcagattgtgttgcacctaaaaacaaaggaagacgaactttcaagatccatagcttcatgcaaagtagaagcaagtactgtcagtgcatggatcaactttttgaaagatacgtggaaattgcagtccttgtttgaagagctaagagaaaaacaggccaacgaagaattggatagatgtggactctgctttgcgaaattgatgaagtatcatgtttctgcatccatggaagagctaagcacttctattgaccgtatcaaaacctttgttgataacttgaaaatatttggtaacagcagatccgtgtcagcagaggatggagctaatggtccgtctaagcaatcaaaccctcgtagatatcttgaggaagaatatctccaaactgagaaaaaggtcgtagctgcattcagtttggttgatagtatcagagcaatatattcttcaaaccaggattactataaaacgagtttgtgcagaagggatgacactgaggtaaaaaatctgtttacctccattgacaatctgcggatcgagttcgaatccgtgccacgtccagtgcttca

SEQ ID NO: 81256 - DNA, 1195 bp, Zea Mays
gttgaagattagataatgaaattactcagttgcaacagcagataaattcaatggatgcgctccatgctacatcaatcgtcaatcagaataaaaaagctcaaacagccactgagggtttcagaaaggcagtttctgaagttcggctttgctctagaatggaagaacttctattgaagaagaaatcaatacaccccggtgattcattggagactcattttgagaaggctacaaaaggaagaatctcttatcttccgggtcaccaaaacaaatgaagttagtggtatagaaaagaaaatacaacaccccatgatttcccattgaaacaaaaggaagacattcatatccatcattgcaattgcaaaagaaaaaaaatagcaggatgtgcaagctgttccaattgttttttcttttccaattcttagtccatgcaattgtctttatgcttctgcaatctgtctgattgatgattaatcaattaagttttgtaaaaggaattagttgctgagatctctggacttgaggagcaaaggaatcaactcgaggcagaactgaaaaaggtgaatactaaattgaaagttgctacagtgaagcttaaaaaaactagagaggaacgggaccaatttgatgaagcaagcaatcagattgtgttgcacctaaaaacaaaggaagacgaactttcaagatccatagcttcatgcaaagtagaagcaagtactgtcagtgcatggatcaactttttgaaagatacgtggaaattgcagtccttgtttgaagagctaagagaaaaacaggccaacgaagaattggatagatgtggactctgctttgcgaaattgatgaagtatcatgtttctgcatccatggaagagctaagcacttctattgaccgtatcaaaacctttgttgataacttgaaaatatttggtaacagatccgtgtcagcagaggatggagctaatggtccgtctaagcaatcaaaccctcgtagatatcttgaggaagaatatctccaaactgagaaaaaggtcgtagctgcattcagtttggttgatagtatcagagcaatatattcttcaaaccaggattactataaaacgagtttgtgcagaagggatgacactgaggtaaaaaatctgtttacctccattgacaatctgcggatcgagttcgaatccgtgccacgtccagtgcttca

SEQ ID NO: 81257 - DNA, 1189 bp, Zea Mays
ggtgtggccaattctttagttgcaggtagataaactgaaggttttgtctgaatcccttgcaaattcatctgcaaaagcagaaaagcgtatcatggaaaataggttatatcttgagcattctttgtgctgtgtatttagtctcaccaatttagcatgtatcagtcataaacatgcttgcatacttatatatcgattaaacacatatgttatgttgttaactcttgcaatacaagttgttgttcaattcagagccactgatttatttggttccaaaacatttgaaatagcattctctgcttaaagtgaattgattgtctatgctttacaatgcaggctacaaaaggaagaatctcttatcttccgggtcaccaaaacaaatgaagttagtggtatagaaaagttgctgagatctctggacttgaggagcaaaggaatcaactcgaggcagaactgaaaaaggtgaatactaaattgaaagttgctacagtgaagcttaaaaaaactagagaggaacgggaccaatttgatgaagcaagcaatcagattgtgttgcacctaaaaacaaaggttaagtttttgtttgttgctttctagtttaagaaatgcgttgtgttagcacagttcacttgcttacttttaattttctgacatatccccaggaagacgaactttcaagatccatagcttcatgcaaagtagaagcaagtactgtcagtgcatggatcaactttttgaaagatacgtggaaattgcagtccttgtttgaagagctaagagaaaaacaggccaacgaagaattggatagatgtggactctgctttgcgaaattgatgaagtatcatgtttctgcatccatggaagagctaagcacttctattgaccgtatcaaaacctttgttgataacttgaaaatatttggtaacagatccgtgtcagcagaggatggagctaatggtccgtctaagcaatcaaaccctcgtagatatcttgaggaagaatatctccaaactgagaaaaaggtcgtagctgcattcagtttggttgatagtatcagagcaatatattcttcaaaccaggattactataaaacgagtttgtgcagaagggatgacactgaggtaaaaaatctgtttacctccattgacaatctgcggatcgagttcgaatccgtgccacgtccagtgcttca

SEQ ID NO: 81258 - DNA, 1850 bp, Zea Mays
cgccggccgaaccgcctccgcagtccgcaccacacgtgccacccccgcgcgcctccctctcctcttcactccgccaccattcttctccccctccggcgagagcgtgcgcccaccccgccatgaagcagctgcaccggcagtccagcattagcaagcagcaccgcccgcaccaccaccgtacctccctctcccgcaccctcgcttcctacctcctccgcgagcagcgcctcctcttcgtcctcctcggcttcctcctagcctcgtccttcttcttcctctacccgcattccgccgccggatcctcctcggccaccaatatcaccgccgccttcgccagaaagaacccccgcagcagcggcgcctcctcctccgcgcgccgcctccccgtcggtgtccggaagccctccctgcgcatcgtcgtcaccggcggcgcgggttttgttggcagccacctcgtcgacaagctcctcgcccgcggggatagcgtcatcgtcgtcgacaacttcttcacgggccgcaaggacaacgtcgcgcaccacctcggcaacccgcgattcgagctcatccgccacgacgtcgtcgaacccattctcctagaggtcgaccagatctaccacctcgcctgccccgcatcccccgtgcactacaagttcaaccccatcaaaaccatcacaaatgtcatggggaccttgaatatgcttggactggctaagagggttggggctcggttcttgttgactagtaccagtgaagtgtatggtgatcctcttgagcatccacagaaggagagctactggggacatgtcaatcccataggtgttaggagctgttatgatgaggggaagagaacagctgaaactcttaccatggattaccaccgcggtgctggtgttgaggtgagaattgcacgcatatttaacacatatggccctcgaatgtgtttagatgatggccgagttgttagcaactttgttgcacaggctttgcggaaacaaccaatgacagtttatggcgatggaaaacagactagaagttttcagtatgtttcagatttggttgatgggttggtaactctaatggaaagcgaccatattggaccattcaacttggggaatcctggagaatttacaatgctggagcttgcacaggtggtaaaagaaacaatcgacccaggtgcatctgtcgagttcaaacccaatactgcggatgatccgcacatgagaaaacctgacatttcgaaggctaaatctcttctcaattgggagccccaagtttcactaaaacaaggcctgccgcgtatggtctcggacttccagaaacgcatcatggatgagaaatgatgaggagcagaggtttgtttcgaaaaggaaatgaggagcagacgccaccagtctcagaacactgtatcctactgacagatctcttttggtgccatgaaggctgaaggccttgacaaaggtcagatgaacgactaattgccaaaaaattcttcctcgctccagggcaatttttttttgtgacaggacatctgttctttggttctggtttcttcgatacataaacttcgccatagaattccatagttgcctttaagcgaacagtgagaggtcaacataaatttagtccctctttctctctttctgatgttattgaaacccatccacgtccattttacgtaggatgataccatattctcatgctacacatgtcctctatttcgtgtctgaatttttaggtgattttattactcttgtacaacaaacaaatagttattttatggttccttaaattgttacttttataatttgtgattttatgatttgtgatttgtttttgtatcctgagttttt

SEQ ID NO: 81259 - DNA, 1633 bp, Zea Mays
cgccggccgaaccgcctccgcagtccgcaccacacgtgccacccccgcgcgcctccctctcctcttcactccgccaccattcttctccccctccggcgagagcgtgcgcccaccccgccatgaagcagctgcaccggcagtccagcattagcaagcagcaccgcccgcaccaccaccgtacctccctctcccgcaccctcgcttcctacctcctccgcgagcagcgcctcctcttcgtcctcctcggcttcctcctagcctcgtccttcttcttcctctacccgcattccgccgccggatcctcctcggccaccaatatcaccgccgccttcgccagaaagaacccccgcagcagcggcgcctcctcctccgcgcgccgcctccccgtcggtgtccggaagccctccctgcgcatcgtcgtcaccggcggcgcgggttttgttggcagccacctcgtcgacaagctcctcgcccgcggggatagcgtcatcgtcgtcgacaacttcttcacgggccgcaaggacaacgtcgcgcaccacctcggcaacccgcgattcgagctcatccgccacgacgtcgtcgaacccattctcctagaggtgttaggagctgttatgatgaggggaagagaacagctgaaactcttaccatggattaccaccgcggtgctggtgttgaggtgagaattgcacgcatatttaacacatatggccctcgaatgtgtttagatgatggccgagttgttagcaactttgttgcacaggctttgcggaaacaaccaatgacagtttatggcgatggaaaacagactagaagttttcagtatgtttcagatttggttgatgggttggtaactctaatggaaagcgaccatattggaccattcaacttggggaatcctggagaatttacaatgctggagcttgcacaggtggtaaaagaaacaatcgacccaggtgcatctgtcgagttcaaacccaatactgcggatgatccgcacatgagaaaacctgacatttcgaaggctaaatctcttctcaattgggagccccaagtttcactaaaacaaggcctgccgcgtatggtctcggacttccagaaacgcatcatggatgagaaatgatgaggagcagaggtttgtttcgaaaaggaaatgaggagcagacgccaccagtctcagaacactgtatcctactgacagatctcttttggtgccatgaaggctgaaggccttgacaaaggtcagatgaacgactaattgccaaaaaattcttcctcgctccagggcaatttttttttgtgacaggacatctgttctttggttctggtttcttcgatacataaacttcgccatagaattccatagttgcctttaagcgaacagtgagaggtcaacataaatttagtccctctttctctctttctgatgttattgaaacccatccacgtccattttacgtaggatgataccatattctcatgctacacatgtcctctatttcgtgtctgaatttttaggtgattttattactcttgtacaacaaacaaatagttattttatggttccttaaattgttacttttataatttgtgattttatgatttgtgatttgtttttgtatcctgagttttt

SEQ ID NO: 81260 - DNA, 1801 bp, Zea Mays
cttggattggtcacaatattttgtaacatcttttactggctatcctcctccatgtgcacgtaccgccaaccatctcgttctccggtcttttgtcatgcatcttttaattatatatcgcaggaaattaaagtggttccctatatttagggttataaagataaaacttccgtatacaactctgcctgtattttttttaagatttgcaacacgaggcaaacggaagtacaaatagtctgaactagaaacaaagaggaagacagcgcccgacccaggagccagaaggctaaccagcatcgtacagaataccatttcgttcgcactagttagtaaagtttatttattccgagataggctaaactaatagagctacagcctccgaaggactcgatcgattagcaaatagaagaatacagtgtctcactaccgaatctctgactctgacccaagagaacttgtatagtaaggaactgcaggtgcagcaaactcgtccaccttcatttactagtgctaataaaaaggatctccactaattcagtatgcgcttgattggtttactacgaccgcacgaccagtcccacgcgagctggccagtcgtaaatgggctcagaatgacgtattttgtatacactcatgtagccaccgtttctcgtgtatagacaatcagacagacgttcggtcatagtcaacgcaacggtaccgccttgataagtacaccaagctcaatttctggtttacattactgtcagaaaaggacgagctttttcaactgctgtgtacttttagcgacgatgagcccatacggtagagaagtagggggcaaattgtgtatacacatacatacgccacgccagcaacggctacttgcgtacagttctgcgctgcgcatgatgagatggctttccctgctttaccctgtacacataacgccacagcccgcgccgtacaggtgactactgctctgcttgcttacagagaatcacattacaagcctccctccctccctaccgcttattcctccctaatcaaacacagtaagtaataataaatcctaaaataactaagcacacgtaatacacatcacgggctaatttaaagcgagctaagccagcagagagacacgatcgagtcccgtgctactaggactaggaggtactcccgcttctcttctccgagatccactgcctgtacttgtcgaagaactccttgttctccttctccagctccttccacactgcaggaaacatgcatgtattaagtctaccagatcgaacgactgtttcagacggagattcctagctcgtctctgctaatgaatgacctgtggaggtgaccacgggttggacgtcggcgcgcttcgccagcgcctccatgcactcctccatgctcatcccgaacgtcatgcacctctctatcaggtgctgcacctgcatcatgccgtgtggatataagaggcgggatcagagtcgtctccggctccgggagccatggatccttctgggtttttttttggctccggatccggcagtgccctgttgacctctctctctctctccttgtctacttcctcccggagcagtttctctacagctataggctatggcgattagcgagcgctgcccgcaatctgactccgtgcgttgtgctgtgtctgtgtggcgataaggcgtgcagagtcgacagaggaggatcctatatatacatgcgccacggatgaggacaccgcctgccgcccggcgcctcgctgggagaggtccacggctcgtcgcggcgacgcccgctcgccgccggggcttcctctgct

SEQ ID NO: 81261 - DNA, 4899 bp, Zea Mays
tttcggtctttcctacccgcacaccagaagcgaaggaaagcccacaactgactgaggcgcacaccatccccaccgccggcgcccgccccgcctcttcgccggcgacgagccgccgccgaggagctcagcgtggaggggcttcctcgcgtgtgggagaagctgccgttttttttcctgagcgggtcgtcgttgccgtgtgccgccgagattagagtttttcaaagggtgtctccttcgcggcactggcctcctcgagttagtttatttggagacagctcgaggctcgcttcggaagcgacccggtcgccgccgccgccgccgccatcggccgtctctccccgtagtcgccgtctcggggctggctgtggtgatgagctccgtcggatcctagggtttttgaattctgagtttctgacggcttcgtcgagctgcgcaaggcgtcaagaaggagatggtgccgggtgggttgttcgggtgggcgtcgccccatgtacagccgctcacacccgtatcggaggtctccgagccgccggagtcgccctcgccgtacggggacgggccggcgggggatgccggcgtgggggcaagggagggggaaggcgctggcgccggagaggaggaggtggaggacgacgaggtcgagccgccgcccgcggcggtgtccttctggaggcttttcgagttcgccgatggggtcgactgggcccttatggctgctggggcgcttgctgctgctgcgcatggcgcggcgctcgttgtgtaccttcactatttcgggagggccctgaatttgctcgactctgagcgggttgggtcgtctctctatggacgcagcgatgagctgctcagccggtttaaggagcatgccttgtatattgtctttatagctgctggtgttttcgtcgcaggatggatagaggtatcatgctggattctcactggggaacgccagactgctgtcatcagatcaaaatacgttcatgttttgctaaatcaagacatgagtttttttgatacatatggtaacaacggagatattgttagtcaagtgctcagtgatgtattgctcattcagtcagctataagcgagaaagtggggaactacatacataatatggctacatttgttggtggtctcattgttggccttctgaattgttggcaaatagcacttctaactcttgccactggacccttgattgttgcagctggaggaatatctaacatattccttcatagactggctgaaaacattcaagatgcatattccgaagcggctagtattggtgaacagtggtttgaatcaagcagctacaaacttctattcattcgaccaagggcgcattgctgcttatagactatatgagatgattagtcgttcaacttccagcaccaatcaagaagggacaaccttaccccaggtgcaagggaatattgagtttcgaaatgtgtactttagctacctgtctcgtcctgaaatcccaatattaagtggtttcttcctcactgtaccggcgagaaaaactgtggcacttgttggtagaaatggctcggggaaaagcagtataattcctctgatggagagattctatgacccaacattaggtgaagttcttttggatggggaaaacataaaaaatttgaaagtagaatggttaagaagccaaattggtctggtgacacaagaaccagccttattgagtttgagcattcgggaaaatattgcttatggaagatctgctacctttgatcagatagaagaggcagcaaaaacagcccatgcccatgggttcatcagttcacttgaaaaggggtacgaaacccaggttggtcgagctggtctagcactcactgatgaacagaaaatcaaaatttctattgctcgtgctgtgctttcgaatccatccattcttttgcttgatgaggtcaccggaggacttgattttgaagctgagaaggctgtacaagaagcattagatgttctgatgttgggaaggtcaaccattataattgctagacgtctttgcctcattaaaaatgctgattatatagctgtaatggaggagggccatcttgttgaaatggggacacatgatgaacttctaaacttggatggcctttatgctgaacttttaaggtgtgaggaagcaacaaaacttcccaaaaggatgcctaccaagaacagcagggaacataagtcgctccaatctgaggatgcattggtgagccaatactttcaagaatcctcctctcctaagatggcaaaatcaccatcactacaaaggacacatggtatgcttcaattttggcgatcagatgccaacagaaactctcatgattcaccaaaggatctaagtccaccttctgaacaaactatggacaatggaatacctatggttgcaattgaaactgaaaggacaccgtccattaagagacagaatagttttgaaatgaaattacctgatcttcctaaagttgatgtacatcctatacagcggcagtcatctaagaattcagaacctgactcacccatatctcctcttttgacttctgatcctaagaacgagcggtcacattcacaaacttttagcagaccgcagagtgaacaagatgatacgagttctgaacgtagtgaactggatgaggttcagcaccagaaacctccatctttttggcgtcttgcaacacttagtatcgctgaatggccttatgctcttttaggtacaattggtgctgctatatttggctcatttaatccactgcttgcttacacaatagcacttatagtgtcagcatactatcagatagaaatccgtgatatgcgccatgaagtgaacagatggtgtttattcatagtgggcatgggtgttattacagtgctagtcaactggctgcaacatttctattttggaataatgggggagaaaatgactgagcgcataagaaggatgatgttctcagcaatgctacgcaatgaagttggatggtttgacaaagatgaaaacaatgctgatacactgtccatgcgcctcgcaaatgatgctacatttgtccgtgctgcgttcagtaaccggctttccatatttatacaagatactgctgcagtatctgtggctctccttattggaatgttgttgggatggcgggtggcacttgttgcacttgcaactttgccagtccttgtcatatctgctattgcacagaaattgtggcttgctggtttctcaaaaggaatccaggaaatgcatagaaaggcttcgttagtacttgaagatgcagtccggaacatatacactgtagtagcattctgtgctggcgataagatcatggaactctacagactacatcttgggaagatactaaaacaaagtcttgtgcaaggattggctataggctttggttttggtctctcccagttcctcctttttgcctgcaatgccttgcttctttggtacactgcaatttcagttgaccgacaacgtctgacaatagccacaggactaaaagagtacattctgttttcgtttgcatcattcgcgttggtggagccatttggactggcaccttacattcttaaaaggagaaaatctcttacgtcagtctttgaaattattgaccgggagccaaaaattgatcctgatgataccaccggcttgaaaccacccaatgtctacggaagcattgaattcaagagtgttgatttttcttatcctgttcgccctgacattcttgtcttgagtaattttaatcttaaagtgagtggtgggcaaacacttgcggtggttggggtctcaggatcagggaaaagcaccattatttctttgattgagagattctatgaccctgtttctggccaagttctgctggatggtcgagatctgaaatcatttaaccttagatggttgcgtagccacatgggcctgattcagcaagatccagttattttctcaacgacgataagagaaaacattatttacgcaaggcacatcgcaacagaggctgagataaaggaagctgcaaggatagcaaatgctcaccatttcatcagcagcttgccacatggatatgacacccatgtgggaatgagaggggtcgatctaacacctgggcaaaagcaacggattgccattgctagggtggttttgaagaatgcacctatactgttgttggatgaggccagctctgcaatcgagtctgaatcaagtagagtggtacaagaagctctcgacactctggttatgggtaacaagacaacgattctcattgcgcacagggcagcaatgatgaagcatgtggataacattgttgtcctaaatggtggtaggatagttgagcagggcacacatgactctctgatggatcagaacggtctatatgttaggttgatgcaaccccattttggcaagggccttcgccagcatcggctagtgtaattattattgagcttgttaggtgtaaattatcctagggcatgatcaggtttacttccgctcttggtgcagccactcagggcccgttttggcacatgaaaaatgctgggaagttgccgccttgctggtgttgttctgagtaagcggaatgcagacctgatcttgacaaaaaaaacctagcttggagattcaggtaagtaactgttggaactgtagggcacaactcattctggaaatagttagcaagtttggatggcattgtaattgttgtaatatgagttgaaacattctttcagaggctcgtgcttgtgatctctcgcatctgtaatgttagtgttttgatcatttaatgtgtgtatattgttcgattcttggtcggtccgagtcttgtagccgtgatgaaaagctttttacatggaaattctgagcttggcgttattttcgtccacgagaccattcagactacgag

SEQ ID NO: 81262 - DNA, 5232 bp, Zea Mays
tttcggtctttcctacccgcacaccagaagcgaaggaaagcccacaactgactgaggcgcacaccatccccaccgccggcgcccgccccgcctcttcgccggcgacgagccgccgccgaggagctcagcgtggaggggcttcctcgcgtgtgggagaagctgccgttttttttcctgagcgggtcgtcgttgccgtgtgccgccgagattagagtttttcaaagggtgtctccttcgcggcactggcctcctcgagttagtttatttggagacagctcgaggctcgcttcggaagcgacccggtcgccgccgccgccgccgccatcggccgtctctccccgtagtcgccgtctcggggctggctgtggtgatgagctccgtcggatcctagggtttttgaattctgagtttctgacggcttcgtcgagctgcgcaaggcgtcaagaaggagatggtgccgggtgggttgttcgggtgggcgtcgccccatgtacagccgctcacacccgtatcggaggtctccgagccgccggagtcgccctcgccgtacggggacgggccggcgggggatgccggcgtgggggcaagggagggggaaggcgctggcgccggagaggaggaggtggaggacgacgaggtcgagccgccgcccgcggcggtgtccttctggaggcttttcgagttcgccgatggggtcgactgggcccttatggctgctggggcgcttgctgctgctgcgcatggcgcggcgctcgttgtgtaccttcactatttcgggagggccctgaatttgctcgactctgagcgggttgggtcgtctctctatggacgcagcgatgagctgctcagccggtttaaggagcatgccttgtatattgtctttatagctgctggtgttttcgtcgcaggatggatagaggtatcatgctggattctcactggggaacgccagactgctgtcatcagatcaaaatacgttcatgttttgctaaatcaagacatgagtttttttgatacatatggtaacaacggagatattgttagtcaagtgctcagtgatgtattgctcattcagtcagctataagcgagaaagtggggaactacatacataatatggctacatttgttggtggtctcattgttggccttctgaattgttggcaaatagcacttctaactcttgccactggacccttgattgttgcagctggaggaatatctaacatattccttcatagactggctgaaaacattcaagatgcatattccgaagcggctagtattggtgaacaggtgctacctttattcactgtgcctatctttcttttgaaacttttaagtatacaacaacctaagccgctatctgatacaatgtcatggctgccgtatctccaatctcaagagtgctgtatcagagggcactattctgcactgatgactttgtagattatactatcattctggtttgatgtgcgattaataagtaaaaatatgcctggttctaatgtgacatgtgcatgtacaggccatctcatacatccggacactgtatgcttttacaaatgaaactcttgcaaagtactcctatgctacctcacttcaagccacacttagatatggaattttgattagccttgtccaaggaattggtcttggctttacatatggactcgccatttgctcttgtgctttgcaactttgggttggaagacatctgatccatcgtggaaaagctgatggtggtgaagttgtggtagctttattctctgtaattctgagcggccttggtttgaatcaagcagctacaaacttctattcattcgaccaagggcgcattgctgcttatagactatatgagatgattagtcgttcaacttccagcaccaatcaagaagggacaaccttaccccaggtgcaagggaatattgagtttcgaaatgtgtactttagctacctgtctcgtcctgaaatcccaatattaagtggtttcttcctcactgtaccggcgagaaaaactgtggcacttgttggtagaaatggctcggggaaaagcagtataattcctctgatggagagattctatgacccaacattaggtgaagttcttttggatggggaaaacataaaaaatttgaaagtagaatggttaagaagccaaattggtctggtgacacaagaaccagccttattgagtttgagcattcgggaaaatattgcttatggaagatctgctacctttgatcagatagaagaggcagcaaaaacagcccatgcccatgggttcatcagttcacttgaaaaggggtacgaaacccaggttggtcgagctggtctagcactcactgatgaacagaaaatcaaaatttctattgctcgtgctgtgctttcgaatccatccattcttttgcttgatgaggtcaccggaggacttgattttgaagctgagaaggctgtacaagaagcattagatgttctgatgttgggaaggtcaaccattataattgctagacgtctttgcctcattaaaaatgctgattatatagctgtaatggaggagggccatcttgttgaaatggggacacatgatgaacttctaaacttggatggcctttatgctgaacttttaaggtgtgaggaagcaacaaaacttcccaaaaggatgcctaccaagaacagcagggaacataagtcgctccaatctgaggatgcattggtgagccaatactttcaagaatcctcctctcctaagatggcaaaatcaccatcactacaaaggacacatggtatgcttcaattttggcgatcagatgccaacagaaactctcatgattcaccaaaggatctaagtccaccttctgaacaaactatggacaatggaatacctatggttgcaattgaaactgaaaggacaccgtccattaagagacagaatagttttgaaatgaaattacctgatcttcctaaagttgatgtacatcctatacagcggcagtcatctaagaattcagaacctgactcacccatatctcctcttttgacttctgatcctaagaacgagcggtcacattcacaaacttttagcagaccgcagagtgaacaagatgatacgagttctgaacgtagtgaactggatgagatagaaatccgtgatatgcgccatgaagtgaacagatggtgtttattcatagtgggcatgggtgttattacagtgctagtcaactggctgcaacatttctattttggaataatgggggagaaaatgactgagcgcataagaaggatgatgttctcagcaatgctacgcaatgaagttggatggtttgacaaagatgaaaacaatgctgatacactgtccatgcgcctcgcaaatgatgctacatttgtccgtgctgcgttcagtaaccggctttccatatttatacaagatactgctgcagtatctgtggctctccttattggaatgttgttgggatggcgggtggcacttgttgcacttgcaactttgccagtccttgtcatatctgctattgcacagaaattgtggcttgctggtttctcaaaaggaatccaggaaatgcatagaaaggcttcgttagtacttgaagatgcagtccggaacatatacactgtagtagcattctgtgctggcgataagatcatggaactctacagactacatcttgggaagatactaaaacaaagtcttgtgcaaggattggctataggctttggttttggtctctcccagttcctcctttttgcctgcaatgccttgcttctttggtacactgcaatttcagttgaccgacaacgtctgacaatagccacaggactaaaagagtacattctgttttcgtttgcatcattcgcgttggtggagccatttggactggcaccttacattcttaaaaggagaaaatctcttacgtcagtctttgaaattattgaccgggagccaaaaattgatcctgatgataccaccggcttgaaaccacccaatgtctacggaagcattgaattcaagagtgttgatttttcttatcctgttcgccctgacattcttgtcttgagtaattttaatcttaaagtgagtggtgggcaaacacttgcggtggttggggtctcaggatcagggaaaagcaccattatttctttgattgagagattctatgaccctgtttctggccaagttctgctggatggtcgagatctgaaatcatttaaccttagatggttgcgtagccacatgggcctgattcagcaagatccagttattttctcaacgacgataagagaaaacattatttacgcaaggcacatcgcaacagaggctgagataaaggaagctgcaaggatagcaaatgctcaccatttcatcagcagcttgccacatggatatgacacccatgtgggaatgagaggggtcgatctaacacctgggcaaaagcaacggattgccattgctagggtggttttgaagaatgcacctatactgttgttggatgaggccagctctgcaatcgagtctgaatcaagtagagtggtacaagaagctctcgacactctggttatgggtaacaagacaacgattctcattgcgcacagggcagcaatgatgaagcatgtggataacattgttgtcctaaatggtggtaggatagttgagcagggcacacatgactctctgatggatcagaacggtctatatgttaggttgatgcaaccccattttggcaagggccttcgccagcatcggctagtgtaattattattgagcttgttaggtgtaaattatcctagggcatgatcaggtttacttccgctcttggtgcagccactcagggcccgttttggcacatgaaaaatgctgggaagttgccgccttgctggtgttgttctgagtaagcggaatgcagacctgatcttgacaaaaaaaacctagcttggagattcaggtaagtaactgttggaactgtagggcacaactcattctggaaatagttagcaagtttggatggcattgtaattgttgtaatatgagttgaaacattctttcagaggctcgtgcttgtgatctctcgcatctgtaatgttagtgttttgatcatttaatgtgtgtatattgttcgattcttggtcggtccgagtcttgtagccgtgatgaaaagctttttacatggaaattctgagcttggcgttattttcgtccacgagaccattcagactacgag

SEQ ID NO: 81263 - DNA, 5000 bp, Zea Mays
tttcggtctttcctacccgcacaccagaagcgaaggaaagcccacaactgactgaggcgcacaccatccccaccgccggcgcccgccccgcctcttcgccggcgacgagccgccgccgaggagctcagcgtggaggggcttcctcgcgtgtgggagaagctgccgttttttttcctgagcgggtcgtcgttgccgtgtgccgccgagattagagtttttcaaagggtgtctccttcgcggcactggcctcctcgagttagtttatttggagacagctcgaggctcgcttcggaagcgacccggtcgccgccgccgccgccgccatcggccgtctctccccgtagtcgccgtctcggggctggctgtggtgatgagctccgtcggatcctagggtttttgaattctgagtttctgacggcttcgtcgagctgcgcaaggcgtcaagaaggagatggtgccgggtgggttgttcgggtgggcgtcgccccatgtacagccgctcacacccgtatcggaggtctccgagccgccggagtcgccctcgccgtacggggacgggccggcgggggatgccggcgtgggggcaagggagggggaaggcgctggcgccggagaggaggaggtggaggacgacgaggtcgagccgccgcccgcggcggtgtccttctggaggcttttcgagttcgccgatggggtcgactgggcccttatggctgctggggcgcttgctgctgctgcgcatggcgcggcgctcgttgtgtaccttcactatttcgggagggccctgaatttgctcgactctgagcgggttgggtcgtctctctatggacgcagcgatgagctgctcagccggtttaaggagcatgccttgtatattgtctttatagctgctggtgttttcgtcgcaggatggatagaggtatcatgctggattctcactggggaacgccagactgctgtcatcagatcaaaatacgttcatgttttgctaaatcaagacatgagtttttttgatacatatggtaacaacggagatattgttagtcaagtgctcagtgatgtattgctcattcagtcagctataagcgagaaagtggggaactacatacataatatggctacatttgttggtggtctcattgttggccttctgaattgttggcaaatagcacttctaactcttgccactggacccttgattgttgcagctggaggaatatctaacatattccttcatagactggctgaaaacattcaagatgcatattccgaagcggctagtattggtgaacaggccatctcatacatccggacactgtatgcttttacaaatgaaactcttgcaaagtactcctatgctacctcacttcaagccacacttagatatggaattttgattagccttgtccaaggaattggtcttggctttacatatggactcgccatttgctcttgtgctttgcaactttgggttggaagacatctgatccatcgtggaaaagctgatggtggtgaagttgtggtagctttattctctgtaattctgagcggccttggtttgaatcaagcagctacaaacttctattcattcgaccaagggcgcattgctgcttatagactatatgagatgattagtcgttcaacttccagcaccaatcaagaagggacaaccttaccccaggtgcaagggaatattgagtttcgaaatgtgtactttagctacctgtctcgtcctgaaatcccaatattaagtggtttcttcctcactgtaccggcgagaaaaactgtggcacttgttggtagaaatggctcggggaaaagcagtataattcctctgatggagagattctatgacccaacattaggtgaagttcttttggatggggaaaacataaaaaatttgaaagtagaatggttaagaagccaaattggtctggtgacacaagaaccagccttattgagtttgagcattcgggaaaatattgcttatggaagatctgctacctttgatcagatagaagaggcagcaaaaacagcccatgcccatgggttcatcagttcacttgaaaaggggtacgaaacccaggttggtcgagctggtctagcactcactgatgaacagaaaatcaaaatttctattgctcgtgctgtgctttcgaatccatccattcttttgcttgatgaggtcaccggaggacttgattttgaagctgagaaggctgtacaagaagcattagatgttctgatgttgggaaggtcaaccattataattgctagacgtctttgcctcattaaaaatgctgattatatagctgtaatggaggagggccatcttgttgaaatggggacacatgatgaacttctaaacttggatggcctttatgctgaacttttaaggtgtgaggaagcaacaaaacttcccaaaaggatgcctaccaagaacagcagggaacataagtcgctccaatctgaggatgcattggtgagccaatactttcaagaatcctcctctcctaagatggcaaaatcaccatcactacaaaggacacatggtatgcttcaattttggcgatcagatgccaacagaaactctcatgattcaccaaaggatctaagtccaccttctgaacaaactatggacaatggaatacctatggttgcaattgaaactgaaaggacaccgtccattaagagacagaatagttttgaaatgaaattacctgatcttcctaaagttgatgtacatcctatacagcggcagtcatctaagaattcagaacctgactcacccatatctcctcttttgacttctgatcctaagaacgagcggtcacattcacaaacttttagcagaccgcagagtgaacaagatgatacgagttctgaacgtagtgaactggatgagatagaaatccgtgatatgcgccatgaagtgaacagatggtgtttattcatagtgggcatgggtgttattacagtgctagtcaactggctgcaacatttctattttggaataatgggggagaaaatgactgagcgcataagaaggatgatgttctcagcaatgctacgcaatgaagttggatggtttgacaaagatgaaaacaatgctgatacactgtccatgcgcctcgcaaatgatgctacatttgtccgtgctgcgttcagtaaccggctttccatatttatacaagatactgctgcagtatctgtggctctccttattggaatgttgttgggatggcgggtggcacttgttgcacttgcaactttgccagtccttgtcatatctgctattgcacagaaattgtggcttgctggtttctcaaaaggaatccaggaaatgcatagaaaggcttcgttagtacttgaagatgcagtccggaacatatacactgtagtagcattctgtgctggcgataagatcatggaactctacagactacatcttgggaagatactaaaacaaagtcttgtgcaaggattggctataggctttggttttggtctctcccagttcctcctttttgcctgcaatgccttgcttctttggtacactgcaatttcagttgaccgacaacgtctgacaatagccacaggactaaaagagtacattctgttttcgtttgcatcattcgcgttggtggagccatttggactggcaccttacattcttaaaaggagaaaatctcttacgtcagtctttgaaattattgaccgggagccaaaaattgatcctgatgataccaccggcttgaaaccacccaatgtctacggaagcattgaattcaagagtgttgatttttcttatcctgttcgccctgacattcttgtcttgagtaattttaatcttaaagtgagtggtgggcaaacacttgcggtggttggggtctcaggatcagggaaaagcaccattatttctttgattgagagattctatgaccctgtttctggccaagttctgctggatggtcgagatctgaaatcatttaaccttagatggttgcgtagccacatgggcctgattcagcaagatccagttattttctcaacgacgataagagaaaacattatttacgcaaggcacatcgcaacagaggctgagataaaggaagctgcaaggatagcaaatgctcaccatttcatcagcagcttgccacatggatatgacacccatgtgggaatgagaggggtcgatctaacacctgggcaaaagcaacggattgccattgctagggtggttttgaagaatgcacctatactgttgttggatgaggccagctctgcaatcgagtctgaatcaagtagagtggtacaagaagctctcgacactctggttatgggtaacaagacaacgattctcattgcgcacagggcagcaatgatgaagcatgtggataacattgttgtcctaaatggtggtaggatagttgagcagggcacacatgactctctgatggatcagaacggtctatatgttaggttgatgcaaccccattttggcaagggccttcgccagcatcggctagtgtaattattattgagcttgttaggtgtaaattatcctagggcatgatcaggtttacttccgctcttggtgcagccactcagggcccgttttggcacatgaaaaatgctgggaagttgccgccttgctggtgttgttctgagtaagcggaatgcagacctgatcttgacaaaaaaaacctagcttggagattcaggtaagtaactgttggaactgtagggcacaactcattctggaaatagttagcaagtttggatggcattgtaattgttgtaatatgagttgaaacattctttcagaggctcgtgcttgtgatctctcgcatctgtaatgttagtgttttgatcatttaatgtgtgtatattgttcgattcttggtcggtccgagtcttgtagccgtgatgaaaagctttttacatggaaattctgagcttggcgttattttcgtccacgagaccattcagactacgag

SEQ ID NO: 81264 - DNA, 4363 bp, Zea Mays
ggcaacttcatctgtgacaagaggggctgaaaaaaacaggacttatgggtctcatctcctcaggggcatgccttgtatattgtctttatagctgctggtgttttcgtcgcaggatggatagaggtatcatgctggattctcactggggaacgccagactgctgtcatcagatcaaaatacgttcatgttttgctaaatcaagacatgagtttttttgatacatatggtaacaacggagatattgttagtcaagtgctcagtgatgtattgctcattcagtcagctataagcgagaaagtggggaactacatacataatatggctacatttgttggtggtctcattgttggccttctgaattgttggcaaatagcacttctaactcttgccactggacccttgattgttgcagctggaggaatatctaacatattccttcatagactggctgaaaacattcaagatgcatattccgaagcggctagtattggtgaacaggccatctcatacatccggacactgtatgcttttacaaatgaaactcttgcaaagtactcctatgctacctcacttcaagccacacttagatatggaattttgattagccttgtccaaggaattggtcttggctttacatatggactcgccatttgctcttgtgctttgcaactttgggttggaagacatctgatccatcgtggaaaagctgatggtggtgaagttgtggtagctttattctctgtaattctgagcggccttggtttgaatcaagcagctacaaacttctattcattcgaccaagggcgcattgctgcttatagactatatgagatgattagtcgttcaacttccagcaccaatcaagaagggacaaccttaccccaggtgcaagggaatattgagtttcgaaatgtgtactttagctacctgtctcgtcctgaaatcccaatattaagtggtttcttcctcactgtaccggcgagaaaaactgtggcacttgttggtagaaatggctcggggaaaagcagtataattcctctgatggagagattctatgacccaacattaggtgaagttcttttggatggggaaaacataaaaaatttgaaagtagaatggttaagaagccaaattggtctggtgacacaagaaccagccttattgagtttgagcattcgggaaaatattgcttatggaagatctgctacctttgatcagatagaagaggcagcaaaaacagcccatgcccatgggttcatcagttcacttgaaaaggggtacgaaacccaggttggtcgagctggtctagcactcactgatgaacagaaaatcaaaatttctattgctcgtgctgtgctttcgaatccatccattcttttgcttgatgaggtcaccggaggacttgattttgaagctgagaaggctgtacaagaagcattagatgttctgatgttgggaaggtcaaccattataattgctagacgtctttgcctcattaaaaatgctgattatatagctgtaatggaggagggccatcttgttgaaatggggacacatgatgaacttctaaacttggatggcctttatgctgaacttttaaggtgtgaggaagcaacaaaacttcccaaaaggatgcctaccaagaacagcagggaacataagtcgctccaatctgaggatgcattggtgagccaatactttcaagaatcctcctctcctaagatggcaaaatcaccatcactacaaaggacacatggtatgcttcaattttggcgatcagatgccaacagaaactctcatgattcaccaaaggatctaagtccaccttctgaacaaactatggacaatggaatacctatggttgcaattgaaactgaaaggacaccgtccattaagagacagaatagttttgaaatgaaattacctgatcttcctaaagttgatgtacatcctatacagcggcagtcatctaagaattcagaacctgactcacccatatctcctcttttgacttctgatcctaagaacgagcggtcacattcacaaacttttagcagaccgcagagtgaacaagatgatacgagttctgaacgtagtgaactggatgaggttcagcaccagaaacctccatctttttggcgtcttgcaacacttagtatcgctgaatggccttatgctcttttaggtacaattggtgctgctatatttggctcatttaatccactgcttgcttacacaatagcacttatagtgtcagcatactatcagatagaaatccgtgatatgcgccatgaagtgaacagatggtgtttattcatagtgggcatgggtgttattacagtgctagtcaactggctgcaacatttctattttggaataatgggggagaaaatgactgagcgcataagaaggatgatgttctcagcaatgctacgcaatgaagttggatggtttgacaaagatgaaaacaatgctgatacactgtccatgcgcctcgcaaatgatgctacatttgtccgtgctgcgttcagtaaccggctttccatatttatacaagatactgctgcagtatctgtggctctccttattggaatgttgttgggatggcgggtggcacttgttgcacttgcaactttgccagtccttgtcatatctgctattgcacagaaattgtggcttgctggtttctcaaaaggaatccaggaaatgcatagaaaggcttcgttagtacttgaagatgcagtccggaacatatacactgtagtagcattctgtgctggcgataagatcatggaactctacagactacatcttgggaagatactaaaacaaagtcttgtgcaaggattggctataggctttggttttggtctctcccagttcctcctttttgcctgcaatgccttgcttctttggtacactgcaatttcagttgaccgacaacgtctgacaatagccacaggactaaaagagtacattctgttttcgtttgcatcattcgcgttggtggagccatttggactggcaccttacattcttaaaaggagaaaatctcttacgtcagtctttgaaattattgaccgggagccaaaaattgatcctgatgataccaccggcttgaaaccacccaatgtctacggaagcattgaattcaagagtgttgatttttcttatcctgttcgccctgacattcttgtcttgagtaattttaatcttaaagtgagtggtgggcaaacacttgcggtggttggggtctcaggatcagggaaaagcaccattatttctttgattgagagattctatgaccctgtttctggccaagttctgctggatggtcgagatctgaaatcatttaaccttagatggttgcgtagccacatgggcctgattcagcaagatccagttattttctcaacgacgataagagaaaacattatttacgcaaggcacatcgcaacagaggctgagataaaggaagctgcaaggatagcaaatgctcaccatttcatcagcagcttgccacatggatatgacacccatgtgggaatgagaggggtcgatctaacacctgggcaaaagcaacggattgccattgctagggtggttttgaagaatgcacctatactgttgttggatgaggccagctctgcaatcgagtctgaatcaagtagagtggtacaagaagctctcgacactctggttatgggtaacaagacaacgattctcattgcgcacagggcagcaatgatgaagcatgtggataacattgttgtcctaaatggtggtaggatagttgagcagggcacacatgactctctgatggatcagaacggtctatatgttaggttgatgcaaccccattttggcaagggccttcgccagcatcggctagtgtaattattattgagcttgttaggtgtaaattatcctagggcatgatcaggtttacttccgctcttggtgcagccactcagggcccgttttggcacatgaaaaatgctgggaagttgccgccttgctggtgttgttctgagtaagcggaatgcagacctgatcttgacaaaaaaaacctagcttggagattcaggtaagtaactgttggaactgtagggcacaactcattctggaaatagttagcaagtttggatggcattgtaattgttgtaatatgagttgaaacattctttcagaggctcgtgcttgtgatctctcgcatctgtaatgttagtgttttgatcatttaatgtgtgtatattgttcgattcttggtcggtccgagtcttgtagccgtgatgaaaagctttttacatggaaattctgagcttggcgttattttcgtccacgagaccattcagactacgag

SEQ ID NO: 81265 - DNA, 1737 bp, Zea Mays
agtgtactgaagacatcaaactctagaatattacttttcataaattgtggcttgctggtttctcaaaaggaatccaggaaatgcatagaaaggcttcgttagtacttgaagatgcagtccggaacatatacactgtagtagcattctgtgctggcgataagatcatggaactctacagactacatcttgggaagatactaaaacaaagtcttgtgcaaggattggctataggctttggttttggtctctcccagttcctcctttttgcctgcaatgccttgcttctttggtacactgcaatttcagttgaccgacaacgtctgacaatagccacaggactaaaagagtacattctgttttcgtttgcatcattcgcgttggtggagccatttggactggcaccttacattcttaaaaggagaaaatctcttacgtcagtctttgaaattattgaccgggagccaaaaattgatcctgatgataccaccggcttgaaaccacccaatgtctacggaagcattgaattcaagagtgttgatttttcttatcctgttcgccctgacattcttgtcttgagtaattttaatcttaaagtgagtggtgggcaaacacttgcggtggttggggtctcaggatcagggaaaagcaccattatttctttgattgagagattctatgaccctgtttctggccaagttctgctggatggtcgagatctgaaatcatttaaccttagatggttgcgtagccacatgggcctgattcagcaagatccagttattttctcaacgacgataagagaaaacattatttacgcaaggcacatcgcaacagaggctgagataaaggaagctgcaaggatagcaaatgctcaccatttcatcagcagcttgccacatggatatgacacccatgtgggaatgagaggggtcgatctaacacctgggcaaaagcaacggattgccattgctagggtggttttgaagaatgcacctatactgttgttggatgaggccagctctgcaatcgagtctgaatcaagtagagtggtacaagaagctctcgacactctggttatgggtaacaagacaacgattctcattgcgcacagggcagcaatgatgaagcatgtggataacattgttgtcctaaatggtggtaggatagttgagcagggcacacatgactctctgatggatcagaacggtctatatgttaggttgatgcaaccccattttggcaagggccttcgccagcatcggctagtgtaattattattgagcttgttaggtgtaaattatcctagggcatgatcaggtttacttccgctcttggtgcagccactcagggcccgttttggcacatgaaaaatgctgggaagttgccgccttgctggtgttgttctgagtaagcggaatgcagacctgatcttgacaaaaaaaacctagcttggagattcaggtaagtaactgttggaactgtagggcacaactcattctggaaatagttagcaagtttggatggcattgtaattgttgtaatatgagttgaaacattctttcagaggctcgtgcttgtgatctctcgcatctgtaatgttagtgttttgatcatttaatgtgtgtatattgttcgattcttggtcggtccgagtcttgtagccgtgatgaaaagctttttacatggaaattctgagcttggcgttattttcgtccacgagaccattcagactacgag

SEQ ID NO: 81266 - DNA, 1021 bp, Zea Mays
cgtttggatagatagctggtcgcccgcccgcctcccttcttcccaccacacctccagtcctccactgacaagccgccgccgctcttccacctacctctccccggcctcgcacccatggccacggctttgatggttgcagccaccacctcctgctccccgggccgcgccgcgccgcgcctgaagccggtggcctcctcctcctccagcagcagcagcagctcggcgcggccgcggcggcccttggcgcagcagctcccgcggctgctggcaacggcggcggcggcggcggcggtggcagctgcgccgcactgtttgacttcaacctgacgctcccggcgatcgcgaccgagttcctgctgctcatggtggcgctggacaagctctacttcacgccgctaggcaagttcatggatgagcgggacgccaagatccgcggtgagctcggcgatgtcaagggcgcctccgaggaggtgaagcagctggaggaccaggcggcggccatcatgaaggcggcgcgcgccgagatcgcggcggcgcttaacaagatgaagaaggagaccaccgcggagctggaggccaagctggacgaggggcgcagccgtgtggaggccgagctcgtagaggcgctcgccaacctcgaggcgcagaaggaggaggctgttaaggcgctcgacgcccagatcgcctcgctcagtgatgagatcgtcaagaaggtgctcccatccgcgtgatgaaaccaaaccggccctgccttatcctacgactatagttacatgaacatcataaattaatgataattttgaagaaattggccgatgactccgacactgtactcatgaaagattattggatgggttgtgtccaccgcctgtgttgggtgtggattgttgtagactcgcagtgatctttctcgataagcttgtacagttcagtacatacagacacacattgaaaccatatagatacaggatacattttgccctagtgagttcaaccattaaatcttaagttatactacccg

SEQ ID NO: 81267 - DNA, 898 bp, Zea Mays
cccgcctcccttcttcccaccacacctccagtcctccactgacaagccgccgccgctcttccacctacctctccccggcctcgcacccatggccacggctttgatggttgcagccaccacctcctgctccccgggccgcgccgcgccgcgcctgaagccggtggcctcctcctcctccagccgcactgtttgacttcaacctgacgctcccggcgatcgcgaccgagttcctgctgctcatggtggcgctggacaagctctacttcacgccgctaggcaagttcatggatgagcgggacgccaagatccgcggtgagctcggcgatgtcaagggcgcctccgaggaggtgaagcagctggaggaccaggcggcggccatcatgaaggcggcgcgcgccgagatcgcggcggcgcttaacaagatgaagaaggagaccaccgcggagctggaggccaagctggacgaggggcgcagccgtgtggaggccgagctcgtagaggcgctcgccaacctcgaggcgcagaaggaggaggctgttaaggcgctcgacgcccagatcgcctcgctcagtgatgagatcgtcaagaaggtgctcccatccgcgtgatgaaaccaaaccggccctgccttatcctacgactatagttacatgaacatcataaattaatgataattttgaagaaattggccgatgactccgacactgtactcatgaaagattattggatgggttgtgtccaccgcctgtgttgggtgtggattgttgtagactcgcagtgatctttctcgataagcttgtacagttcagtacatacagacacacattgaaaccatatagatacaggatacattttgccctagtgagttcaaccattaaatcttaagttatactacccg

SEQ ID NO: 81268 - DNA, 1195 bp, Zea Mays
  misc_feature (1195)..(1195): n is a, c, g, or t
tggtgtcggtgtcggcgttggcgagtggcgactggcgacttctctgcctcgtcctccccgttttcccctccgcgtccagcccggcgcgacgccgccacgcacctagccgcggatccgaggcgcagatccaatccagcgatggcgtccacggcggcgaggcggttgcgggagctgcaggcccagacggggaacaagacctgcgtggactgcgcgcagcggaacccgcagtgggcgagcgtctcctacggcgtgttcatgtgcctcgagtgctccggcaagcaccggggcctcggcgtgcacatcagtttcgtgcgctcggtcaccatggactcctggaccgaggcgcagctccgcaagatggaggccggcggcaacgaccgcctcaacgccttcctcacagcgcggggcgttcccaaggagacgtcccacgtcgcgaagtacaactccaacgccgcggccgcctaccgcgaccgcatcgccgcgctcgctgagggcaagccttggaccgacccgcccgtagtcaaggagacgcccggatctgggcgcgcccgccccggctaggaagccacccttgcacgcctccggaggcggcggcgggtgggacgactgggacgatgattttcggtcggacatgaggcggaatcagtcggttggatcattcgccgccgcgggggcgcagtcagggaggcagccgccgaggaggatggcggagaacgagtccaagcctgagggtatcccgccatcccagggcggcaagtacgttgggttcggatccagcccagcgccatcggctaataggaacggcggtgctgctcagggcgatgtcttgcagggatttggacgcctttcattagttgcagcctctgctgcccagtctgctgccagtgttgtccaagtcggcacaaaagaaatccaatcaaagatgagggatgggggctatgaccagaaggtgaatgaaactgtcagtgttgttgccaataaaactgcagagattggaagcaagacctgggggatcatgagaggagttatggcaatggcctcacaaaaggtcgaggaatatgccaaggaaggaggaatgagcggctggggagaggattggcaacgcagcgagcagaacggtgagccttaccaaaggtttgagcacgcgaccgacagcaacagtttgaattcctcccaaaattcttcatggaagaan

SEQ ID NO: 81269 - DNA, 1207 bp, Zea Mays
  misc_feature (1207)..(1207): n is a, c, g, or t
tggtgtcggtgtcggcgttggcgagtggcgactggcgacttctctgcctcgtcctccccgttttcccctccgcgtccagcccggcgcgacgccgccacgcacctagccgcggatccgaggcgcagatccaatccagcgatggcgtccacggcggcgaggcggttgcgggagctgcaggcccagacggggaacaagacctgcgtggactgcgcgcagcggaacccgcagtgggcgagcgtctcctacggcgtgttcatgtgcctcgagtgctccggcaagcaccggggcctcggcgtgcacatcagtttcgtgcgctcggtcaccatggactcctggaccgaggcgcagctccgcaagatggaggccggcggcaacgaccgcctcaacgccttcctcacagcgcggggcgttcccaaggagacgtcccacgtcgcgaagtacaactccaacgccgcggccgcctaccgcgaccgcatcgccgcgctcgctgagggcaagccttggaccgacccgcccgtagtcaaggagacgcccggatctgggcgcgcccgccccggctaggaagccacccttgcacgcctccggaggcggcggcgggtgggacgactgggacgatgattttcggtcggacatgaggcggaatcagtcggttggatcattcgccgccgcgggggcgcagtcagggaggcagccgccgaggaggatggcggagaacgagtccaagcctgagggtatcccgccatcccagggcggcaagtacgttgggttcggatccagcccagcgccatcggctaataggaacggcggtgctgctcagggcgatgtcttgcaggtcgtctctcagggatttggacgcctttcattagttgcagcctctgctgcccagtctgctgccagtgttgtccaagtcggcacaaaagaaatccaatcaaagatgagggatgggggctatgaccagaaggtgaatgaaactgtcagtgttgttgccaataaaactgcagagattggaagcaagacctgggggatcatgagaggagttatggcaatggcctcacaaaaggtcgaggaatatgccaaggaaggaggaatgagcggctggggagaggattggcaacgcagcgagcagaacggtgagccttaccaaaggtttgagcacgcgaccgacagcaacagtttgaattcctcccaaaattcttcatggaagaan

SEQ ID NO: 81270 - DNA, 3099 bp, Zea Mays
gtcacgctcttggctctcgtggtcgtgggccttggacgtgcgcccccgccgcctgcctcagcgcagtggtcatcggtcagcgcgcgttctcgctacgcgttctccacttctccccacggcccacgcctttcccagccaaaagaaatatccaattcctcaccctaccccctcgctgctttctcctccccgtcgacctcgccaatcttcctcccgctaaccctagtccagcacccgagatctactccgcgcaaacagccatggcggagacgctcgacatgaccctcgacgacatcatcaagaacaacaagaagagtaacccctcgtctcgcggggcccgccgcagccgcggcgtatccgcccctggcggcgggaccggcggggtcgggccgaccaggcgcccctttaaaagggctgggaacaggcaggcgccctaccagccgccgaaggcccccgacgctgcgtggcagcacgacatgtaccctgcggtcgccgcaggaggcggcggcggcggcgggagggtctcggctctcgagacgggcgccaagctctacatctccaacctggactttggggtttcgaacgaggatattaaggagcttttctctgagctaggtgatttgaagcgtttttcgataaattatgatcgaagtgggaggtctaagggaacagctgaagttgtatttgcaaggcgttctgatgctgtagcggcggttaagaaatatgacaatgtccaacttgatggtaagcccatgaagatagagatagttggtaccaatactccagctgcagcagctgctcatccagtccctaatggtggtcatgctaggaatgctgcgaggagtgcaccaaaggatgctgctccagcaggtatgtcgcagcatagaacccatcagaggggtgggaggcgtgctgctggatctggtggtggtcgtcgtggcaaagagcgcagcaagccaaagtcgactgaagaactcgatgctgatttggagaagtatcatgctgatgcgatgcagaccaactaaatacattcacaaatttgatattcgacatcaaatatcaagcgcattagtccttccattacagctgtttgtgctaccatgttcaggggacaacaaaccttttctttgttgggggcgggggtattgctttactgagttttgtggattttatgtgtttacaatagaactagagttgggtgatgctgaatacttttatggaaattacttggttgcaagttgctcgacatgtgaaagttggttatgtatgaaggtactcagatgttccctggtgacctagttgtgtgcttccattctggtgttgctcagacttttctctgctgtaggcctgttcaagctctagccatctaagtaggaggtgtctgttgcatattgtgaaacattgtgatgtttattttgggcatcttaagctatcttctctggcacattaatgatttcatgagcttcaaggtgcctttcttttacaagttgattccttgcttgcataatcctcacttccggtgtccacgaagtccgagttaactgacttggctgccactagtccgattgaagcatcatggtgcaaatcctccttcaagatctgctattgatagcttagagatagctgcactattgatgcctctacttcattttggactactataggccctctttgcgtatttatgctatataaacatatgggggcatcctctacaatggttgatcttgtctactgtgctttggagttcctttcaacttcgcttggatcctttgatgacaaatggaatcatgtgcctctgcccagaaaatcagtttctaactgaaactctctcttttgcttgctttcatacttatgtcaatggcgatgcctgatgtggagcttgttttgtcatcaaccttggctgtgcgaatcataagtggtggtggtttatatcatcatggtttcacaatcttgggattcttggccaccatgttgacattgatatagtatatcacattaggaactcacaggctgttatgttccttcccgtaacatctgaactggtggtaatagctgttgctcggatgagatggaaaggacggagatattagacgactttgttgtgaaacatgtgcctctccaataaatatttcttcaaggctgcaaggacctgatttgaatggagaacccgatcggccctaggtgagactctgtatcctgatgcttcaccatgtcgatctcacgaagcacgtacagctgcaaaccaccactcaacaagcgatggaaacactcacatcatagtgcttcgccatatcgatcttactaagcacgtacaggtgcagctgcaagactggtcgagtagtacatggtttctattcaccaagtccaagagggattttttttatacggtacaaggacgccatacactcacaccactacacacgtatacacacggcatgtccttacacaccaaattcaataccactgaatgcatattctgtacctatagaaaaatctcaggttattggtgcgtatcaaaaaaaaatatcggcttatattggattttatgactgagataatggtgataatttttttttcttttgaatatgtctaagatggtcttgtattaccaactcaaattctataactatctcgacaaaatctaagaaattatgatttgtatcattgtaaagctcttcactgcttccttcaaaagacaagctacatttagaatgaggccttcgacgacgaagcttctagctttgtctcacgccttcgcagcaccaatgcgcacacgaagctccacaacttctctagtttgtatattgctttgtaatgcgcacacgaagcttcacaacttctctagtttgtatattgctttgttgactccctctgttgtactaaaggaattagatattagagtgcatgtcttcttgtcttaccttggcctttttaatcacttggtgtcaggataaggataagataagactttgggacaaaaatttagagaaccctatatagtacatatttatgatcaattattagtttgtgagattgaaaaaaatgcacacatatattatacaaggactagtataccatgcaatatggctacaagcatctaac

SEQ ID NO: 81271 - DNA, 4222 bp, Zea Mays
ctcttggctctcgtggtcgtgggccttggacgtgcgcccccgccgcctgcctcagcgcagtggtcatcggtcagcgcgcgttctcgctacgcgttctccacttctccccacggcccacgcctttcccagccaaaagaaatatccaattcctcaccctaccccctcgctgctttctcctccccgtcgacctcgccaatcttcctcccgctaaccctagtccagcacccgagatctactccgcgcaaacagccatggcggagacgctcgacatgaccctcgacgacatcatcaagaacaacaagaagagtaacccctcgtctcgcggggcccgccgcagccgcggcgtatccgcccctggcggcgggaccggcggggtcgggccgaccaggcgcccctttaaaagggctgggaacaggcaggcgccctaccagccgccgaaggcccccgacgctgcgtggcagcacgacatgtaccctgcggtcgccgcaggaggcggcggcggcggcgggagggtctcggctctcgagacgggcgccaagctctacatctccaacctggactttggggtttcgaacgaggatattaaggagcttttctctgagctaggtgatttgaagcgtttttcgataaattatgatcgaagtgggaggtctaagggaacagctgaagttgtatttgcaaggcgttctgatgctgtagcggcggttaagaaatatgacaatgtccaacttgatggtaagcccatgaagatagagatagttggtaccaatactccagctgcagcagctgctcatccagtccctaatggtggtcatgctaggaatgctgcgaggaggtatatttctcatctgattattcatcctccgtccttgtcatttgtcaatatcatttgtagtggcatgtttggcagtattcaaaatgactagatgttgtcatcttttagttattcattgttatatcaaaattgtgtcaaagaacagcactcttgtccagttccaactcatccctgccaatctaacaaggcaaataaaatgatattattttgttataacagctattctttataagtttgtaatgataattctcattgtacattaggttattttgacatggctaaacttaaggccatctccagcagatcccctaccccatcccctattggcctatttcaaacttcgctctacaaacagtgtcatctacagtgtggtgtccccttttttacacgacccaccgaagacaggcatgaaaatgaatgtctttgtatcatgctatagttcatttaataaaattttgatgagagtcagtggatagttctgtagatgattaaccttggtatggtgcacttgatcactcagattgctgttatatgtgtacttatgtaggctttatcttcacctatatagatgcaacgtttcttgttttaaatataccctagtctcattatataaaaaagggcttacccagtgccgtaggcttcccgcactgtccggggtctggggaagggtatctttaagcgccaagccttacccgcataatatgcagaggctagagctcgaacctgggaccttccggttacagacgtgcaccaaaggatgctgctccagcaggtatgtcgcagcatagaacccatcagaggggtgggaggcgtgctgctggatctggtggtggtcgtcgtggcaaagagcgcagcaagccaaagtcgactgaagaactcgatgctgatttggagaagtatcatgctgatgcgatgcagaccaactaaatacattcacaaatttgatattcgacatcaaatatcaagcgcattagtccttccattacagctgtttgtgctaccatgttcaggggacaacaaaccttttctttgttgggggcgggggtattgctttactgagttttgtggattttatgtgtttacaatagaactagagttgggtgatgctgaatacttttatggaaattacttggttgcaagttgctcgacatgtgaaagttggttatgtatgaaggcctgttcaagctctagccatctaagtaggaggtgtctgttgcatattgtgaaacattgtgatgtttattttgggcatcttaagctatcttctctggcacattaatgatttcatgagcttcaaggtgcctttcttttacaagttgattccttgcttgcataatcctcacttccggtgtccacgaagtccgagttaactgacttggctgccactagtccgattgaagcatcatggtgcaaatcctccttcaagatctgctattgatagcttagagatagctgcactattgatgcctctacttcattttggactactataggccctctttgcgtatttatgctatataaacatatgggggcatcctctacaatggttgatcttgtctactgtgctttggagttcctttcaacttcgcttggatcctttgatgacaaatggaatcatgtgcctctgcccagaaaatcagtttctaactgaaactctctcttttgcttgctttcatacttatgtcaatggcgatgcctgatgtggagcttgttttgtcatcaaccttggctgtgcgaatcataagtggtggtggtttatatcatcatggtttcacaatcttgggattcttggccaccatgttgacattgatatagtatatcacattaggaactcacaggctgttatgttccttcccgtaacatctgaactggtggtaatagctgttgctcggatgaggtaggagtcttttcttttgtttcctgttataattattattggttcaattctgttgcaaattatgtcaatctttttgccttttactgcttaatgatacatggttctatctggtgaaatcatcttgctgtgtgaaatgctatatggttctatctggcaaaatcggattgctttgtattgtactccctcgttcctagaattctaggatgcgatagaatagtgctaagccattacaatctgacgtctgatcaaatttatattaaaagatattccctccgttccgaaatatagttctttcatctactttttctctccacattcattcaaaatgatgatgaatataggcatacactcaaactgtattcatgtgctataattagtctaaaacaaactatattttgggacggagagagtaagatttttcttaatatgtatcatcactaataaagtatattttgttagtatagcaattttggagggaacacatgactgttttcgataaacttagtcaaacatatgatttgactttgactggatttagaattgtttctttttgtgatggaaacgagaggtagaattgcatggaaaggactgaggtatttttttcggtaataaatgacgattgaattgtatctttttcggtaattaaagaagtgacttagatgcactttctgaatgttgatgataaatggtgggatggaattgacggatgttgataaatttgattgaattgtattagacgatagatagtgattgaattgtatcctttttggatggaaataagggaggtagaattgcatcctttttcagatggaaaggacggagatattagacgactttgttgtgaaacatgtgcctctccaataaatatttcttcaaggctgcaaggacctgatttgaatggagaacccgatcggccctaggtgagactctgtatcctgatgcttcaccatgtcgatctcacgaagcacgtacagctgcaaaccaccactcaacaagcgatggaaacactcacatcatagtgcttcgccatatcgatcttactaagcacgtacaggtgcagctgcaagactggtcgagtagtacatggtttctattcaccaagtccaagagggattttttttatacggtacaaggacgccatacactcacaccactacacacgtatacacacggcatgtccttacacaccaaattcaataccactgaatgcatattctgtacctatagaaaaatctcaggttattggtgcgtatcaaaaaaaaatatcggcttatattggattttatgactgagataatggtgataatttttttttcttttgaatatgtctaagatggtcttgtattaccaactcaaattctataactatctcgacaaaatctaagaaattatgatttgtatcattgtaaagctcttcactgcttccttcaaaagacaagctacatttaggtatttcataattgctacttttttctctctaaaactggcct

SEQ ID NO: 81272 - DNA, 4001 bp, Zea Mays
ctcttggctctcgtggtcgtgggccttggacgtgcgcccccgccgcctgcctcagcgcagtggtcatcggtcagcgcgcgttctcgctacgcgttctccacttctccccacggcccacgcctttcccagccaaaagaaatatccaattcctcaccctaccccctcgctgctttctcctccccgtcgacctcgccaatcttcctcccgctaaccctagtccagcacccgagatctactccgcgcaaacagccatggcggagacgctcgacatgaccctcgacgacatcatcaagaacaacaagaagagtaacccctcgtctcgcggggcccgccgcagccgcggcgtatccgcccctggcggcgggaccggcggggtcgggccgaccaggcgcccctttaaaagggctgggaacaggcaggcgccctaccagccgccgaaggcccccgacgctgcgtggcagcacgacatgtaccctgcggtcgccgcaggaggcggcggcggcggcgggagggtctcggctctcgagacgggcgccaagctctacatctccaacctggactttggggtttcgaacgaggatattaaggagcttttctctgagctaggtgatttgaagcgtttttcgataaattatgatcgaagtgggaggtctaagggaacagctgaagttgtatttgcaaggcgttctgatgctgtagcggcggttaagaaatatgacaatgtccaacttgatggtaagcccatgaagatagagatagttggtaccaatactccagctgcagcagctgctcatccagtccctaatggtggtcatgctaggaatgctgcgaggaggtatatttctcatctgattattcatcctccgtccttgtcatttgtcaatatcatttgtagtggcatgtttggcagtattcaaaatgactagatgttgtcatcttttagttattcattgttatatcaaaattgtgtcaaagaacagcactcttgtccagttccaactcatccctgccaatctaacaaggcaaataaaatgatattattttgttataacagctattctttataagtttgtaatgataattctcattgtacattaggttattttgacatggctaaacttaaggccatctccagcagatcccctaccccatcccctattggcctatttcaaacttcgctctacaaacagtgtcatctacagtgtggtgtccccttttttacacgacccaccgaagacaggcatgaaaatgaatgtctttgtatcatgctatagttcatttaataaaattttgatgagagtcagtggatagttctgtagatgattaaccttggtatggtgcacttgatcactcagattgctgttatatgtgtacttatgtaggctttatcttcacctatatagatgcaacgtttcttgttttaaatataccctagtctcattatataaaaaagggcttacccagtgccgtaggcttcccgcactgtccggggtctggggaagggtatctttaagcgccaagccttacccgcataatatgcagaggctagagctcgaacctgggaccttccggttacagacgtgcaccaaaggatgctgctccagcaggtatgtcgcagcatagaacccatcagaggggtgggaggcgtgctgctggatctggtggtggtcgtcgtggcaaagagcgcagcaagccaaagtcgactgaagaactcgatgctgatttggagaagtatcatgctgatgcgatgcagaccaactaaatacattcacaaatttgatattcgacatcaaatatcaagcgcattagtccttccattacagctgtttgtgctaccatgttcaggggacaacaaaccttttctttgttgggggcgggggtattgctttactgagttttgtggattttatgtgtttacaatagaactagagttgggtgatgctgaatacttttatggaaattacttggttgcaagttgctcgacatgtgaaagttggttatgtatgaaggcctgttcaagctctagccatctaagtaggaggtgtctgttgcatattgtgaaacattgtgatgtttattttgggcatcttaagctatcttctctggcacattaatgatttcatgagcttcaaggtgcctttcttttacaagttgattccttgcttgcataatcctcacttccggtgtccacgaagtccgagttaactgacttggctgccactagtccgattgaagcatcatggtgcaaatcctccttcaagatctgctattgatagcttagagatagctgcactattgatgcctctacttcattttggactactataggccctctttgcgtatttatgctatataaacatatgggggcatcctctacaatggttgatcttgtctactgtgctttggagttcctttcaacttcgcttggatcctttgatgacaaatggaatcatgtgcctctgcccagaaaatcagtttctaactgaaactctctcttttgcttgctttcatacttatgtcaatggcgatgcctgatgtggagcttgttttgtcatcaaccttggctgtgcgaatcataagtggtggtggtttatatcatcatggtttcacaatcttgggattcttggccaccatgttgacattgatatagtatatcacattaggaactcacaggctgttatgttccttcccgtaacatctgaactggtggtaatagctgttgctcggatgaggtaggagtcttttcttttgtttcctgttataattattattggttcaattctgttgcaaattatgtcaatctttttgccttttactgcttaatgatacatggttctatctggtgaaatcatcttgctgtgtgaaatgctatatggttctatctggcaaaatcggattgctttgtattgtactccctcgttcctagaattctaggatgcgatagaatagtgctaagccattacaatctgacgtctgatcaaatttatattaaaagatattccctccgttccgaaatatagttctttcatctactttttctctccacattcattcaaaatgatgatgaatataggcatacactcaaactgtattcatgtgctataattagtctaaaacaaactatattttgggacggagagagtaagatttttcttaatatgtatcatcactaataaagtatattttgttagtatagcaattttggagggaacacatgactgttttcgataaacttagtcaaacatatgatttgactttgactggatttagaattgtttctttttgtgatggaaacgagaggtagaattgcatggaaaggactgaggtatttttttcggtaataaatgacgattgaattgtatctttttcggtaattaaagaagtgacttagatgcactttctgaatgttgatgataaatggtgggatggaattgacggatgttgataaatttgattgaattgtattagacgatagatagtgattgaattgtatcctttttggatggaaataagggaggtagaattgcatcctttttcagatggaaaggacggagatattagacgactttgttgtgaaacatgtgcctctccaataaatatttcttcaagaatgaggccttcgacgacgaagcttctagctttgtctcacgccttcgcagcaccaatgcgcacacgaagctccacaacttctctagtttgtatattgctttgtaatgcgcacacgaagcttcacaacttctctagtttgtatattgctttgttgactccctctgttgtactaaaggaattagatattagagtgcatgtcttcttgtcttaccttggcctttttaatcacttggtgtcaggataaggataagataagactttgggacaaaaatttagagaaccctatatagtacatatttatgatcaattattagtttgtgagattgaaaaaaatgcacacatatattatacaaggactagtataccatgcaatatggctacaagcatctaac

SEQ ID NO: 81273 - DNA, 3124 bp, Zea Mays
ctcttggctctcgtggtcgtgggccttggacgtgcgcccccgccgcctgcctcagcgcagtggtcatcggtcagcgcgcgttctcgctacgcgttctccacttctccccacggcccacgcctttcccagccaaaagaaatatccaattcctcaccctaccccctcgctgctttctcctccccgtcgacctcgccaatcttcctcccgctaaccctagtccagcacccgagatctactccgcgcaaacagccatggcggagacgctcgacatgaccctcgacgacatcatcaagaacaacaagaagagtaacccctcgtctcgcggggcccgccgcagccgcggcgtatccgcccctggcggcgggaccggcggggtcgggccgaccaggcgcccctttaaaagggctgggaacaggcaggcgccctaccagccgccgaaggcccccgacgctgcgtggcagcacgacatgtaccctgcggtcgccgcaggaggcggcggcggcggcgggagggtctcggctctcgagacgggcgccaagctctacatctccaacctggactttggggtttcgaacgaggatattaaggagcttttctctgagctaggtgatttgaagcgtttttcgataaattatgatcgaagtgggaggtctaagggaacagctgaagttgtatttgcaaggcgttctgatgctgtagcggcggttaagaaatatgacaatgtccaacttgatggtaagcccatgaagatagagatagttggtaccaatactccagctgcagcagctgctcatccagtccctaatggtggtcatgctaggaatgctgcgaggaggtatatttctcatctgattattcatcctccgtccttgtcatttgtcaatatcatttgtagtggcatgtttggcagtattcaaaatgactagatgttgtcatcttttagttattcattgttatatcaaaattgtgtcaaagaacagcactcttgtccagttccaactcatccctgccaatctaacaaggcaaataaaatgatattattttgttataacagctattctttataagtttgtaatgataattctcattgtacattaggttattttgacatggctaaacttaaggccatctccagcagatcccctaccccatcccctattggcctatttcaaacttcgctctacaaacagtgtcatctacagtgtggtgtccccttttttacacgacccaccgaagacaggcatgaaaatgaatgtctttgtatcatgctatagttcatttaataaaattttgatgagagtcagtggatagttctgtagatgattaaccttggtatggtgcacttgatcactcagattgctgttatatgtgtacttatgtaggctttatcttcacctatatagatgcaacgtttcttgttttaaatataccctagtctcattatataaaaaagggcttacccagtgccgtaggcttcccgcactgtccggggtctggggaagggtatctttaagcgccaagccttacccgcataatatgcagaggctagagctcgaacctgggaccttccggttacagacgtgcaccaaaggatgctgctccagcaggtatgtcgcagcatagaacccatcagaggggtgggaggcgtgctgctggatctggtggtggtcgtcgtggcaaagagcgcagcaagccaaagtcgactgaagaactcgatgctgatttggagaagtatcatgctgatgcgatgcagaccaactaaatacattcacaaatttgatattcgacatcaaatatcaagcgcattagtccttccattacagctgtttgtgctaccatgttcaggggacaacaaaccttttctttgttgggggcgggggtattgctttactgagttttgtggattttatgtgtttacaatagaactagagttgggtgatgctgaatacttttatggaaattacttggttgcaagttgctcgacatgtgaaagttggttatgtatgaaggcctgttcaagctctagccatctaagtaggaggtgtctgttgcatattgtgaaacattgtgatgtttattttgggcatcttaagctatcttctctggcacattaatgatttcatgagcttcaaggtgcctttcttttacaagttgattccttgcttgcataatcctcacttccggtgtccacgaagtccgagttaactgacttggctgccactagtccgattgaagcatcatggtgcaaatcctccttcaagatctgctattgatagcttagagatagctgcactattgatgcctctacttcattttggactactataggccctctttgcgtatttatgctatataaacatatgggggcatcctctacaatggttgatcttgtctactgtgctttggagttcctttcaacttcgcttggatcctttgatgacaaatggaatcatgtgcctctgcccagaaaatcagtttctaactgaaactctctcttttgcttgctttcatacttatgtcaatggcgatgcctgatgtggagcttgttttgtcatcaaccttggctgtgcgaatcataagtggtggtggtttatatcatcatggtttcacaatcttgggattcttggccaccatgttgacattgatatagtatatcacattaggaactcacaggctgttatgttccttcccgtaacatctgaactggtggtaatagctgttgctcggatgagaatgaggccttcgacgacgaagcttctagctttgtctcacgccttcgcagcaccaatgcgcacacgaagctccacaacttctctagtttgtatattgctttgtaatgcgcacacgaagcttcacaacttctctagtttgtatattgctttgttgactccctctgttgtactaaaggaattagatattagagtgcatgtcttcttgtcttaccttggcctttttaatcacttggtgtcaggataaggataagataagactttgggacaaaaatttagagaaccctatatagtacatatttatgatcaattattagtttgtgagattgaaaaaaatgcacacatatattatacaaggactagtataccatgcaatatggctacaagcatctaac

SEQ ID NO: 81274 - DNA, 3194 bp, Zea Mays
ctcttggctctcgtggtcgtgggccttggacgtgcgcccccgccgcctgcctcagcgcagtggtcatcggtcagcgcgcgttctcgctacgcgttctccacttctccccacggcccacgcctttcccagccaaaagaaatatccaattcctcaccctaccccctcgctgctttctcctccccgtcgacctcgccaatcttcctcccgctaaccctagtccagcacccgagatctactccgcgcaaacagccatggcggagacgctcgacatgaccctcgacgacatcatcaagaacaacaagaagagtaacccctcgtctcgcggggcccgccgcagccgcggcgtatccgcccctggcggcgggaccggcggggtcgggccgaccaggcgcccctttaaaagggctgggaacaggcaggcgccctaccagccgccgaaggcccccgacgctgcgtggcagcacgacatgtaccctgcggtcgccgcaggaggcggcggcggcggcgggagggtctcggctctcgagacgggcgccaagctctacatctccaacctggactttggggtttcgaacgaggatattaaggagcttttctctgagctaggtgatttgaagcgtttttcgataaattatgatcgaagtgggaggtctaagggaacagctgaagttgtatttgcaaggcgttctgatgctgtagcggcggttaagaaatatgacaatgtccaacttgatggtaagcccatgaagatagagatagttggtaccaatactccagctgcagcagctgctcatccagtccctaatggtggtcatgctaggaatgctgcgaggaggtatatttctcatctgattattcatcctccgtccttgtcatttgtcaatatcatttgtagtggcatgtttggcagtattcaaaatgactagatgttgtcatcttttagttattcattgttatatcaaaattgtgtcaaagaacagcactcttgtccagttccaactcatccctgccaatctaacaaggcaaataaaatgatattattttgttataacagctattctttataagtttgtaatgataattctcattgtacattaggttattttgacatggctaaacttaaggccatctccagcagatcccctaccccatcccctattggcctatttcaaacttcgctctacaaacagtgtcatctacagtgtggtgtccccttttttacacgacccaccgaagacaggcatgaaaatgaatgtctttgtatcatgctatagttcatttaataaaattttgatgagagtcagtggatagttctgtagatgattaaccttggtatggtgcacttgatcactcagattgctgttatatgtgtacttatgtaggctttatcttcacctatatagatgcaacgtttcttgttttaaatataccctagtctcattatataaaaaagggcttacccagtgccgtaggcttcccgcactgtccggggtctggggaagggtatctttaagcgccaagccttacccgcataatatgcagaggctagagctcgaacctgggaccttccggttacagacgtgcaccaaaggatgctgctccagcaggtatgtcgcagcatagaacccatcagaggggtgggaggcgtgctgctggatctggtggtggtcgtcgtggcaaagagcgcagcaagccaaagtcgactgaagaactcgatgctgatttggagaagtatcatgctgatgcgatgcagaccaactaaatacattcacaaatttgatattcgacatcaaatatcaagcgcattagtccttccattacagctgtttgtgctaccatgttcaggggacaacaaaccttttctttgttgggggcgggggtattgctttactgagttttgtggattttatgtgtttacaatagaactagagttgggtgatgctgaatacttttatggaaattacttggttgcaagttgctcgacatgtgaaagttggttatgtatgaaggcctgttcaagctctagccatctaagtaggaggtgtctgttgcatattgtgaaacattgtgatgtttattttgggcatcttaagctatcttctctggcacattaatgatttcatgagcttcaaggtgcctttcttttacaagttgattccttgcttgcataatcctcacttccggtgtccacgaagtccgagttaactgacttggctgccactagtccgattgaagcatcatggtgcaaatcctccttcaagatctgctattgatagcttagagatagctgcactattgatgcctctacttcattttggactactataggccctctttgcgtatttatgctatataaacatatgggggcatcctctacaatggttgatcttgtctactgtgctttggagttcctttcaacttcgcttggatcctttgatgacaaatggaatcatgtgcctctgcccagaaaatcagtttctaactgaaactctctcttttgcttgctttcatacttatgtcaatggcgatgcctgatgtggagcttgttttgtcatcaaccttggctgtgcgaatcataagtggtggtggtttatatcatcatggtttcacaatcttgggattcttggccaccatgttgacattgatatagtatatcacattaggaactcacaggctgttatgttccttcccgtaacatctgaactggtggtaatagctgttgctcggatgagatggaaaggacggagatattagacgactttgttgtgaaacatgtgcctctccaataaatatttcttcaagaatgaggccttcgacgacgaagcttctagctttgtctcacgccttcgcagcaccaatgcgcacacgaagctccacaacttctctagtttgtatattgctttgtaatgcgcacacgaagcttcacaacttctctagtttgtatattgctttgttgactccctctgttgtactaaaggaattagatattagagtgcatgtcttcttgtcttaccttggcctttttaatcacttggtgtcaggataaggataagataagactttgggacaaaaatttagagaaccctatatagtacatatttatgatcaattattagtttgtgagattgaaaaaaatgcacacatatattatacaaggactagtataccatgcaatatggctacaagcatctaac

SEQ ID NO: 81275 - DNA, 3804 bp, Zea Mays
ctcttggctctcgtggtcgtgggccttggacgtgcgcccccgccgcctgcctcagcgcagtggtcatcggtcagcgcgcgttctcgctacgcgttctccacttctccccacggcccacgcctttcccagccaaaagaaatatccaattcctcaccctaccccctcgctgctttctcctccccgtcgacctcgccaatcttcctcccgctaaccctagtccagcacccgagatctactccgcgcaaacagccatggcggagacgctcgacatgaccctcgacgacatcatcaagaacaacaagaagagtaacccctcgtctcgcggggcccgccgcagccgcggcgtatccgcccctggcggcgggaccggcggggtcgggccgaccaggcgcccctttaaaagggctgggaacaggcaggcgccctaccagccgccgaaggcccccgacgctgcgtggcagcacgacatgtaccctgcggtcgccgcaggaggcggcggcggcggcgggagggtctcggctctcgagacgggcgccaagctctacatctccaacctggactttggggtttcgaacgaggatattaaggagcttttctctgagctaggtgatttgaagcgtttttcgataaattatgatcgaagtgggaggtctaagggaacagctgaagttgtatttgcaaggcgttctgatgctgtagcggcggttaagaaatatgacaatgtccaacttgatggtaagcccatgaagatagagatagttggtaccaatactccagctgcagcagctgctcatccagtccctaatggtggtcatgctaggaatgctgcgaggaggtatatttctcatctgattattcatcctccgtccttgtcatttgtcaatatcatttgtagtggcatgtttggcagtattcaaaatgactagatgttgtcatcttttagttattcattgttatatcaaaattgtgtcaaagaacagcactcttgtccagttccaactcatccctgccaatctaacaaggcaaataaaatgatattattttgttataacagctattctttataagtttgtaatgataattctcattgtacattaggttattttgacatggctaaacttaaggccatctccagcagatcccctaccccatcccctattggcctatttcaaacttcgctctacaaacagtgtcatctacagtgtggtgtccccttttttacacgacccaccgaagacaggcatgaaaatgaatgtctttgtatcatgctatagttcatttaataaaattttgatgagagtcagtggatagttctgtagatgattaaccttggtatggtgcacttgatcactcagattgctgttatatgtgtacttatgtaggctttatcttcacctatatagatgcaacgtttcttgttttaaatataccctagtctcattatataaaaaagggcttacccagtgccgtaggcttcccgcactgtccggggtctggggaagggtatctttaagcgccaagccttacccgcataatatgcagaggctagagctcgaacctgggaccttccggttacagacgtgcaccaaaggatgctgctccagcaggtatgtcgcagcatagaacccatcagaggggtgggaggcgtgctgctggatctggtggtggtcgtcgtggcaaagagcgcagcaagccaaagtcgactgaagaactcgatgctgatttggagaagtatcatgctgatgcgatgcagaccaactaaatacattcacaaatttgatattcgacatcaaatatcaagcgcattagtccttccattacagctgtttgtgctaccatgttcaggggacaacaaaccttttctttgttgggggcgggggtattgctttactgagttttgtggattttatgtgtttacaatagaactagagttgggtgatgctgaatacttttatggaaattacttggttgcaagttgctcgacatgtgaaagttggttatgtatgaaggcctgttcaagctctagccatctaagtaggaggtgtctgttgcatattgtgaaacattgtgatgtttattttgggcatcttaagctatcttctctggcacattaatgatttcatgagcttcaaggtgcctttcttttacaagttgattccttgcttgcataatcctcacttccggtgtccacgaagtccgagttaactgacttggctgccactagtccgattgaagcatcatggtgcaaatcctccttcaagatctgctattgatagcttagagatagctgcactattgatgcctctacttcattttggactactataggccctctttgcgtatttatgctatataaacatatgggggcatcctctacaatggttgatcttgtctactgtgctttggagttcctttcaacttcgcttggatcctttgatgacaaatggaatcatgtgcctctgcccagaaaatcagtttctaactgaaactctctcttttgcttgctttcatacttatgtcaatggcgatgcctgatgtggagcttgttttgtcatcaaccttggctgtgcgaatcataagtggtggtggtttatatcatcatggtttcacaatcttgggattcttggccaccatgttgacattgatatagtatatcacattaggaactcacaggctgttatgttccttcccgtaacatctgaactggtggtaatagctgttgctcggatgaggtaggagtcttttcttttgtttcctgttataattattattggttcaattctgttgcaaattatgtcaatctttttgccttttactgcttaatgatacatggttctatctggtgaaatcatcttgctgtgtgaaatgctatatggttctatctggcaaaatcggattgctttgtattgtactccctcgttcctagaattctaggatgcgatagaatagtgctaagccattacaatctgacgtctgatcaaatttatattaaaagatattccctccgttccgaaatatagttctttcatctactttttctctccacattcattcaaaatgatgatgaatataggcatacactcaaactgtattcatgtgctataattagtctaaaacaaactatattttgggacggagagagtaagatttttcttaatatgtatcatcactaataaagtatattttgttagtatagcaattttggagggaacacatgactgttttcgataaacttagtcaaacatatgatttgactttgactggatttagaattgtttctttttgtgatggaaacgagaggtagaattgcatggaaaggactgaggtatttttttcggtaataaatgacgattgaattgtatctttttcggtaattaaagaagtgacttagatgcactttctgaatgttgatgataaatggtgggatggaattgacggatgttgataaatttgattgaattgtattagacgatagatagtgattgaattgtatcctttttggatggaaataagggaggtagaattgcatcctttttcagatggaaaggacggagatattagacgactttgttgtgaaacatgtgcctctccaataaatatttcttcaagacaactctgtgcagacaactaaacaggagcttagataaagtcaacgcatacggtggtccaagacgagacgatgcgggtaaccaaacatatggagtgtgcatatgccttaagagtgcatattaatttatagaggttgcatatatgatgaaaagtaagtctaaatcataattgattttgcaagtttttgtgtgtgag

SEQ ID NO: 81276 - DNA, 2133 bp, Zea Mays
gtcagcgcgcgttctcgctacgcgttctccacttctccccacggcccacgcctttcccagccaaaagaaatatccaattcctcaccctaccccctcgctgctttctcctccccgtcgacctcgccaatcttcctcccgctaaccctagtccagcacccgagatctactccgcgcaaacagccatggcggagacgctcgacatgaccctcgacgacatcatcaagaacaacaagaagagtaacccctcgtctcgcggggcccgccgcagccgcggcgtatccgcccctggcggcgggaccggcggggtcgggccgaccaggcgcccctttaaaagggctgggaacaggcaggcgccctaccagccgccgaaggcccccgacgctgcgtggcagcacgacatgtaccctgcggtcgccgcaggaggcggcggcggcggcgggagggtctcggctctcgagacgggcgccaagctctacatctccaacctggactttggggtttcgaacgaggatattaaggagcttttctctgagctaggtgatttgaagcgtttttcgataaattatgatcgaagtgggaggtctaagggaacagctgaagttgtatttgcaaggcgttctgatgctgtagcggcggttaagaaatatgacaatgtccaacttgatggtaagcccatgaagatagagatagttggtaccaatactccagctgcagcagctgctcatccagtccctaatggtggtcatgctaggaatgctgcgaggaggcttcccgcactgtccggggtctggggaagggtatctttaagcgccaagccttacccgcataatatgcagaggctagagctcgaacctgggaccttccggttacagacgtgcaccaaaggatgctgctccagcaggtatgtcgcagcatagaacccatcagaggggtgggaggcgtgctgctggatctggtggtggtcgtcgtggcaaagagcgcagcaagccaaagtcgactgaagaactcgatgctgatttggagaagtatcatgctgatgcgatgcagaccaactaaatacattcacaaatttgatattcgacatcaaatatcaagcgcattagtccttccattacagctgtttgtgctaccatgttcaggggacaacaaaccttttctttgttgggggcgggggtattgctttactgagttttgtggattttatgtgtttacaatagaactagagttgggtgatgctgaatacttttatggaaattacttggttgcaagttgctcgacatgtgaaagttggttatgtatgaaggtactcagatgttccctggtgacctagttgtgtgcttccattctggtgttgctcagacttttctctgctgtaggcctgttcaagctctagccatctaagtaggaggtgtctgttgcatattgtgaaacattgtgatgtttattttgggcatcttaagctatcttctctggcacattaatgatttcatgagcttcaaggtgcctttcttttacaagttgattccttgcttgcataatcctcacttccggtgtccacgaagtccgagttaactgacttggctgccactagtccgattgaagcatcatggtgcaaatcctccttcaagatctgctattgatagcttagagatagctgcactattgatgcctctacttcattttggactactataggccctctttgcgtatttatgctatataaacatatgggggcatcctctacaatggttgatcttgtctactgtgctttggagttcctttcaacttcgcttggatcctttgatgacaaatggaatcatgtgcctctgcccagaaaatcagtttctaactgaaactctctcttttgcttgctttcatacttatgtcaatggcgatgcctgatgtggagcttgttttgtcatcaaccttggctgtgcgaatcataagtggtggtggtttatatcatcatggtttcacaatcttgggattcttggccaccatgttgacattgatatagtatatcacattaggaactcacaggctgttatgttccttcccgtaacatctgaactggtggtaatagctgttgctcggatgagatggaaaggacggagatattagacgactttgttg

SEQ ID NO: 81277 - DNA, 2998 bp, Zea Mays
ggttaggctgtctctagcaatgtcctttaaatttcattctctaaagaaatattctgtgtcctttacagcatcctctaaaagatttcgtcctctatatttttttctactccaacagcgtcctctaaatttcatcctctatataaatagtgttaccagactttattttctacattcttttttccgcattggacacacacagaaaaatatcatttgtatatctagtattaaaatacgatgtatattaattttcttcacctaaaatagtacacctttttattacaaagtttccttggcagatcttaaaaaaattactatacatatttgagcagacacctaataatattgcttgctgctacttattcttcattaattcagctacaatacttattatactgcatgttgttgtacatttctagcggagctgaagtagagagacacgaatagaggagccgctgcatttggaggtggttgaggacgtcctctattttaccggaccctttagcgcacgttgttggaggaaaaaagttgatcaccatgcgctaaatatagagtagaggagcatatagcgcaccttgctggagagagtctaggccctgcctctctggggtaaagtaaagtatccaaacatcttgtcacttcaagggaagcgttagaaaccgttgtgtcagcgttcactttgtcgtctcaacgggatcaattggaagtcttgagaaacataacagcaaacctaaccccatagacctaatacgttccaaatgctgcaatgccaactaccagaatgcttgaatcaattaggactgttccccatcaaaattggcaaaactgagctgcgtttctcggacagtagcctcagccttatggtaacaacagggaacctccgcaccagatgtgtctcccctcgagctatatagggttaggagaaaacaaaacatcagtcaagcactaacaaggatggaccagtaactactacaagggcatcatccatcacacacctcggaacaagtttcattggcaccatgacgagggcggtctcatggacacatgcacctcatgttcttcagggccaacacggtactttgggacaataatctccaggcctgtccccgtttcatcgcggtatgcttccagagtggcatcttcagggatccgggtaggcagtgggatttcccggacaaactctcctggtgggcaatgctcaggagaaggatccgccaacttgaaagtccgatcatgccttttcaataatggcatcctaccaacgctaatgcaagataccttaacaatcccattcgtaagagtattcttccatgaaaccttcaccttctgaaaatcagagaaaggcaggctaacaatgatcaagtagcccttgctgtcctcatatattgtttttgcggcagttactggtccagaagcatggcgcatcacacctgtgaagtcattcatccatgatggctcaaaggtgtggctcacatccatgtcttgggccttgtctgaattcgaattgctgcagtcctcttccgttgcagacggtgaggaatccttcctgcgcttgttacagatggttgcgatctccatggcatccccagaactgtgattggatggttgtgtcgataggttaaggccagaaccgttcagcaacctcttgtggtgcccatgtgagctactctttgtaggaaccacggctgctagcctctcgagctcaaattccgtgctcggcagattcctccaagactcgaaatcacttgcctcggctgggatcgagaaattggcatccctcccggtgagctccatccacctctttaaatcagactcaggtacacctgccaagtttggcgccctcacgatttcgatcccgtgaatacactgcgggttagagagcccacgataatgcttgcgctgcatccggtgtgagcgcacaaaccctttgtctgcgctgaaagggaactgtggatccccaaggcgcgagtgcccattcatgaagctcctcagctgcatcttccccagggcattctccgatcgctccttaaagatccacatgtacatgttctccatgtcgtgctgcaccaggaaagcgtccagagtggcactggcactattaccattcccgccggtggtggctgccttcgccttgccacccttgtcggtggacatgactggcttgaagtagtgggtgaagaagaaccacgctccccaaatgctatcattcctcttgacgcacttgcgcgccacgctggaaccggagcccttggtgtgggacacggcgatcacggtggccgcggctgctgctggggccaagacaggcccggcagcagcgggcgaatccgagtcgtagtgctgcgggccgccgaggccggcatctagcacgtcaacgttggcgtcgtgcgacgccggaggtggcggagacgggtcggcggtgagggggaggttgatgtcagggggggcgaccgccgcggcatgtaggcagcggcggaagggcccctgtggcgggaggaagaggtcgaagtggtcgtgggaggcggtgtccatggagaggaaggtgaaagggccctggtgtggatggtgggccgtggtggtgtccatggagagcgcggtgagcagcgactcgcccatggcggcggcggcggccgtcgtcctcctggcggctcgctcctcgtccgcctgctgctccccttccgtcgcttctctgcccaaatcttcggcgcttcctcctccaccgcctccgcacggcgcgctcctctcctccgaatcgctccacgagcatcagttagcgaccaggcttcacacctccctcgcgtccatccgccagccgagaggaaatggggggggtgcacgtacctacgcaggtccaagaaacccggagctctcaaatcgacgaaccgcctccaccatccagccgaacaacggtccaagaatccctccctcctcctgctgcggtacgttacaatcaaatcaaatgaaaaaaaatcaaacgtcgtcgaatcggcgggcgggggctcgc

SEQ ID NO: 81278 - DNA, 2546 bp, Zea Mays
acaaacccccgagtggaacacacaaaagcgccccaccaccgcggaccattcctttcctttgtatctctatctatccctcctcggctcctcgccctttcccctcttgcccgagtcgctagcctccctgcccctgcccctgccccgcctcctcccgtggaccacttcctccaccttcgcttccatagcaggctagcagctgagcgaggtcaactcttccgccggcggagagagagggagggagcggggaagagacgggagggtctccgcgcacctgccatcagccaccacccgatacccagatctaaatcaaagcttccgctccggttgttgtcggttggtcggtacctgggcggcggcggcggcggcacgggaggacagcgaacatgtcgtcgagcacgatccggaaggccctgggcgcggtgaaggaccagaccagcatcagcctcgccaaggtcactagcaacatcgcgcccgatctggacgtgctcatcgtcaaggccaccagccacgacgacgagccggccgaggagcgccacatccgcgagatcctccaccttacgtccggatcccgcgcccacgttgctgctgccgtggcagggtgctcccgcaggctctcccgcacccgcgactatgtggtcgcgctcaagtcgctcatgctcgtgcaccgcctccttgtcgatggcgacccgtccttccaccgcgagctcctacatggcacacggcggggcacccgcctgctgaacctctctgattttcgggacgaggcgcactctggatcgtgggatcactctgcctttgtgcgcacctatgcgctctaccttgaccagcgcctcgagttcttcctccatgagcgcaagcaggggttaaatgctggcagcagcagcagtgctaatggcccatcaccacgggaccgtgatcgctggggttcgcctgatccctatggccgccgctctccctcctactcgtcaccccctgggtatggaggatatgatgattaccgcgagaggaatggtgggaacaatgatgacaagaggccaccgaccccggtgagggatatgaagcctgagcgtgtccttgctcgtatgcaccacctacagcagctgcttgacaggttccttgcttgccgccccactggtggtgcaaagcaaagcaggatggtgctggttgcgctgtatcagattgtgagagagagcttccagctctactctgatatctgcgaggtgctggcggtgctgctggacaggttctttgacatggagtatgcggaatgcgtgaaggcttttgaggcatatgctagtgctgcaaagcagattgatgagctctctgcattctattcatggtgtaaagatactggagttgcaaggtcatctgagtacccagaggtgcagcgtgtcactgataagttgctggagacgctagaagagttcatgagggaccgggcaaagaggcctaagagcccaccacgggagcctgaacctgagcctgttaaggaagaacctgagccggatatgaacagcatcaaagcgcttccagcaccagaagattataaggagcctgaacctgtgaaggtggaggaagaggtgaagccggagccacccccacagccacagggtgacttggtggatctcagagaagatactgttagtgcagatgagcaaggtaataggcttgctctagcactcttccagggaccgcccgctgctggtggaaacaatggttcatgggaggctttcccttcaaatggtggcaacgaggtgacttcggcatggcagaatcctgcagctgaacctgggaaggctgattgggagcttgccctcgtagagacagcaagcaacttgtccatgcagaagccagcaatgtcaggtggtatggacccgctgctgctgaatggtatgtatgaccagggtgttgtgcgtcagcacgttagtgcacaggtgaccaccgggagtgccagcagcgtcgccctgcctgctcctggacagaagactcagatgcttgctctgcccgcaccggatggttcaatgcagactgttggtggtgacccctttgcagcgtcccttgccgtcccaccaccatcctatgtgcagatggcagatttggagaagaagcaacagctcttgtcgcaggagcagattatgtggcaacagtaccagagggacggcatgcaagggcaatcgagcctgaacaagctcgaccaggcttaccacaatggtttcgcgcccaacccgggcatgccctatgggatgcccgcggcgtacaacactgggtattactaccctacttactgaggaagcctattctttattcatccttacagttgctgtgaatttttgttctgtgttgtgatcttactcccagccctggggttgtgtccagcatcagctgttgttcccctgtctctggatcaaaccttttggtctgatatatgtaatgtaattttatttgtttggaaccaaatgcggcatccgagagtagctatagtatattacataatctcaattgatctgtacactgtttctgctaatcttctgcatgttatcacttca

SEQ ID NO: 81279 - DNA, 1729 bp, Zea Mays
tttaaacagctcccctccccctgctctcccagccccaggaggacagtcccgttccagtcagagcgcagccagttcccccggcccctcccccctcccgctcgccggcggcgatggggcacggcgcgagctgcagccgcccaagcgaggaggtggacttcttcggcgcggcgcagtgcggggacacggcccgcctcgccgccgctcttcgctcccgccccaccttgctcgcccgcaccacgctcttcgaccgcctctccgcgctccacatcgccgccgcacacggccacctccaggtggtctccctagcattagatctttgcgtgcaccccgacgtcgttaaccgccacaagcagacggcattgatgctcgcggcgatgcacgggaagaccgactgcgtccggcggcttctcgacgccggcgccaatatcgtgatgttcgattcctcgcatcggcggacgtcgccgtgaagcgagggcacgtcgcgtgcgcggcgctgctgaacccgtcatccgcggagcccctggtctggccgtccgctctcaagttcatcagcgagctggaacccgacgccaaatctctcctcgaagcagccctgatggaggccaacagagagagggagaggaggatcctgaaagggactaagaatgcgttgccgtcgccaccgcaccacgatgacggcgctcatgacaccgccattgccgaggcgagcgacgcggaggtgtgcagcatctgcttcgagcaggcgtgcagcatcgaggtccgggagtgcgggcaccagatgtgctcggcgtgcacgctggcgctgtgctgccacgccaagcccaacccggcgacgcagtcccagccgctgccgacctgcccgttctgccgcggcggcatcgcgcggctggtggtggcgacgcggacgagggctggccacgacgacgagcgggacaagctggagtcgcccaggcaccgccggtcccgccggtccatgaacctcagcggcgacgcgggcagcaccagcagcacactcatgggcagcatcgcctcgtccatcggcaagatgggccgccgacgaacagatagcagcgagcaggtcgacgacaagccgtagcagaaatgcagaatcctttcatgcacccgtccattcataatccacgtgaaatctgtcgccgtcgtggccgccgccatcccatccctccaggaacgaacaagcctgtttttgtagattatttttggcaaatgagttattcacctgtgtagattcattcaagaagagccagtcctgtagctaagctttgatccgatcagcgatcatccgaataagcagcccgtccttccctggcagtggcaggccccatgcggccatgtgataatccgtggatgcgagtctcgaaaggctgctgtacatgtctgattcgcagaggtatggcccggtctgctaatgagaagccggtacaaaaatccatgtgattgattgcccggggctgcggcgctcagggtttggcctatagcagccctcagcatttgtcaaaatccagtgaagatcttggttactgttctggataggaggaaaaggtctattttaccttctctagctatcgcaaaagttatatttttcttaactattaaaccgaccgaacgcgtgatctcgctgtttctgtttattagtatttttctccttttttttatatttattttgcagtaaattatagaaaatataaagagctgctagttgcattggaac

SEQ ID NO: 81280 - DNA, 3067 bp, Zea Mays
ctattattcttttcggattccttccacaccccatgcccgtgcccacctcaggctgcatcacatcatcgcccacgcccagcaccaccaccggcggcgcaccaccggcggcgccagcaccagtgccagcgcaggcggaggcccgggcgacgcggactggcctgctcttcctcagcggcgtcccttcctgtcttccggcgaggaggtcacgtgcaggttaccgatgggtctggataatacttatggcgagctatctggcatgttctatggaggcctgtcttatgatggctacgcagaccacagcagcgcaagtgattatttcaggtttgccgatccacttcctgcagttgtgccccagatggcagcagaagcctgttcaaatccttcctccactgtgtcgagggccaacactgaagctgacaacccggaggattgggaattcatctcagatgagtccctcaactatattagccggatgctcatggaggaggatattgatgagaaagttagcatgtaccaggcggagtcagcggcactgcgtgctgctgcaaagccattctacgacattcttgggcacaagtttccaccgtctcctgaccggcaggtgatgccttggcccatggacagccccagtgagagcagcggtagcatttgcacacaatctgtggcaagtgctgtcactagcagcagtgttggtggcacagtggatagcaaccggtgctacgatgttggacacagtgagcagctggaagcttttcgaggcttgtgtggtcagtcttctcatccacttgttggtgcatcaagtgatgcttccaatgcagtgggtgagctagaagacattttgatcacgaatggtgggatccctgagtatttgtttgagagccttccaacttgggatttcaggagaggtattgaggaagcccagaagagtcttcctgttagcgataaactagtaattgatttagaaactggtggtattgcaagaccccaagaagcaaggaaagatgttcctatgaatgccaaaaaggacgatgtattgaaggccaagaaaaatagacagagtgaagaccttgacctgatggaaggccggaacattaaacagtctgcattttgttccgatgaacctggttggattgagatgttcgatgatctgcttcgccaaactgagaagaaggctacagttctgcgagagctgatgcgtagtgaagcatccaagaattctcaggtcactcagatgaaaggaccaagtggtccacggccacggggaaggaaaccaacaaagaatgatgtggtggaccttaggaccatcctcatccactgtgcacaggctgtggcagcagatgaccgcagaactgctaatgaattgttaaagcaaataaggcaccattccaagccaaacggcgatggaacccagaggttagcacattgttttgcagatggtctcgaggctcgcttggcaggcacagggagtcagctttaccgcaagcttatagcgaaacgtacaactgcctcagacatgcttaaagcctaccaccttttccttgcagcaagcccgtttaagagactttcacattttctttccaatcaaacaatcttgagtttgactaaaaatgcatcaaaggtgcatatcattgactttggcatttattttggattccaatggccatgcctaatcaggcgtctctccaagagggaaggtggtccacctgttctgcgcatcactggaatcgacgtacctcagccaggtttccgccctaccgagagaattgaagagactggacaaaggcttgcagagtatgctgagaagttcaaggtgccttttgagtatcagggaatagcgtcaaagtgggaaagcatccgagttgaggatctcaaagttggcaaggacgaagttgtgattgttaattgcctatacagattcagaaacctgattgatgaaacagttgctgtagacagtcctaggaatagagtgctcaacaccataaggcaagtaaacccagcgattttcatccatggaattgtgaatgggtcatacagcgttcccttcttcatcactcgtttccgtgaggcgctgttccatttctctgcactgtttgacatgctagagacaactgtcccacgggatgatgcacagcgtgcgctcatagagagggaaatgtttggccgagaggcactcaacgttattgcatgtgagggctcagacagagttgagagacccgagacatataaacagtggcaggtgaggaacctcagggctggatttgtccagtctccgttaaaccaagaaattgtgatgaaagccatggacaaagtaaaagacatttatcacaaggacttcgtcatagatgaagacaacggatggctcctacaaggctggaaaggaaggatactctatgcaatttctacatggaagcctaagaataactaggttcttggtctcacgcgtaatctctcctattccatcgatggtggcagctaattaatcagtcctgctatcttataacatttgggccttgacctgtgaacctgtctgatcaaggcaatggcttgaagccggacaatgatcaacatggaggtttgctagatttacatctgtccagccagtactctgataaactggaaaagagcagctgtagacgtctctaacttggtgttggtaccatcacctttatttaattcgtagttttcttctttccatttacttctatgaccggcctggcgtcctattaccaacaaccagatcaccgcttctagttcaaaatggctaggcaaactacctactatcttgagcttaatatttttgacttgtatccatccatgtcaaacatcagttcggttttcagcacctgcagatcagaaattccccaacgagtaagcctaaagcatcaaaatttgttatacgagaacggacgctgctgtttgtgtggaatgtagcatctcatggagtgctttatctttgaattcttcgtttatttatttcatctgttttgtagcaagtgacgctgctgtcacaaaaacgagtccttaaacttgagtggagcactagtttgagaatattactagaaagtgg

SEQ ID NO: 81281 - DNA, 2776 bp, Zea Mays
ctattattcttttcggattccttccacaccccatgcccgtgcccacctcaggctgcatcacatcatcgcccacgcccagcaccaccaccggcggcgcaccaccggcggcgccagcaccagtgccagcgcaggcggaggcccgggcgacgcggactggcctgctcttcctcagcggcgtcccttcctgtaaggtcttccggcgaggaggtcacgtgcaggttaccgatgggtctggataatacttatggcgagctatctggcatgttctatggaggcctgtcttatgatggctacgcagaccacagcagcgcaagtgattatttcaggtttgccgatccacttcctgcagttgtgccccagatggcagcagaagcctgttcaaatccttcctccacttgttggtggcacagtggatagcaaccggtgctacgatgttggacacagtgagcagctggaagcttttcgaggcttgtgtggtcagtcttctcatccacttgttggtgcatcaagtgatgcttccaatgcagtgggtgagctagaagacattttgatcacgaatggtgggatccctgagtatttgtttgagagccttccaacttgggatttcaggagaggtattgaggaagcccagaagagtcttcctgttagcgataaactagtaattgatttagaaactggtggtattgcaagaccccaagaagcaaggaaagatgttcctatgaatgccaaaaaggacgatgtattgaaggccaagaaaaatagacagagtgaagaccttgacctgatggaaggccggaacattaaacagtctgcattttgttccgatgaacctggttggattgagatgttcgatgatctgcttcgccaaactgagaagaaggctacagttctgcgagagctgatgcgtagtgaagcatccaagaattctcaggtcactcagatgaaaggaccaagtggtccacggccacggggaaggaaaccaacaaagaatgatgtggtggaccttaggaccatcctcatccactgtgcacaggctgtggcagcagatgaccgcagaactgctaatgaattgttaaagcaaataaggcaccattccaagccaaacggcgatggaacccagaggttagcacattgttttgcagatggtctcgaggctcgcttggcaggcacagggagtcagctttaccgcaagcttatagcgaaacgtacaactgcctcagacatgcttaaagcctaccaccttttccttgcagcaagcccgtttaagagactttcacattttctttccaatcaaacaatcttgagtttgactaaaaatgcatcaaaggtgcatatcattgactttggcatttattttggattccaatggccatgcctaatcaggcgtctctccaagagggaaggtggtccacctgttctgcgcatcactggaatcgacgtacctcagccaggtttccgccctaccgagagaattgaagagactggacaaaggcttgcagagtatgctgagaagttcaaggtgccttttgagtatcagggaatagcgtcaaagtgggaaagcatccgagttgaggatctcaaagttggcaaggacgaagttgtgattgttaattgcctatacagattcagaaacctgattgatgaaacagttgctgtagacagtcctaggaatagagtgctcaacaccataaggcaagtaaacccagcgattttcatccatggaattgtgaatgggtcatacagcgttcccttcttcatcactcgtttccgtgaggcgctgttccatttctctgcactgtttgacatgctagagacaactgtcccacgggatgatgcacagcgtgcgctcatagagagggaaatgtttggccgagaggcactcaacgttattgcatgtgagggctcagacagagttgagagacccgagacatataaacagtggcaggtgaggaacctcagggctggatttgtccagtctccgttaaaccaagaaattgtgatgaaagccatggacaaagtaaaagacatttatcacaaggacttcgtcatagatgaagacaacggatggctcctacaaggctggaaaggaaggatactctatgcaatttctacatggaagcctaagaataactaggttcttggtctcacgcgtaatctctcctattccatcgatggtggcagctaattaatcagtcctgctatcttataacatttgggccttgacctgtgaacctgtctgatcaaggcaatggcttgaagccggacaatgatcaacatggaggtttgctagatttacatctgtccagccagtactctgataaactggaaaagagcagctgtagacgtctctaacttggtgttggtaccatcacctttatttaattcgtagttttcttctttccatttacttctatgaccggcctggcgtcctattaccaacaaccagatcaccgcttctagttcaaaatggctaggcaaactacctactatcttgagcttaatatttttgacttgtatccatccatgtcaaacatcagttcggttttcagcacctgcagatcagaaattccccaacgagtaagcctaaagcatcaaaatttgttatacgagaacggacgctgctgtttgtgtggaatgtagcatctcatggagtgctttatctttgaattcttcgtttatttatttcatctgttttgtagcaagtgacgctgctgtcacaaaaacgagtccttaaacttgagtggagcactagtttgagaatattactagaaagtgg

SEQ ID NO: 81282 - DNA, 3225 bp, Zea Mays
agccgtccccgcgttgtttccttcctcttggcggtcaagtgaagcaacgggaaagctgctttgctcgggtggattctggtgccctgatctctagggtccgaggacgacaaagagaggtgccgtgtgcgatcggttcttgcgtatagttgcatgcctaatttgcgcgagactgctagaattttagccttgtagatggggatctgctgtttggtcgcttctttacccatgcactgtttggttgcttctttactgatgcggtggcgtggatcgtgctaatcaagggagcttctcaccatttctcttgtgatcagccttctctatcttacttccacgcatggttttaggtcttccggcgaggaggtcacgtgcaggttaccgatgggtctggataatacttatggcgagctatctggcatgttctatggaggcctgtcttatgatggctacgcagaccacagcagcgcaagtgattatttcaggtttgccgatccacttcctgcagttgtgccccagatggcagcagaagcctgttcaaatccttcctccactgtgtcgagggccaacactgaagctgacaacccggaggattgggaattcatctcagatgagtccctcaactatattagccggatgctcatggaggaggatattgatgagaaagttagcatgtaccaggcggagtcagcggcactgcgtgctgctgcaaagccattctacgacattcttgggcacaagtttccaccgtctcctgaccggcaggtgatgccttggcccatggacagccccagtgagagcagcggtagcatttgcacacaatctgtggcaagtgctgtcactagcagcagtgttggtggcacagtggatagcaaccggtgctacgatgttggacacagtgagcagctggaagcttttcgaggcttgtgtggtcagtcttctcatccacttgttggtgcatcaagtgatgcttccaatgcagtgggtgagctagaagacattttgatcacgaatggtgggatccctgagtatttgtttgagagccttccaacttgggatttcaggagaggtattgaggaagcccagaagagtcttcctgttagcgataaactagtaattgatttagaaactggtggtattgcaagaccccaagaagcaaggaaagatgttcctatgaatgccaaaaaggacgatgtattgaaggccaagaaaaatagacagagtgaagaccttgacctgatggaaggccggaacattaaacagtctgcattttgttccgatgaacctggttggattgagatgttcgatgatctgcttcgccaaactgagaagaaggctacagttctgcgagagctgatgcgtagtgaagcatccaagaattctcaggtcactcagatgaaaggaccaagtggtccacggccacggggaaggaaaccaacaaagaatgatgtggtggaccttaggaccatcctcatccactgtgcacaggctgtggcagcagatgaccgcagaactgctaatgaattgttaaagcaaataaggcaccattccaagccaaacggcgatggaacccagaggttagcacattgttttgcagatggtctcgaggctcgcttggcaggcacagggagtcagctttaccgcaagcttatagcgaaacgtacaactgcctcagacatgcttaaagcctaccaccttttccttgcagcaagcccgtttaagagactttcacattttctttccaatcaaacaatcttgagtttgactaaaaatgcatcaaaggtgcatatcattgactttggcatttattttggattccaatggccatgcctaatcaggcgtctctccaagagggaaggtggtccacctgttctgcgcatcactggaatcgacgtacctcagccaggtttccgccctaccgagagaattgaagagactggacaaaggcttgcagagtatgctgagaagttcaaggtgccttttgagtatcagggaatagcgtcaaagtgggaaagcatccgagttgaggatctcaaagttggcaaggacgaagttgtgattgttaattgcctatacagattcagaaacctgattgatgaaacagttgctgtagacagtcctaggaatagagtgctcaacaccataaggcaagtaaacccagcgattttcatccatggaattgtgaatgggtcatacagcgttcccttcttcatcactcgtttccgtgaggcgctgttccatttctctgcactgtttgacatgctagagacaactgtcccacgggatgatgcacagcgtgcgctcatagagagggaaatgtttggccgagaggcactcaacgttattgcatgtgagggctcagacagagttgagagacccgagacatataaacagtggcaggtgaggaacctcagggctggatttgtccagtctccgttaaaccaagaaattgtgatgaaagccatggacaaagtaaaagacatttatcacaaggacttcgtcatagatgaagacaacggatggctcctacaaggctggaaaggaaggatactctatgcaatttctacatggaagcctaagaataactaggttcttggtctcacgcgtaatctctcctattccatcgatggtggcagctaattaatcagtcctgctatcttataacatttgggccttgacctgtgaacctgtctgatcaaggcaatggcttgaagccggacaatgatcaacatggaggtttgctagatttacatctgtccagccagtactctgataaactggaaaagagcagctgtagacgtctctaacttggtgttggtaccatcacctttatttaattcgtagttttcttctttccatttacttctatgaccggcctggcgtcctattaccaacaaccagatcaccgcttctagttcaaaatggctaggcaaactacctactatcttgagcttaatatttttgacttgtatccatccatgtcaaacatcagttcggttttcagcacctgcagatcagaaattccccaacgagtaagcctaaagcatcaaaatttgttatacgagaacggacgctgctgtttgtgtggaatgtagcatctcatggagtgctttatctttgaattcttcgtttatttatttcatctgttttgtagcaagtgacgctgctgtcacaaaaacgagtccttaaacttgagtggagcactagtttgagaatattactagaaagtgg

SEQ ID NO: 81283 - DNA, 891 bp, Zea Mays
aaacaccacaccacaccagaccacaggttcttgagaatgtgcttgagaacagggtcgggcttgatgttgtcgtacggcagccttccgtggacgaaggcgtggtactcatcgtaatcgaagctgtagccgatcgcctggggaatccatgcatgagaacctttttagttcaccgattcactagtagaaaaaaaactgaacaattcaagggatcaggaaagacgcgatacacgtaccctgaggccagccatcgtggtgccgtagttcttgtacagcagatttcccaggttctcgatcttgctctcgtcaatacccagcttctcgaccatgtaatctggagtgaatgacagaagcgagaaggtgcaagcaggcattcagttcgctgaaagttcagatgaggtaaaaacgttccaaaaaacaaaaacaagcagcggtcagtaacagcaggagaagaggaacctcaccttcaatgttcttcttgacatggtccgcgatcccggagctcagcgggtacagggtgtcgtcgaggtctgtaggcgagaacaggtcagaaaacccttgcattccgtgaagaggcagaagaagaaggaggaggaggcaacaacagaacgatacaaaaacgagccgggcggcggcgtatctgcaggaagcggagcagcggcttaccgaagagcaggcagtcgaacttgggctcctggaccttgtggcagcgatcctcgaactccatgcctgggaactgtggggaagagagagctgcagagagagaatcgagattagcaggcagtcccaagacttgtcacgggaatacattccagcccaaattacagttcctgtcatgtcattatttacgcccccctcagaattttatcattgattctagaacactgaaaaact

SEQ ID NO: 81284 - DNA, 1036 bp, Zea Mays
gggacgagagagcggcagcggcgcacaagagcagagcggcgacaggaaggatccgttgatcggaaatgccttcgacccgctgcctctaccaagtggtgttccagtgcctttgtgtttttgcggtgatccgcaaggttcccaagttcgaggaagatgacatgtataggcagaggtattgggcgtgtgacaactatgcttattagctgacgattgctcgacgcgacattaacttgatgaaagacaaggagtggatggagaagctggaagtgcgatgcagaggacaaggaaaggatggagaaaaaaacaagaggagcttgcgacggagcaacaatgggcagaagaggagaaaatgaggcgtgttgacacagggagaaggagaagaagcttaagcatgcatgccgtacgaaggaagcaaaggaggagaaccccgatgcttttaggaaggaaaagtgacctcattgcactcagtagactcgggggttctacattgtttaagtctcaaacaatgttatatactaatgcacttttcattgtcctttaattaatggactcgattttgtggtttcttatagtgcatcttctagtacttcagttttcttgtgtgtgcatattttatgtttcatgcattgatacaaatattggcacttaaaataacatgctgcagaatgaaagcaattgaacatgcagaacaacaaacacatggaacgacatgtgaggacttgtaccaaacaatgtcatcttgcggacgtgatctggttttgctgcaaggatgggataagaagaagaggagaggagaatcatctacatccctaacgataacatctaacggcaggcaaattgggattgagggcggccgggagaggggaaccgctggagaagagtactcgctagagaaagcctcgccgttcttcatggtcacacgttggcaggcgaatcatgccaacgagtacagattagggaaactgagtggagagggtgtgtactgagtactgaccagcctttgaggatgagggtgcactgattggtggaagctgcc

SEQ ID NO: 81285 - DNA, 921 bp, Zea Mays
cggcgcacaagagcagagcggcgacaggaaggatccgttgatcggaaatgccttcgacccgctgcctctaccaagtggtgttccagtgcctttgtgtttttgcggtgatccgcaaggttcccaagttcgaggaagatgacatgtataggcagagaatgaaagcaattgaacatgcagaacaacaaacacatggaacgacatgtgaggacttgtaccaaacaatgtcatcttgcggacgtgatctggttttgctgcaaggatgggataaggttcccctaaatttacaggagaatttttatgaatggattcctttggggggataaagactacaacaaaaatcatgcccatcgtttcatgcaatgattttgttccattcttcgtttcatcgctcagtagaccacaagcattaagcgaaagcgcttgttgttatctttcttttctccccaaaattctagctcctagttcttcccaaacgtgagaccatgcaaaaccagaatattatgcacaaaggtgcgaatcatttagcttatcactaggcttaactataaatctgttgcaactttgtaagggcagattgccgattccccagagatctcacaggatgacaggaatcacgcccgaccacttattctaccttaagctcttgcctaatcactgaatccagaagaagaggagaggagaatcatctacatccctaacgataacatctaacggcaggcaaattgggattgagggcggccgggagaggggaaccgctggagaagagtactcgctagagaaagcctcgccgttcttcatggtcacacgttggcaggcgaatcatgccaacgagtacagattagggaaactgagtggagagggtgtgtactgagtactgaccagcctttgaggatgagggtgcactgattggtggaagctgcc

SEQ ID NO: 81286 - DNA, 1197 bp, Zea Mays
agccacgccggatccaccgtgtcagcatctgaatcaagcaagcaaatgcagaaagggaacgtgaatcggagtgctgcttactgtgatggccggtctggctctggcctgttggcaaaatctggaagccgtcaacgccattataaccgttgtatataatgtattatcgaatcgtagtggttcttataacaaaacaaattgaattttaggaaggatccgttgatcggaaatgccttcgacccgctgcctctaccaagtggtgttccagtgcctttgtgtttttgcggtgatccgcaaggttcccaagttcgaggaagatgacatgtataggcagaggtattgggcgtgtgacaactatgcttattagctgacgattgctcgacgcgacattaacttgatgaaagacaaggagtggatggagaagctggaagtgcgatgcagaggacaaggaaaggatggagaaaaaaacaagaggagcttgcgacggagcaacaatgggcagaagaggagaaaatgaggcgtgttgacacagggagaaggagaagaagcttaagcatgcatgccgtacgaaggaagcaaaggaggagaaccccgatgcttttaggaaggaaaagtgacctcattgcactcagtagactcgggggttctacattgtttaagtctcaaacaatgttatatactaatgcacttttcattgtcctttaattaatggactcgattttgtggtttcttatagtgcatcttctagtacttcagttttcttgtgtgtgcatattttatgtttcatgcattgatacaaatattggcacttaaaataacatgctgcagaatgaaagcaattgaacatgcagaacaacaaacacatggaacgacatgtgaggacttgtaccaaacaatgtcatcttgcggacgtgatctggttttgctgcaaggatgggataagaagaagaggagaggagaatcatctacatccctaacgataacatctaacggcaggcaaattgggattgagggcggccgggagaggggaaccgctggagaagagtactcgctagagaaagcctcgccgttcttcatggtcacacgttggcaggcgaatcatgccaacgagtacagattagggaaactgagtggagagggtgtgtactgagtactgaccagcctttgaggatgagggtgcactgattggtggaagctgcc

SEQ ID NO: 81287 - DNA, 1609 bp, Zea Mays
gccacgccggatccaccgtgtcagcatctgaatcaagcaagcaaatgcagaaagggaacgtgaatcggagtgctgcttactgtgatggccggtctggctctggcctgttggcaaaatctggaagccgtcaacgccattataaccgttgtatataatgtattatcgaatcgtagtggttcttataacaaaacaaattgaattttaggaaggatccgttgatcggaaatgccttcgacccgctgcctctaccaagtggtgttccagtgcctttgtgtttttgcggtgatccgcaaggttcccaagttcgaggaagatgacatgtataggcagaggtattgggcgtgtgacaactatgcttattagctgacgattgctcgacgcgacattaacttgatggtgagaattttatggtgtaacatttatcttgtttcatatgaaccaatgcatgatttatttggctcataccatttgcatgctctctagacttctccactgctctttgattttaagcagtggattgacacagagatatcacagaaagacaaggagtggatggagaagctggaagtgcgatgcagaggacaaggaaaggatggagaaaaaaacaagaggagcttgcgacggagcaacaatgggcagaagaggagaaaatgaggcgtgttgacacagggagaaggagaagaagcttaagcatgcatgccgtacgaaggaagcaaaggaggagaaccccgatgcttttaggaaggaaaagtgacctcattgcactcagtagactcgggggttctacattgtttaagtctcaaacaatgttatatactaatgcacttttcattgtcctttaattaatggactcgattttgtggtttcttatagtgcatcttctagtacttcagttttcttgtgtgtgcatattttatgtttcatgcattgatacaaatattggcacttaaaataacatgctgcagaatgaaagcaattgaacatgcagaacaacaaacacatggaacgacatgtgaggacttgtaccaaacaatggtaaaaaagtcttcatctaaatcgaacatgccttagtgaattaaagcaaccaacggacacttggatcttcatatgaataacattgtcccttcctagtagtgctagaaaagtaggctacctaataaaataaaagtcttcctttggttggctacacatgatagattacaaactggagtgagtttaggaaaaacaaattggaagggaataaagattgttgtctctgtggggttagtgaaactgctgagtgctgaccatgtcttcttttttttcagtcatcttgcggacgtgatctggttttgctgcaaggatgggataagaagaagaggagaggagaatcatctacatccctaacgataacatctaacggcaggcaaattgggattgagggcggccgggagaggggaaccgctggagaagagtactcgctagagaaagcctcgccgttcttcatggtcacacgttggcaggcgaatcatgccaacgagtacagattagggaaactgagtggagagggtgtgtactgagtactgaccagcctttgaggatgagggtgcactgattggtggaagctgcc

SEQ ID NO: 81288 - DNA, 1245 bp, Zea Mays
gccggatccaccgtgtcagcatctgaatcaagcaagcaaatgcagaaagggaacgtgaatcggagtgctgcttactgtgatggccggtctggctctggcctgttggcaaaatctggaagccgtcaacgccattataaccgttgtatataatgtattatcgaatcgtagtggttcttataacaaaacaaattgaattttaggaaggatccgttgatcggaaatgccttcgacccgctgcctctaccaagtggtgttccagtgcctttgtgtttttgcggtgatccgcaaggttcccaagttcgaggaagatgacatgtataggcagaggtattgggcgtgtgacaactatgcttattagctgacgattgctcgacgcgacattaacttgatgacttctccactgctctttgattttaagcagtggattgacacagagatatcacagaaagacaaggagtggatggagaagctggaagtgcgatgcagaggacaaggaaaggatggagaaaaaaacaagaggagcttgcgacggagcaacaatgggcagaagaggagaaaatgaggcgtgttgacacagggagaaggagaagaagcttaagcatgcatgccgtacgaaggaagcaaaggaggagaaccccgatgcttttaggaaggaaaagtgacctcattgcactcagtagactcgggggttctacattgtttaagtctcaaacaatgttatatactaatgcacttttcattgtcctttaattaatggactcgattttgtggtttcttatagtgcatcttctagtacttcagttttcttgtgtgtgcatattttatgtttcatgcattgatacaaatattggcacttaaaataacatgctgcagaatgaaagcaattgaacatgcagaacaacaaacacatggaacgacatgtgaggacttgtaccaaacaatgtcatcttgcggacgtgatctggttttgctgcaaggatgggataagaagaagaggagaggagaatcatctacatccctaacgataacatctaacggcaggcaaattgggattgagggcggccgggagaggggaaccgctggagaagagtactcgctagagaaagcctcgccgttcttcatggtcacacgttggcaggcgaatcatgccaacgagtacagattagggaaactgagtggagagggtgtgtactgagtactgaccagcctttgaggatgagggtgcactgattggtggaagctgcc

SEQ ID NO: 81289 - DNA, 1366 bp, Zea Mays
gccggatccaccgtgtcagcatctgaatcaagcaagcaaatgcagaaagggaacgtgaatcggagtgctgcttactgtgatggccggtctggctctggcctgttggcaaaatctggaagccgtcaacgccattataaccgttgtatataatgtattatcgaatcgtagtggttcttataacaaaacaaattgaattttaggaaggatccgttgatcggaaatgccttcgacccgctgcctctaccaagtggtgttccagtgcctttgtgtttttgcggtgatccgcaaggttcccaagttcgaggaagatgacatgtataggcagagaatgaaagcaattgaacatgcagaacaacaaacacatggaacgacatgtgaggacttgtaccaaacaatggtaaaaaagtcttcatctaaatcgaacatgccttagtgaattaaagcaaccaacggacacttggatcttcatatgaataacattgtcccttcctagtagtgctagaaaagtaggctacctaataaaataaaagtcttcctttggttggctacacatgatagattacaaactggagtgagtttaggaaaaacaaattggaagggaataaagattgttgtctctgtggggttagtgaaactgctgagtgctgaccatgtcttcttttttttcagtcatcttgcggacgtgatctggttttgctgcaaggatgggataaggttcccctaaatttacaggagaatttttatgaatggattcctttggggggataaagactacaacaaaaatcatgcccatcgtttcatgcaatgattttgttccattcttcgtttcatcgctcagtagaccacaagcattaagcgaaagcgcttgttgttatctttcttttctccccaaaattctagctcctagttcttcccaaacgtgagaccatgcaaaaccagaatattatgcacaaaggtgcgaatcatttagcttatcactaggcttaactataaatctgttgcaactttgtaagggcagattgccgattccccagagatctcacaggatgacaggaatcacgcccgaccacttattctaccttaagctcttgcctaatcactgaatccagaagaagaggagaggagaatcatctacatccctaacgataacatctaacggcaggcaaattgggattgagggcggccgggagaggggaaccgctggagaagagtactcgctagagaaagcctcgccgttcttcatggtcacacgttggcaggcgaatcatgccaacgagtacagattagggaaactgagtggagagggtgtgtactgagtactgaccagcctttgaggatgagggtgcactgattggtggaagctgcc

SEQ ID NO: 81290 - DNA, 2902 bp, Zea Mays
aacaaattgatatatatatcatattccaacgaggagaatcttatgaaagacgttggaatcttataaaaggagcggatagggataaccacatggccggccccgccgcggggtgaacacgacggcctgacccggtttccttctctcgccttctcttttctgtaacgcgcagtatacggcgccgttgtttctccccacggcggcatctcctgcgtggcgccgccttccggcgagagctgcgacggcggcgcactaggcgagttactggacacgagagcgatgggggacggcgccagcggccgcggcggcggaggcggggccgggcggcgggtgggggagtacgagctgctgcgaccgatcgggtcgggggcgtactcgcaggtgtggctggggaggcaccgggcgcggggcacggaggtggcggtgaaggagatcgccatggagcgtctcagcaacaagctccgcgagagcctcctctccgaggtcgacatcctccgtcgcatcagacacgataacgtcattgcactccacgaatccatcaaggaccatgggagcatatatctcatattggagtattgtcgaggtggtgacttacatgcataccttcaacgtcataaaagagtttctgaaaaggttgctaggcatttcatccgtcagttagcatctggtctgcaaatgcttcgcgataataacgtggttcaccgagacctaaaacctcagaacattcttcttgttgaaaataatgaaaattctctgttgaagatcgctgactttggatttgcaaaatttttgcaaccttttgccctagctgaaactctttgtggttcgccactttacatggctccagaagtcatgcaagctcagaagtatgatgcaaaggcagatctgtggagtgtcggtgtcattctatatcaacttgttactggaagaccaccttttaatgggggcaatcagatccagttgcttaaaaatatactcaggacatgtgaaatacgcttcccatctgattgtgacttgagccatggctgcattgacttgtgcagaaagttgctgcggctcaattcagtggagcggcttacagttgaagaatttgtgcaccacccatttctttctgaacatgctccagagaagactttgagccttacacaatctgacataagagatggctttccaagaaataatagcagtccaacaaggcattcaaaccatagttcacaagaagattgtatgccttttcctttagatgatgagtcaagtggacaggacgagggtccagttcctgacagtatgtcttgggcaataatcatgcacctagtagccaacaccatggccattctggtaaagtgaccaaggaaagcaagattcatgaagtacaaggtcaaaaggttgtttatccagaagattcccctatcattgattcattagagtttgtagatcaggaatacgtcttcgtgtctggaccacacctggagggatcatcatcttcaacaaatgcctctcagcagcttaatgtaccagcaaaatatgataattcgtctgtttcaccaccaaagttaactttcatgagtgcaccaatgccgataaatggtttgccgattaatagacaacaacttgctgggactggtagctttgacagccactgttctcctgcatctggcacttcacagggatctgcagatataagtgatgccatggatcagcccccatctgattatctgacgaggattagattgttggagcaatatgcatcagccatagcagggttggtcagagatgagatcaaaggtggcagacacttggaagcgttctctattcagctaattgttcttgcaacctggaagcaagcaattcatataggaaatacctttgtagcttcacctgcaagggagagtccctcacaggatatccctatgaaggggcatattgctggtgcttcccatttgcctgcgaactcaaagctagctgatgatgcctgcatgcagatagagaaacagtttctctctgaagttgaatatgctgaagaactagccagcattgtgggacagatagctgatggtacagagatgccagatgcaattgaaatgatatttcagtcggctttactcataggaaggcgaggcggtgttgatgaaatgtttgggaaagccgcggatgccatgactgggtatatgagggcggtatccatgctgcggtttctcctggtcgaggcaccatcactcgccctcaacccccctttgactctaacgagatccgatcggaatcgactgcgcacatacattgacgctctcaacaccaggctctgtcagatgcagagccagaggcattgactgctgccatgcgccctcaaatcttgtccaggtgttgtacaatattctttcatttgtaaatatatttgttggcccaaactagggcatatgtaacatgtcagaactgtggaactaggcagagcagcgaaaatctattgtaaatatatttgtagtgtggaattaggcagagtgtacgtggtaggttcattctgtgtcgattcaggcagaagcttgaaaaccgaataaccaataatagtcacgtgtggaaatgtaaacagctcggcctctacttcgtagattctttattatatattagtaaattagctcgataaaaaaaattatgcacctaatatcatctcatctatgttgtcaaatttatcatgctggatgtctccgatcactatatcaacaacgtgttgatcttcttgatcaccattttgccttcgtctaagtctctattgcatcatttgaactatatccataaacactagcaaagaatattagttcaaatggttatataggtcatcaaacactaaaactttataatcaaataatcaaatgggtctctatccatttttcttacaatattccaatctttg

SEQ ID NO: 81291 - DNA, 2946 bp, Zea Mays
tataaaaggagcggatagggataaccacatggccggccccgccgcggggtgaacacgacggcctgacccggtttccttctctcgccttctcttttctgtaacgcgcagtatacggcgccgttgtttctccccacggcggcatctcctgcgtggcgccgccttccggcgagagctgcgacggcggcgcactaggcgagttactggacacgagagcgatgggggacggcgccagcggccgcggcggcggaggcggggccgggcggcgggtgggggagtacgagctgctgcgaccgatcgggtcgggggcgtactcgcaggtgtggctggggaggcaccgggcgcggggcacggaggtggcggtgaaggagatcgccatggagcgtctcagcaacaagctccgcgagagcctcctctccgaggtcgacatcctccgtcgcatcagacacgataacgtcattgcactccacgaatccatcaaggaccatgggagcatatatctcatattggagtattgtcgaggtggtgacttacatgcataccttcaacgtcataaaagagtttctgaaaaggttgctaggcatttcatccgtcagttagcatctggtctgcaaatgcttcgcgataataacgtggttcaccgagacctaaaacctcagaacattcttcttgttgaaaataatgaaaattctctgttgaagatcgctgactttggatttgcaaaatttttgcaaccttttgccctagctgaaactctttgtggttcgccactttacatggctccagaagtcatgcaagctcagaagtatgatgcaaagaacaggcagatctgtggagtgtcggtgtcattctatatcaacttgttactggaagaccaccttttaatgggggcaatcagatccagttgcttaaaaatatactcaggacatgtgaaatacgcttcccatctgattgtgacttgagccatggctgcattgacttgtgcagaaagttgctgcggctcaattcagtggagcggcttacagttgaagaatttgtgcaccacccatttctttctgaacatgctccagagaagactttgagccttacacaatctgacataagagatggctttccaagaaataatagcagtccaacaaggcattcaaaccatagttcacaagaagattgtatgccttttcctttagatgatgagtcaagtggacaggacgagggtccagttcctgacagtaagagtctgatgaaatcttatggatttcccatgggtaaaagattggataaaacttcaggccagaagagtccaccgaaacataacagtttgttctccaggtatgtcttgggcaataatcatgcacctagtagccaacaccatggccattctggtaaagtgaccaaggaaagcaagattcatgaagtacaaggtcaaaaggttgtttatccagaagattcccctatcattgattcattagagtttgtagatcaggaatacgtcttcgtgtctggaccacacctggagggatcatcatcttcaacaaatgcctctcagcagcttaatgtaccagcaaaatatgataattcgtctgtttcaccaccaaagttaactttcatgagtgcaccaatgccgataaatggtttgccgattaatagacaacaacttgctgggactggtagctttgacagccactgttctcctgcatctggcacttcacagggatctgcagatataagtgatgccatggatcagcccccatctgattatctgacgaggattagattgttggagcaatatgcatcagccatagcagggttggtcagagatgagatcaaaggtggcagacacttggaagcgttctctattcagctaattgttcttgcaacctggaagcaagcaattcatataggaaatacctttgtagcttcacctgcaagggagagtccctcacaggatatccctatgaaggggcatattgctggtgcttcccatttgcctgcgaactcaaagctagctgatgatgcctgcatgcagatagagaaacagtttctctctgaagttgaatatgctgaagaactagccagcattgtgggacagatagctgatggtacagagatgccagatgcaattgaaatgatatttcagtcggctttactcataggaaggcgaggcggtgttgatgaaatgtttgggaaagccgcggatgccatgactgggtatatgagggcggtatccatgctgcggtttctcctggtcgaggcaccatcactcgccctcaacccccctttgactctaacgagatccgatcggaatcgactgcgcacatacattgacgctctcaacaccaggctctgtcagatgcagagccagaggcattgactgctgccatgcgccctcaaatcttgtccaggtgttgtacaatattctttcatttgtaaatatatttgttggcccaaactagggcatatgtaacatgtcagaactgtggaactaggcagagcagcgaaaatctattgtaaatatatttgtagtgtggaattaggcagagtgtacgtggtaggttcattctgtgtcgattcaggcagaagcttgaaaaccgaataaccaataatagtcacgtgtggaaatgtaaacagctcggcctctacttcgtagattctttattatatattagtaaattagctcgataaaaaaaattatgcacctaatatcatctcatctatgttgtcaaatttatcatgctggatgtctccgatcactatatcaacaacgtgttgatcttcttgatcaccattttgccttcgtctaagtctctattgcatcatttgaactatatccataaacactagcaaagaatattagttcaaatggttatataggtcatcaaacactaaaactttataatcaaataatcaaatgggtctctatccatttttcttacaatattccaatctttg

SEQ ID NO: 81292 - DNA, 3478 bp, Zea Mays
gaacacgacggcctgacccggtttccttctctcgccttctcttttctgtaacgcgcagtatacggcgccgttgtttctccccacggcggcatctcctgcgtggcgccgccttccggcgagagctgcgacggcggcgcactaggcgagttactggacacgagagcgatgggggacggcgccagcggccgcggcggcggaggcggggccgggcggcgggtgggggagtacgagctgctgcgaccgatcgggtcgggggcgtactcgcaggtgtggctggggaggcaccgggcgcggggcacggaggtggcggtgaaggagatcgccatggagcgtctcagcaacaagctccgcgagagcctcctctccgaggtcgacatcctccgtcgcatcagacacgataacgtcattgcactccacgaatccatcaaggaccatgggagcatatatctcatattggagtattgtcgaggtggtgacttacatgcataccttcaacgtcataaaagagtttctgaaaaggttgctaggcatttcatccgtcagttagcatctggtctgcaaatgcttcgcgataataacgtggttcaccgagacctaaaacctcagaacattcttcttgttgaaaataatgaaaattctctgttgaagatcgctgactttggatttgcaaaatttttgcaaccttttgccctagctgaaactctttgtggttcgccactttacatggctccagaagtcatgcaagctcagaagtatgatgcaaaggcagatctgtggagtgtcggtgtcattctatatcaacttgttactggaagaccaccttttaatgggggcaatcagatccagttgcttaaaaatatactcaggacatgtgaaatacgcttcccatctgattgtgacttgagccatggctgcattgacttgtgcagaaagttgctgcggctcaattcaggttaaatcactaatttgtagttacatcgagttcctatggtatccgcactgagcacatagagctttatgatattgtcattgatggttcaaagaagttttccctgcgttattattcttatgttgtgacttggaatggggaaatggcacaagtattgttgtattgatgtattacatttgttctttcgaaaatgaatggtaccatgcaagggcagttttataccctgccatttgtccttttattttactatatgactctgttagtacctgtttttcagatttgatgttcaactcagactattccttaacattaagaaattctctagcggatatttaacctgttttagataaaagtgtttttagaataccacttttttcaaggcatactttcttctgcaaaagtatgtttaggaaataagaacatcaaaggtgtgttgtttttgtttttgcatttgatcatagcactagtgcctaaactgataatgtacagctgtagcataacctcatatctagtatttaacagaggctaaaatgtaatgttctactattgctgttatcacatacagttatcggctaacattaatggtgctgtgctaatctgtgtaattgatccagtggagcggcttacagttgaagaatttgtgcaccacccatttctttctgaacatgctccagagaagactttgagccttacacaatctgacataagagatggctttccaagaaataatagcagtccaacaaggcattcaaaccatagttcacaagaagattgtatgccttttcctttagatgatgagtcaagtggacaggacgagggtccagttcctgacagtaagagtctgatgaaatcttatggatttcccatgggtaaaagattggataaaacttcaggccagaagagtccaccgaaacataacagtttgttctccaggtatgtcttgggcaataatcatgcacctagtagccaacaccatggccattctggtaaagtgaccaaggaaagcaagattcatgaagtacaaggtcaaaaggttgtttatccagaagagtttgtagatcaggaatacgtcttcgtgtctggaccacacctggagggatcatcatcttcaacaaatgcctctcagcagcttaatgtaccagcaaaatatgataattcgtctgtttcaccaccaaagttaactttcatgagtgcaccaatgccgataaatggtttgccgattaatagacaacaacttgctgggactggtagctttgacagccactgttctcctgcatctggcacttcacagggatctgcagatataagtgatgccatggatcagcccccatctgattatctgacgaggattagattgttggagcaatatgcatcagccatagcagggttggtcagagatgagatcaaaggtggcagacacttggaagcgttctctattcagctaattgttcttgcaacctggaagcaagcaattcatataggaaatacctttgtagcttcacctgcaagggagagtccctcacaggatatccctatgaaggggcatattgctggtgcttcccatttgcctgcgaactcaaagctagctgatgatgcctgcatgcagatagagaaacagtttctctctgaagttgaatatgctgaagaactagccagcattgtgggacagatagctgatggtacagagatgccagatgcaattgaaatgatatttcagtcggctttactcataggaaggcgaggcggtgttgatgaaatgtttgggaaagccgcggatgccatgactgggtatatgagggcggtatccatgctgcggtttctcctggtcgaggcaccatcactcgccctcaacccccctttgactctaacgagatccgatcggaatcgactgcgcacatacattgacgctctcaacaccaggctctgtcagatgcagagccagaggcattgactgctgccatgcgccctcaaatcttgtccaggtgttgtacaatattctttcatttgtaaatatatttgttggcccaaactagggcatatgtaacatgtcagaactgtggaactaggcagagcagcgaaaatctattgtaaatatatttgtagtgtggaattaggcagagtgtacgtggtaggttcattctgtgtcgattcaggcagaagcttgaaaaccgaataaccaataatagtcacgtgtggaaatgtaaacagctcggcctctacttcgtagattctttattatatattagtaaattagctcgataaaaaaaattatgcacctaatatcatctcatctatgttgtcaaatttatcatgctggatgtctccgatcactatatcaacaacgtgttgatcttcttgatcaccattttgccttcgtctaagtctctattgcatcatttgaactatatccataaacactagcaaagaatattagttcaaatggttatataggtcatcaaacactaaaactttataatcaaataatcaaatgggtctctatccatttttcttacaatattccaatctttg

SEQ ID NO: 81293 - DNA, 3389 bp, Zea Mays
tgacccggtttccttctctcgccttctcttttctgtaacgcgcagtatacggcgccgttgtttctccccacggcggcatctcctgcgtggcgccgccttccggcgagagctgcgacggcggcgcactaggcgagttactggacacgagagcgatgggggacggcgccagcggccgcggcggcggaggcggggccgggcggcgggtgggggagtacgagctgctgcgaccgatcgggtcgggggcgtactcgcaggtgtggctggggaggcaccgggcgcggggcacggaggtggcggtgaaggagatcgccatggagcgtctcagcaacaagctccgcgagagcctcctctccgaggtcgacatcctccgtcgcatcagacacgataacgtcattgcactccacgaatccatcaaggaccatgggagcatatatctcatattggagtattgtcgaggtggtgacttacatgcataccttcaacgtcataaaagagtttctgaaaaggttgctaggcatttcatccgtcagttagcatctggtctgcaaatgcttcgcgataataacgtggttcaccgagacctaaaacctcagaacattcttcttgttgaaaataatgaaaattctctgttgaagatcgctgactttggatttgcaaaatttttgcaaccttttgccctagctgaaactctttgtggttcgccactttacatggctccagaagtcatgcaagctcagaagtatgatgcaaaggcagatctgtggagtgtcggtgtcattctatatcaacttgttactggaagaccaccttttaatgggggcaatcagatccagttgcttaaaaatatactcaggacatgtgaaatacgcttcccatctgattgtgacttgagccatggctgcattgacttgtgcagaaagttgctgcggctcaattcaggttaaatcactaatttgtagttacatcgagttcctatggtatccgcactgagcacatagagctttatgatattgtcattgatggttcaaagaagttttccctgcgttattattcttatgttgtgacttggaatggggaaatggcacaagtattgttgtattgatgtattacatttgttctttcgaaaatgaatggtaccatgcaagggcagttttataccctgccatttgtccttttattttactatatgactctgttagtacctgtttttcagatttgatgttcaactcagactattccttaacattaagaaattctctagcggatatttaacctgttttagataaaagtgtttttagaataccacttttttcaaggcatactttcttctgcaaaagtatgtttaggaaataagaacatcaaaggtgtgttgtttttgtttttgcatttgatcatagcactagtgcctaaactgataatgtacagctgtagcataacctcatatctagtatttaacagaggctaaaatgtaatgttctactattgctgttatcacatacagttatcggctaacattaatggtgctgtgctaatctgtgtaattgatccagtggagcggcttacagttgaagaatttgtgcaccacccatttctttctgaacatgctccagagaagactttgagccttacacaatctgacataagagatggctttccaagaaataatagcagtccaacaaggcattcaaaccatagttcacaagaagattgtatgccttttcctttagatgatgagtcaagtggacaggacgagggtccagttcctgacagtatgtcttgggcaataatcatgcacctagtagccaacaccatggccattctggtaaagtgaccaaggaaagcaagattcatgaagtacaaggtcaaaaggttgtttatccagaagattcccctatcattgattcattagagtttgtagatcaggaatacgtcttcgtgtctggaccacacctggagggatcatcatcttcaacaaatgcctctcagcagcttaatgtaccagcaaaatatgataattcgtctgtttcaccaccaaagttaactttcatgagtgcaccaatgccgataaatggtttgccgattaatagacaacaacttgctgggactggtagctttgacagccactgttctcctgcatctggcacttcacagggatctgcagatataagtgatgccatggatcagcccccatctgattatctgacgaggattagattgttggagcaatatgcatcagccatagcagggttggtcagagatgagatcaaaggtggcagacacttggaagcgttctctattcagctaattgttcttgcaacctggaagcaagcaattcatataggaaatacctttgtagcttcacctgcaagggagagtccctcacaggatatccctatgaaggggcatattgctggtgcttcccatttgcctgcgaactcaaagctagctgatgatgcctgcatgcagatagagaaacagtttctctctgaagttgaatatgctgaagaactagccagcattgtgggacagatagctgatggtacagagatgccagatgcaattgaaatgatatttcagtcggctttactcataggaaggcgaggcggtgttgatgaaatgtttgggaaagccgcggatgccatgactgggtatatgagggcggtatccatgctgcggtttctcctggtcgaggcaccatcactcgccctcaacccccctttgactctaacgagatccgatcggaatcgactgcgcacatacattgacgctctcaacaccaggctctgtcagatgcagagccagaggcattgactgctgccatgcgccctcaaatcttgtccaggtgttgtacaatattctttcatttgtaaatatatttgttggcccaaactagggcatatgtaacatgtcagaactgtggaactaggcagagcagcgaaaatctattgtaaatatatttgtagtgtggaattaggcagagtgtacgtggtaggttcattctgtgtcgattcaggcagaagcttgaaaaccgaataaccaataatagtcacgtgtggaaatgtaaacagctcggcctctacttcgtagattctttattatatattagtaaattagctcgataaaaaaaattatgcacctaatatcatctcatctatgttgtcaaatttatcatgctggatgtctccgatcactatatcaacaacgtgttgatcttcttgatcaccattttgccttcgtctaagtctctattgcatcatttgaactatatccataaacactagcaaagaatattagttcaaatggttatataggtcatcaaacactaaaactttataatcaaataatcaaatgggtctctatccatttttcttacaatattccaatctttg

SEQ ID NO: 81294 - DNA, 2757 bp, Zea Mays
cccggtttccttctctcgccttctcttttctgtaacgcgcagtatacggcgccgttgtttctccccacggcggcatctcctgcgtggcgccgccttccggcgagagctgcgacggcggcgcactaggcgagttactggacacgagagcgatgggggacggcgccagcggccgcggcggcggaggcggggccgggcggcgggtgggggagtacgagctgctgcgaccgatcgggtcgggggcgtactcgcaggtgtggctggggaggcaccgggcgcggggcacggaggtggcggtgaaggagatcgccatggagcgtctcagcaacaagctccgcgagagcctcctctccgaggtcgacatcctccgtcgcatcagacacgataacgtcattgcactccacgaatccatcaagcatctggtctgcaaatgcttcgcgataataacgtggttcaccgagacctaaaacctcagaacattcttcttgttgaaaataatgaaaattctctgttgaagatcgctgactttggatttgcaaaatttttgcaaccttttgccctagctgaaactctttgtggttcgccactttacatggctccagaagtcatgcaagctcagaagtatgatgcaaaggcagatctgtggagtgtcggtgtcattctatatcaacttgttactggaagaccaccttttaatgggggcaatcagatccagttgcttaaaaatatactcaggacatgtgaaatacgcttcccatctgattgtgacttgagccatggctgcattgacttgtgcagaaagttgctgcggctcaattcagtggagcggcttacagttgaagaatttgtgcaccacccatttctttctgaacatgctccagagaagactttgagccttacacaatctgacataagagatggctttccaagaaataatagcagtccaacaaggcattcaaaccatagttcacaagaagattgtatgccttttcctttagatgatgagtcaagtggacaggacgagggtccagttcctgacagtaagagtctgatgaaatcttatggatttcccatgggtaaaagattggataaaacttcaggccagaagagtccaccgaaacataacagtttgttctccaggtatgtcttgggcaataatcatgcacctagtagccaacaccatggccattctggtaaagtgaccaaggaaagcaagattcatgaagtacaaggtcaaaaggttgtttatccagaagattcccctatcattgattcattagagtttgtagatcaggaatacgtcttcgtgtctggaccacacctggagggatcatcatcttcaacaaatgcctctcagcagcttaatgtaccagcaaaatatgataattcgtctgtttcaccaccaaagttaactttcatgagtgcaccaatgccgataaatggtttgccgattaatagacaacaacttgctgggactggtagctttgacagccactgttctcctgcatctggcacttcacagggatctgcagatataagtgatgccatggatcagcccccatctgattatctgacgaggattagattgttggagcaatatgcatcagccatagcagggttggtcagagatgagatcaaaggtggcagacacttggaagcgttctctattcagctaattgttcttgcaacctggaagcaagcaattcatataggaaatacctttgtagcttcacctgcaagggagagtccctcacaggatatccctatgaaggggcatattgctggtgcttcccatttgcctgcgaactcaaagctagctgatgatgcctgcatgcagatagagaaacagtttctctctgaagttgaatatgctgaagaactagccagcattgtgggacagatagctgatggtacagagatgccagatgcaattgaaatgatatttcagtcggctttactcataggaaggcgaggcggtgttgatgaaatgtttgggaaagccgcggatgccatgactgggtatatgagggcggtatccatgctgcggtttctcctggtcgaggcaccatcactcgccctcaacccccctttgactctaacgagatccgatcggaatcgactgcgcacatacattgacgctctcaacaccaggctctgtcagatgcagagccagaggcattgactgctgccatgcgccctcaaatcttgtccaggtgttgtacaatattctttcatttgtaaatatatttgttggcccaaactagggcatatgtaacatgtcagaactgtggaactaggcagagcagcgaaaatctattgtaaatatatttgtagtgtggaattaggcagagtgtacgtggtaggttcattctgtgtcgattcaggcagaagcttgaaaaccgaataaccaataatagtcacgtgtggaaatgtaaacagctcggcctctacttcgtagattctttattatatattagtaaattagctcgataaaaaaaattatgcacctaatatcatctcatctatgttgtcaaatttatcatgctggatgtctccgatcactatatcaacaacgtgttgatcttcttgatcaccattttgccttcgtctaagtctctattgcatcatttgaactatatccataaacactagcaaagaatattagttcaaatggttatataggtcatcaaacactaaaactttataatcaaataatcaaatgggtctctatccatttttcttacaatattccaatctttg

SEQ ID NO: 81295 - DNA, 3453 bp, Zea Mays
cccggtttccttctctcgccttctcttttctgtaacgcgcagtatacggcgccgttgtttctccccacggcggcatctcctgcgtggcgccgccttccggcgagagctgcgacggcggcgcactaggcgagttactggacacgagagcgatgggggacggcgccagcggccgcggcggcggaggcggggccgggcggcgggtgggggagtacgagctgctgcgaccgatcgggtcgggggcgtactcgcaggtgtggctggggaggcaccgggcgcggggcacggaggtggcggtgaaggagatcgccatggagcgtctcagcaacaagctccgcgagagcctcctctccgaggtcgacatcctccgtcgcatcagacacgataacgtcattgcactccacgaatccatcaaggaccatgggagcatatatctcatattggagtattgtcgaggtggtgacttacatgcataccttcaacgtcataaaagagtttctgaaaaggttgctaggcatttcatccgtcagttagcatctggtctgcaaatgcttcgcgataataacgtggttcaccgagacctaaaacctcagaacattcttcttgttgaaaataatgaaaattctctgttgaagatcgctgactttggatttgcaaaatttttgcaaccttttgccctagctgaaactctttgtggttcgccactttacatggctccagaagtcatgcaagctcagaagtatgatgcaaaggcagatctgtggagtgtcggtgtcattctatatcaacttgttactggaagaccaccttttaatgggggcaatcagatccagttgcttaaaaatatactcaggacatgtgaaatacgcttcccatctgattgtgacttgagccatggctgcattgacttgtgcagaaagttgctgcggctcaattcaggttaaatcactaatttgtagttacatcgagttcctatggtatccgcactgagcacatagagctttatgatattgtcattgatggttcaaagaagttttccctgcgttattattcttatgttgtgacttggaatggggaaatggcacaagtattgttgtattgatgtattacatttgttctttcgaaaatgaatggtaccatgcaagggcagttttataccctgccatttgtccttttattttactatatgactctgttagtacctgtttttcagatttgatgttcaactcagactattccttaacattaagaaattctctagcggatatttaacctgttttagataaaagtgtttttagaataccacttttttcaaggcatactttcttctgcaaaagtatgtttaggaaataagaacatcaaaggtgtgttgtttttgtttttgcatttgatcatagcactagtgcctaaactgataatgtacagctgtagcataacctcatatctagtatttaacagaggctaaaatgtaatgttctactattgctgttatcacatacagttatcggctaacattaatggtgctgtgctaatctgtgtaattgatccagtggagcggcttacagttgaagaatttgtgcaccacccatttctttctgaacatgctccagagaagactttgagccttacacaatctgacataagagatggctttccaagaaataatagcagtccaacaaggcattcaaaccatagttcacaagaagattgtatgccttttcctttagatgatgagtcaagtggacaggacgagggtccagttcctgacagtaagagtctgatgaaatcttatggatttcccatgggtaaaagattggataaaacttcaggccagaagagtccaccgaaacataacagtttgttctccaggtatgtcttgggcaataatcatgcacctagtagccaacaccatggccattctggtaaagtgaccaaggaaagcaagattcatgaagtacaaggtcaaaaggttgtttatccagaagatcaggaatacgtcttcgtgtctggaccacacctggagggatcatcatcttcaacaaatgcctctcagcagcttaatgtaccagcaaaatatgataattcgtctgtttcaccaccaaagttaactttcatgagtgcaccaatgccgataaatggtttgccgattaatagacaacaacttgctgggactggtagctttgacagccactgttctcctgcatctggcacttcacagggatctgcagatataagtgatgccatggatcagcccccatctgattatctgacgaggattagattgttggagcaatatgcatcagccatagcagggttggtcagagatgagatcaaaggtggcagacacttggaagcgttctctattcagctaattgttcttgcaacctggaagcaagcaattcatataggaaatacctttgtagcttcacctgcaagggagagtccctcacaggatatccctatgaaggggcatattgctggtgcttcccatttgcctgcgaactcaaagctagctgatgatgcctgcatgcagatagagaaacagtttctctctgaagttgaatatgctgaagaactagccagcattgtgggacagatagctgatggtacagagatgccagatgcaattgaaatgatatttcagtcggctttactcataggaaggcgaggcggtgttgatgaaatgtttgggaaagccgcggatgccatgactgggtatatgagggcggtatccatgctgcggtttctcctggtcgaggcaccatcactcgccctcaacccccctttgactctaacgagatccgatcggaatcgactgcgcacatacattgacgctctcaacaccaggctctgtcagatgcagagccagaggcattgactgctgccatgcgccctcaaatcttgtccaggtgttgtacaatattctttcatttgtaaatatatttgttggcccaaactagggcatatgtaacatgtcagaactgtggaactaggcagagcagcgaaaatctattgtaaatatatttgtagtgtggaattaggcagagtgtacgtggtaggttcattctgtgtcgattcaggcagaagcttgaaaaccgaataaccaataatagtcacgtgtggaaatgtaaacagctcggcctctacttcgtagattctttattatatattagtaaattagctcgataaaaaaaattatgcacctaatatcatctcatctatgttgtcaaatttatcatgctggatgtctccgatcactatatcaacaacgtgttgatcttcttgatcaccattttgccttcgtctaagtctctattgcatcatttgaactatatccataaacactagcaaagaatattagttcaaatggttatataggtcatcaaacactaaaactttataatcaaataatcaaatgggtctctatccatttttcttacaatattccaatctttg

SEQ ID NO: 81296 - DNA, 3448 bp, Zea Mays
cccggtttccttctctcgccttctcttttctgtaacgcgcagtatacggcgccgttgtttctccccacggcggcatctcctgcgtggcgccgccttccggcgagagctgcgacggcggcgcactaggcgagttactggacacgagagcgatgggggacggcgccagcggccgcggcggcggaggcggggccgggcggcgggtgggggagtacgagctgctgcgaccgatcgggtcgggggcgtactcgcaggtgtggctggggaggcaccgggcgcggggcacggaggtggcggtgaaggagatcgccatggagcgtctcagcaacaagctccgcgagagcctcctctccgaggtcgacatcctccgtcgcatcagacacgataacgtcattgcactccacgaatccatcaaggaccatgggagcatatatctcatattggagtattgtcgaggtggtgacttacatgcataccttcaacgtcataaaagagtttctgaaaaggttgctaggcatttcatccgtcagttagcatctggtctgcaaatgcttcgcgataataacgtggttcaccgagacctaaaacctcagaacattcttcttgttgaaaataatgaaaattctctgttgaagatcgctgactttggatttgcaaaatttttgcaaccttttgccctagctgaaactctttgtggttcgccactttacatggctccagaagtcatgcaagctcagaagtatgatgcaaaggcagatctgtggagtgtcggtgtcattctatatcaacttgttactggaagaccaccttttaatgggggcaatcagatccagttgcttaaaaatatactcaggacatgtgaaatacgcttcccatctgattgtgacttgagccatggctgcattgacttgtgcagaaagttgctgcggctcaattcaggttaaatcactaatttgtagttacatcgagttcctatggtatccgcactgagcacatagagctttatgatattgtcattgatggttcaaagaagttttccctgcgttattattcttatgttgtgacttggaatggggaaatggcacaagtattgttgtattgatgtattacatttgttctttcgaaaatgaatggtaccatgcaagggcagttttataccctgccatttgtccttttattttactatatgactctgttagtacctgtttttcagatttgatgttcaactcagactattccttaacattaagaaattctctagcggatatttaacctgttttagataaaagtgtttttagaataccacttttttcaaggcatactttcttctgcaaaagtatgtttaggaaataagaacatcaaaggtgtgttgtttttgtttttgcatttgatcatagcactagtgcctaaactgataatgtacagctgtagcataacctcatatctagtatttaacagaggctaaaatgtaatgttctactattgctgttatcacatacagttatcggctaacattaatggtgctgtgctaatctgtgtaattgatccagtggagcggcttacagttgaagaatttgtgcaccacccatttctttctgaacatgctccagagaagactttgagccttacacaatctgacataagagatggctttccaagaaataatagcagtccaacaaggcattcaaaccatagttcacaagaagattgtatgccttttcctttagatgatgagtcaagtggacaggacgagggtccagttcctgacagtaagagtctgatgaaatcttatggatttcccatgggtaaaagattggataaaacttcaggccagaagagtccaccgaaacataacagtttgttctccaggtatgtcttgggcaataatcatgcacctagtagccaacaccatggccattctggtaaagtgaccaaggaaagcaagattcatgaagtacaaggtcaaaaggttgtttatccagaaggaatacgtcttcgtgtctggaccacacctggagggatcatcatcttcaacaaatgcctctcagcagcttaatgtaccagcaaaatatgataattcgtctgtttcaccaccaaagttaactttcatgagtgcaccaatgccgataaatggtttgccgattaatagacaacaacttgctgggactggtagctttgacagccactgttctcctgcatctggcacttcacagggatctgcagatataagtgatgccatggatcagcccccatctgattatctgacgaggattagattgttggagcaatatgcatcagccatagcagggttggtcagagatgagatcaaaggtggcagacacttggaagcgttctctattcagctaattgttcttgcaacctggaagcaagcaattcatataggaaatacctttgtagcttcacctgcaagggagagtccctcacaggatatccctatgaaggggcatattgctggtgcttcccatttgcctgcgaactcaaagctagctgatgatgcctgcatgcagatagagaaacagtttctctctgaagttgaatatgctgaagaactagccagcattgtgggacagatagctgatggtacagagatgccagatgcaattgaaatgatatttcagtcggctttactcataggaaggcgaggcggtgttgatgaaatgtttgggaaagccgcggatgccatgactgggtatatgagggcggtatccatgctgcggtttctcctggtcgaggcaccatcactcgccctcaacccccctttgactctaacgagatccgatcggaatcgactgcgcacatacattgacgctctcaacaccaggctctgtcagatgcagagccagaggcattgactgctgccatgcgccctcaaatcttgtccaggtgttgtacaatattctttcatttgtaaatatatttgttggcccaaactagggcatatgtaacatgtcagaactgtggaactaggcagagcagcgaaaatctattgtaaatatatttgtagtgtggaattaggcagagtgtacgtggtaggttcattctgtgtcgattcaggcagaagcttgaaaaccgaataaccaataatagtcacgtgtggaaatgtaaacagctcggcctctacttcgtagattctttattatatattagtaaattagctcgataaaaaaaattatgcacctaatatcatctcatctatgttgtcaaatttatcatgctggatgtctccgatcactatatcaacaacgtgttgatcttcttgatcaccattttgccttcgtctaagtctctattgcatcatttgaactatatccataaacactagcaaagaatattagttcaaatggttatataggtcatcaaacactaaaactttataatcaaataatcaaatgggtctctatccatttttcttacaatattccaatctttg

SEQ ID NO: 81297 - DNA, 2269 bp, Zea Mays
aatagcgatctttctgaagtctggcatttctagacataagtgaacaaatatttttgcaaccttttgccctagctgaaactctttgtggttcgccactttacatggctccagaagtcatgcaagctcagaagtatgatgcaaaggcagatctgtggagtgtcggtgtcattctatatcaacttgttactggaagaccaccttttaatgggggcaatcagatccagttgcttaaaaatatactcaggacatgtgaaatacgcttcccatctgattgtgacttgagccatggctgcattgacttgtgcagaaagttgctgcggctcaattcagtggagcggcttacagttgaagaatttgtgcaccacccatttctttctgaacatgctccagagaagactttgagccttacacaatctgacataagagatggctttccaagaaataatagcagtccaacaaggcattcaaaccatagttcacaagaagattgtatgccttttcctttagatgatgagtcaagtggacaggacgagggtccagttcctgacagtaagagtctgatgaaatcttatggatttcccatgggtaaaagattggataaaacttcaggccagaagagtccaccgaaacataacagtttgttctccaggtatgtcttgggcaataatcatgcacctagtagccaacaccatggccattctggtaaagtgaccaaggaaagcaagattcatgaagtacaaggtcaaaaggttgtttatccagaagattcccctatcattgattcattagagtttgtagatcaggaatacgtcttcgtgtctggaccacacctggagggatcatcatcttcaacaaatgcctctcagcagcttaatgtaccagcaaaatatgataattcgtctgtttcaccaccaaagttaactttcatgagtgcaccaatgccgataaatggtttgccgattaatagacaacaacttgctgggactggtagctttgacagccactgttctcctgcatctggcacttcacagggatctgcagatataagtgatgccatggatcagcccccatctgattatctgacgaggattagattgttggagcaatatgcatcagccatagcagggttggtcagagatgagatcaaaggtggcagacacttggaagcgttctctattcagctaattgttcttgcaacctggaagcaagcaattcatataggaaatacctttgtagcttcacctgcaagggagagtccctcacaggatatccctatgaaggggcatattgctggtgcttcccatttgcctgcgaactcaaagctagctgatgatgcctgcatgcagatagagaaacagtttctctctgaagttgaatatgctgaagaactagccagcattgtgggacagatagctgatggtacagagatgccagatgcaattgaaatgatatttcagtcggctttactcataggaaggcgaggcggtgttgatgaaatgtttgggaaagccgcggatgccatgactgggtatatgagggcggtatccatgctgcggtttctcctggtcgaggcaccatcactcgccctcaacccccctttgactctaacgagatccgatcggaatcgactgcgcacatacattgacgctctcaacaccaggctctgtcagatgcagagccagaggcattgactgctgccatgcgccctcaaatcttgtccaggtgttgtacaatattctttcatttgtaaatatatttgttggcccaaactagggcatatgtaacatgtcagaactgtggaactaggcagagcagcgaaaatctattgtaaatatatttgtagtgtggaattaggcagagtgtacgtggtaggttcattctgtgtcgattcaggcagaagcttgaaaaccgaataaccaataatagtcacgtgtggaaatgtaaacagctcggcctctacttcgtagattctttattatatattagtaaattagctcgataaaaaaaattatgcacctaatatcatctcatctatgttgtcaaatttatcatgctggatgtctccgatcactatatcaacaacgtgttgatcttcttgatcaccattttgccttcgtctaagtctctattgcatcatttgaactatatccataaacactagcaaagaatattagttcaaatggttatataggtcatcaaacactaaaactttataatcaaataatcaaatgggtctctatccatttttcttacaatattccaatctttg

SEQ ID NO: 81298 - DNA, 2711 bp, Zea Mays
acgctagctctgtatgcaaacatgcctgactcgcccgttcgcctatctcgcccccccccccccccccccccagcatcggagaacggagggaaccagggagctccggccgcctagaaccggagctcccaaatagatcgatccatcggtcgttgagcggacacggcaatggaagcccacgcctcgcggggccgccgcaccctggaggagatccggcagaagagagccgccgagaggatgcagcacgccctcccgatcgcggcgtctcacgtcgactctcacgggaaccaaagagccggagctgagcttcttgctcgagttcaagaacttgaaaatgggaacacggaattggtgagggaaaacaaaatgctcttgtccaagattgatgagaagggagttgagaaggatgcccttgtaaaccgtttgaatgatctcgagcggaatgtagttccctctttgcaaaaaaacttgaatgacatttctttggagaaagatgctgctgtagttgctaaggaggatgctctagctcaactcaggagcatgaagaaacggctcaaggaagcagaagaagaacagtataaggcagaagaagactcagcctccttgagagcacagctaaacaccctgcagcagcaagtaatgggacactcttacagtggatatacaatgggaatatcgactgaggaatctgttgccatggaaaaggagatacaagatttacaggcacagctaaagcaagagtcactgctaagacaacaggagcaacaaaaattagctgaagagtcgcagctgaggcaacaagagcaagaaaaactagccaaagaacaaatccatattgcttctctggaggctgaaaagcaacagctggaagaccaaattactatgttgacaaagaaagctacaggtatggaggatacatatacttatgctaatctgtcctttataatgtcaggaaaaacaacagtccatgctagtaaacatgtaagttcactctacttactagcatgcgttttcttccatatttatattctgcagtgtctttgattgcttcactgtacatgctatagtagcattactgccacatgctaggtagttcttattttgtgacatccaaaattaagcatgcacaacactctagatataatatttgctgagaactgcaacaactttgtcttcaatggtgcaaatccagtatctcaatggtgctgcgaagtcacaattcacaaatgaatgcatccttcgctatactgctggagtagaaggcctccaggagttccttgccagttccattaggctagtgcagtagtgctcttgacttatggtcatcttgggtgtgtattttggggttttctataatcccttttgcactctcttctttcttaatcgaatgatatgcaattttcttgcatgttcgagaaaaaaaatatatttgcgaggattgtagccttgaattaaatcttctctttctgtgcagaggacgcttctgagtttgctgcacacaaggcattttcaatgcaagatagggaaaaacttgaaaaccagttgcatgacatggctttgatgattgagaggctagaggggagtcgtcaaaaactgctaatggagattgattctcaatcgtcagaaatagagaaactgtttgaggagaattcggccttatctacttcttatcaagaagccatagctattacagtacaatgggaaaaccagaaaattccaggttagagattgtctgaagcaaaatgaagagctccgttctcacttggagaaactaagacttgaacaagctagcctgttggaagtaagcaatatcactaccaaatcagatggacaaattgaaaacagtatctcaaacctaccagaaatggtcaccgagaatatttctctgaagggtcagcttataaaagaacagagcagatctgagagtttgttggcagagataatgaaactttcagctgagcttaggaaagcagtccaagcacagaataaccttgtacgcttgcctgtattaagagacattgagagcaatctgatgaaaatgaaacaagaaacttatgcgacgatccaatgatacatggtgtcaaactcaatccacgatactgtggaatggccgcatagtcacaagctccaccgtaggcctggttcggttgcatctgaattggaggtgattgaatccccttctattcaattttaactagggagagatttaatcccatccaatcttctctgatccagacgcaaccaacaagcccttgctcaagatgctggtgaatgtattggtctcatgccattttcaagatgctggtggaaagcagttctttcggtggctaccattcataagtagagttctgtcgagatcgttcaacctgtatcatactcttgtatacccgattcccaccggttcatcttataaactgggggcaaatggagaaaaagattggttagggcttgtttggtgaaaaagattggttagggcttgtttggttacaacttacaagggaggtggaggggactggagggaaataaactaatttttcccttaatccccacatttcccttctaaccaaaacaaattattatccctgctctcagtccacaaattgggcgcaacaactttttaaatcatgtcatttgcgtccgcatgttcgtttggccgttggatgggtccgcatgtagggtgtatttggtttggtgaatgaggtggtctatttctc

SEQ ID NO: 81299 - DNA, 2036 bp, Zea Mays
acgctagctctgtatgcaaacatgcctgactcgcccgttcgcctatctcgcccccccccccccccccccccagcatcggagaacggagggaaccagggagctccggccgcctagaaccggagctcccaaatagatcgatccatcggtcgttgagcggacacggcaatggaagcccacgcctcgcggggccgccgcaccctggaggagatccggcagaagagagccgccgagaggatgcagcacgccctcccgatcgcggcgtctcacgtcgactctcacgggaaccaaagagccggagctgagcttcttgctcgagttcaagaacttgaaaatgggaacacggaattgattgatgagaagggagttgagaaggatgcccttgtaaaccgtttgaatgatctcgagcggaatgtagttccctctttgcaaaaaaacttgaatgacatttctttggagaaagatgctgctgtagttgctaaggaggatgctctagctcaactcaggagcatgaagaaacggctcaaggaagcagaagaagaacagtataaggcagaagaagactcagcctccttgagagcacagctaaacaccctgcagcagcaagtaatgggacactcttacagtggatatacaatgggaatatcgactgaggaatctgttgccatggaaaaggagatacaagatttacaggcacagctaaagcaagagtcactgctaagacaacaggagcaacaaaaattagctgaagagtcgcagctgaggcaacaagagcaagaaaaactagccaaagaacaaatccatattgcttctctggaggctgaaaagcaacagctggaagaccaaattactatgttgacaaagaaagctacagaggacgcttctgagtttgctgcacacaaggcattttcaatgcaagatagggaaaaacttgaaaaccagttgcatgacatggctttgatgattgagaggctagaggggagtcgtcaaaaactgctaatggagattgattctcaatcgtcagaaatagagaaactgtttgaggagaattcggccttatctacttcttatcaagaagccatagctattacagtacaatgggaaaaccaggttagagattgtctgaagcaaaatgaagagctccgttctcacttggagaaactaagacttgaacaagctagcctgttggaagtaagcaatatcactaccaaatcagatggacaaattgaaaacagtatctcaaacctaccagaaatggtcaccgagaatatttctctgaagggtcagcttataaaagaacagagcagatctgagagtttgttggcagagataatgaaactttcagctgagcttaggaaagcagtccaagcacagaataaccttgtacgcttgtacaggcctgtattaagagacattgagagcaatctgatgaaaatgaaacaagaaacttatgcgacgatccaatgatacatggtgtcaaactcaatccacgatactgtggaatggccgcatagtcacaagctccaccgtaggcctggttcggttgcatctgaattggagacgcaaccaacaagcccttgctcaagatgctggtgaatgtattggtctcatgccattttcaagatgctggtggaaagcagttctttcggtggctaccattcataagtagagttctgtcgagatcgttcaacctgtatcatactcttgtatacccgattcccaccggttcatcttataaactgggggcaaatggagaaaaagattggttagggcttgtttggtgaaaaagattggttagggcttgtttggttacaacttacaagggaggtggaggggactggagggaaataaactaatttttcccttaatccccacatttcccttctaaccaaaacaaattattatccctgctctcagtccacaaattgggcgcaacaactttttaaatcatgtcatttgcgtccgcatgttcgtttggccgttggatgggtccgcatgtagggtgtatttggtttggtgaatgaggtggtctatttctc

SEQ ID NO: 81300 - DNA, 2017 bp, Zea Mays
acgctagctctgtatgcaaacatgcctgactcgcccgttcgcctatctcgcccccccccccccccccccccagcatcggagaacggagggaaccagggagctccggccgcctagaaccggagctcccaaatagatcgatccatcggtcgttgagcggacacggcaatggaagcccacgcctcgcggggccgccgcaccctggaggagatccggcagaagagagccgccgagaggatgcagcacgccctcccgatcgcggcgtctcacgtcgactctcacgggaaccaaagagccggagctgagcttcttgctcgagttcaagaacttgaaaatgggaacacggaattgattgatgagaagggagttgagaaggatgcccttgtaaaccgtttgaatgatctcgagcggaatgtagttccctctttgcaaaaaaacttgaatgacatttctttggagaaagatgctgctgtagttgctaaggaggatgctctagctcaactcaggagcatgaagaaacggctcaaggaagcagaagaagaacagtataaggcagaagaagactcagcctccttgagagcacagctaaacaccctgcagcagcaagtaatgggacactcttacagtggatatacaatgggaatatcgactgaggaatctgttgccatggaaaaggagatacaagatttacaggcacagctaaagcaagagtcactgctaagacaacaggagcaacaaaaattagctgaagagtcgcagctgaggcaacaagagcaagaaaaactagccaaagaacaaatccatattgcttctctggaggctgaaaagcaacagctggaagaccaaattactatgttgacaaagaaagctacagaggacgcttctgagtttgctgcacacaaggcattttcaatgattgattctcaatcgtcagaaatagagaaactgtttgaggagaattcggccttatctacttcttatcaagaagccatagctattacagtacaatgggaaaaccaggttagagattgtctgaagcaaaatgaagagctccgttctcacttggagaaactaagacttgaacaagctagcctgttggaagtaagcaatatcactaccaaatcagatggacaaattgaaaacagtatctcaaacctaccagaaatggtcaccgagaatatttctctgaagggtcagcttataaaagaacagagcagatctgagagtttgttggcagagataatgaaactttcagctgagcttaggaaagcagtccaagcacagaataaccttgtacgcttgtacaggcctgtattaagagacattgagagcaatctgatgaaaatgaaacaagaaacttatgcgacgatccaatgatacatggtgtcaaactcaatccacgatactgtggaatggccgcatagtcacaagctccaccgtaggcctggttcggttgcatctgaattggaggtgattgaatccccttctattcaattttaactagggagagatttaatcccatccaatcttctctgatccagacgcaaccaacaagcccttgctcaagatgctggtgaatgtattggtctcatgccattttcaagatgctggtggaaagcagttctttcggtggctaccattcataagtagagttctgtcgagatcgttcaacctgtatcatactcttgtatacccgattcccaccggttcatcttataaactgggggcaaatggagaaaaagattggttagggcttgtttggtgaaaaagattggttagggcttgtttggttacaacttacaagggaggtggaggggactggagggaaataaactaatttttcccttaatccccacatttcccttctaaccaaaacaaattattatccctgctctcagtccacaaattgggcgcaacaactttttaaatcatgtcatttgcgtccgcatgttcgtttggccgttggatgggtccgcatgtagggtgtatttggtttggtgaatgaggtggtctatttctc

SEQ ID NO: 81301 - DNA, 2042 bp, Zea Mays
acgctagctctgtatgcaaacatgcctgactcgcccgttcgcctatctcgcccccccccccccccccccccagcatcggagaacggagggaaccagggagctccggccgcctagaaccggagctcccaaatagatcgatccatcggtcgttgagcggacacggcaatggaagcccacgcctcgcggggccgccgcaccctggaggagatccggcagaagagagccgccgagaggatgcagcacgccctcccgatcgcggcgtctcacgtcgactctcacgggaaccaaagagccggagctgagcttcttgctcgagttcaagaacttgaaaatgggaacacggaattgattgatgagaagggagttgagaaggatgcccttgtaaaccgtttgaatgatctcgagcggaatgtagttccctctttgcaaaaaaacttgaatgacatttctttggagaaagatgctgctgtagttgctaaggaggatgctctagctcaactcaggagcatgaagaaacggctcaaggaagcagaagaagaacagtataagaagaagactcagcctccttgagagcacagctaaacaccctgcagcagcaagtaatgggacactcttacagtggatatacaatgggaatatcgactgaggaatctgttgccatggaaaaggagatacaagatttacaggcacagctaaagcaagagtcactgctaagacaacaggagcaacaaaaattagctgaagagtcgcagctgaggcaacaagagcaagaaaaactagccaaagaacaaatccatattgcttctctggaggctgaaaagcaacagctggaagaccaaattactatgttgacaaagaaagctacagaggacgcttctgagtttgctgcacacaaggcattttcaatgcaagatagggaaaaacttgaaaaccagttgcatgacatggctttgatgattgagaggctagaggggagtcgtcaaaaactgctaatggagattgattctcaatcgtcagaaatagagaaactgtttgaggagaattcggccttatctacttcttatcaagaagccatagctattacagtacaatgggaaaaccagaaaattccaggttagagattgtctgaagcaaaatgaagagctccgttctcacttggagaaactaagacttgaacaagctagcctgttggaagtaagcaatatcactaccaaatcagatggacaaattgaaaacagtatctcaaacctaccagaaatggtcaccgagaatatttctctgaagggtcagcttataaaagaacagagcagatctgagagtttgttggcagagataatgaaactttcagctgagcttaggaaagcagtccaagcacagaataaccttgtacgcttgtacaggcctgtattaagagacattgagagcaatctgatgaaaatgaaacaagaaacttatgcgacgatccaatgatacatggtgtcaaactcaatccacgatactgtggaatggccgcatagtcacaagctccaccgtaggcctggttcggttgcatctgaattggagacgcaaccaacaagcccttgctcaagatgctggtgaatgtattggtctcatgccattttcaagatgctggtggaaagcagttctttcggtggctaccattcataagtagagttctgtcgagatcgttcaacctgtatcatactcttgtatacccgattcccaccggttcatcttataaactgggggcaaatggagaaaaagattggttagggcttgtttggtgaaaaagattggttagggcttgtttggttacaacttacaagggaggtggaggggactggagggaaataaactaatttttcccttaatccccacatttcccttctaaccaaaacaaattattatccctgctctcagtccacaaattgggcgcaacaactttttaaatcatgtcatttgcgtccgcatgttcgtttggccgttggatgggtccgcatgtagggtgtatttggtttggtgaatgaggtggtctatttctc

SEQ ID NO: 81302 - DNA, 2101 bp, Zea Mays
acgctagctctgtatgcaaacatgcctgactcgcccgttcgcctatctcgcccccccccccccccccccccagcatcggagaacggagggaaccagggagctccggccgcctagaaccggagctcccaaatagatcgatccatcggtcgttgagcggacacggcaatggaagcccacgcctcgcggggccgccgcaccctggaggagatccggcagaagagagccgccgagaggatgcagcacgccctcccgatcgcggcgtctcacgtcgactctcacgggaaccaaagagccggagctgagcttcttgctcgagttcaagaacttgaaaatgggaacacggaattgattgatgagaagggagttgagaaggatgcccttgtaaaccgtttgaatgatctcgagcggaatgtagttccctctttgcaaaaaaacttgaatgacatttctttggagaaagatgctgctgtagttgctaaggaggatgctctagctcaactcaggagcatgaagaaacggctcaaggaagcagaagaagaacagtataaggcagaagaagactcagcctccttgagagcacagctaaacaccctgcagcagcaagtaatgggacactcttacagtggatatacaatgggaatatcgactgaggaatctgttgccatggaaaaggagatacaagatttacaggcacagctaaagcaagagtcactgctaagacaacaggagcaacaaaaattagctgaagagtcgcagctgaggcaacaagagcaagaaaaactagccaaagaacaaatccatattgcttctctggaggctgaaaagcaacagctggaagaccaaattactatgttgacaaagaaagctacagaggacgcttctgagtttgctgcacacaaggcattttcaatgcaagatagggaaaaacttgaaaaccagttgcatgacatggctttgatgattgagaggctagaggggagtcgtcaaaaactgctaatggagattgattctcaatcgtcagaaatagagaaactgtttgaggagaattcggccttatctacttcttatcaagaagccatagctattacagtacaatgggaaaaccaggttagagattgtctgaagcaaaatgaagagctccgttctcacttggagaaactaagacttgaacaagctagcctgttggaagtaagcaatatcactaccaaatcagatggacaaattgaaaacagtatctcaaacctaccagaaatggtcaccgagaatatttctctgaagggtcagcttataaaagaacagagcagatctgagagtttgttggcagagataatgaaactttcagctgagcttaggaaagcagtccaagcacagaataaccttgtacgcttgcctgtattaagagacattgagagcaatctgatgaaaatgaaacaagaaacttatgcgacgatccaatgatacatggtgtcaaactcaatccacgatactgtggaatggccgcatagtcacaagctccaccgtaggcctggttcggttgcatctgaattggaggtgattgaatccccttctattcaattttaactagggagagatttaatcccatccaatcttctctgatccagacgcaaccaacaagcccttgctcaagatgctggtgaatgtattggtctcatgccattttcaagatgctggtggaaagcagttctttcggtggctaccattcataagtagagttctgtcgagatcgttcaacctgtatcatactcttgtatacccgattcccaccggttcatcttataaactgggggcaaatggagaaaaagattggttagggcttgtttggtgaaaaagattggttagggcttgtttggttacaacttacaagggaggtggaggggactggagggaaataaactaatttttcccttaatccccacatttcccttctaaccaaaacaaattattatccctgctctcagtccacaaattgggcgcaacaactttttaaatcatgtcatttgcgtccgcatgttcgtttggccgttggatgggtccgcatgtagggtgtatttggtttggtgaatgaggtggtctatttctc

SEQ ID NO: 81303 - DNA, 2131 bp, Zea Mays
acgctagctctgtatgcaaacatgcctgactcgcccgttcgcctatctcgcccccccccccccccccccccagcatcggagaacggagggaaccagggagctccggccgcctagaaccggagctcccaaatagatcgatccatcggtcgttgagcggacacggcaatggaagcccacgcctcgcggggccgccgcaccctggaggagatccggcagaagagagccgccgagaggatgcagcacgccctcccgatcgcggcgtctcacgtcgactctcacgggaaccaaagagccggagctgagcttcttgctcgagttcaagaacttgaaaatgggaacacggaattggtgagggaaaacaaaatgctcttgtccaagattgatgagaagggagttgagaaggatgcccttgtaaaccgtttgaatgatctcgagcggaatgtagttccctctttgcaaaaaaacttgaatgacatttctttggagaaagatgctgctgtagttgctaaggaggatgctctagctcaactcaggagcatgaagaaacggctcaaggaagcagaagaagaacagtataaggcagaagaagactcagcctccttgagagcacagctaaacaccctgcagcagcaagtaatgggacactcttacagtggatatacaatgggaatatcgactgaggaatctgttgccatggaaaaggagatacaagatttacaggcacagctaaagcaagagtcactgctaagacaacaggagcaacaaaaattagctgaagagtcgcagctgaggcaacaagagcaagaaaaactagccaaagaacaaatccatattgcttctctggaggctgaaaagcaacagctggaagaccaaattactatgttgacaaagaaagctacagaggacgcttctgagtttgctgcacacaaggcattttcaatgcaagatagggaaaaacttgaaaaccagttgcatgacatggctttgatgattgagaggctagaggggagtcgtcaaaaactgctaatggagattgattctcaatcgtcagaaatagagaaactgtttgaggagaattcggccttatctacttcttatcaagaagccatagctattacagtacaatgggaaaaccaggttagagattgtctgaagcaaaatgaagagctccgttctcacttggagaaactaagacttgaacaagctagcctgttggaagtaagcaatatcactaccaaatcagatggacaaattgaaaacagtatctcaaacctaccagaaatggtcaccgagaatatttctctgaagcttataaaagaacagagcagatctgagagtttgttggcagagataatgaaactttcagctgagcttaggaaagcagtccaagcacagaataaccttgtacgcttgtacaggcctgtattaagagacattgagagcaatctgatgaaaatgaaacaagaaacttatgcgacgatccaatgatacatggtgtcaaactcaatccacgatactgtggaatggccgcatagtcacaagctccaccgtaggcctggttcggttgcatctgaattggaggtgattgaatccccttctattcaattttaactagggagagatttaatcccatccaatcttctctgatccagacgcaaccaacaagcccttgctcaagatgctggtgaatgtattggtctcatgccattttcaagatgctggtggaaagcagttctttcggtggctaccattcataagtagagttctgtcgagatcgttcaacctgtatcatactcttgtatacccgattcccaccggttcatcttataaactgggggcaaatggagaaaaagattggttagggcttgtttggtgaaaaagattggttagggcttgtttggttacaacttacaagggaggtggaggggactggagggaaataaactaatttttcccttaatccccacatttcccttctaaccaaaacaaattattatccctgctctcagtccacaaattgggcgcaacaactttttaaatcatgtcatttgcgtccgcatgttcgtttggccgttggatgggtccgcatgtagggtgtatttggtttggtgaatgaggtggtctatttctc

SEQ ID NO: 81304 - DNA, 2636 bp, Zea Mays
acgctagctctgtatgcaaacatgcctgactcgcccgttcgcctatctcgcccccccccccccccccccccagcatcggagaacggagggaaccagggagctccggccgcctagaaccggagctcccaaatagatcgatccatcggtcgttgagcggacacggcaatggaagcccacgcctcgcggggccgccgcaccctggaggagatccggcagaagagagccgccgagaggatgcagcacgccctcccgatcgcggcgtctcacgtcgactctcacgggaaccaaagagccggagctgagcttcttgctcgagttcaagaacttgaaaatgggaacacggaattggtgagggaaaacaaaatgctcttgtccaagattgatgagaagggagttgagaaggatgcccttgtaaaccgtttgaatgatctcgagcggaatgtagttccctctttgcaaaaaaacttgaatgacatttctttggagaaagatgctgctgtagttgctaaggaggatgctctagctcaactcaggagcatgaagaaacggctcaaggaagcagaagaagaacagtataaggcagaagaagactcagcctccttgagagcacagctaaacaccctgcagcagcaagtaatgggacactcttacagtggatatacaatgggaatatcgactgaggaatctgttgccatggaaaaggagatacaagatttacaggcacagctaaagcaagagtcactgctaagacaacaggagcaacaaaaattagctgaagagtcgcagctgaggcaacaagagcaagaaaaactagccaaagaacaaatccatattgcttctctggaggctgaaaagcaacagctggaagaccaaattactatgttgacaaagaaagctacaggtatggaggatacatatacttatgctaatctgtcctttataatgtcaggaaaaacaacagtccatgctagtaaacatgtaagttcactctacttactagcatgcgttttcttccatatttatattctgcagtgtctttgattgcttcactgtacatgctatagtagcattactgccacatgctaggtagttcttattttgtgacatccaaaattaagcatgcacaacactctagatataatatttgctgagaactgcaacaactttgtcttcaatggtgcaaatccagtatctcaatggtgctgcgaagtcacaattcacaaatgaatgcatccttcgctatactgctggagtagaaggcctccaggagttccttgccagttccattaggctagtgcagtagtgctcttgacttatggtcatcttgggtgtgtattttggggttttctataatcccttttgcactctcttctttcttaatcgaatgatatgcaattttcttgcatgttcgagaaaaaaaatatatttgcgaggattgtagccttgaattaaatcttctctttctgtgcagaggacgcttctgagtttgctgcacacaaggcattttcaatgcaagatagggaaaaacttgaaaaccagttgcatgacatggctttgatgattgagaggctagaggggagtcgtcaaaaactgctaatggagattgattctcaatcgtcagaaatagagaaactgtttgaggagaattcggccttatctacttcttatcaagaagccatagctattacagtacaatgggaaaaccaggttagagattgtctgaagcaaaatgaagagctccgttctcacttggagaaactaagacttgaacaagctagcctgttggaagtaagcaatatcactaccaaatcagatggacaaattgaaaacagtatctcaaacctaccagaaatggtcaccgagaatatttctctgaagggtcagcttataaaagaacagagcagatctgagagtttgttggcagagataatgaaactttcagctgagcttaggaaagcagtccaagcacagaataaccttgtacgcttgtacaggcctgtattaagagacattgagagcaatctgatgaaaatgaaacaagaaacttatgcgacgatccaatgatacatggtgtcaaactcaatccacgatactgtggaatggccgcatagtcacaagctccaccgtaggcctggttcggttgcatctgaattggagacgcaaccaacaagcccttgctcaagatgctggtgaatgtattggtctcatgccattttcaagatgctggtggaaagcagttctttcggtggctaccattcataagtagagttctgtcgagatcgttcaacctgtatcatactcttgtatacccgattcccaccggttcatcttataaactgggggcaaatggagaaaaagattggttagggcttgtttggtgaaaaagattggttagggcttgtttggttacaacttacaagggaggtggaggggactggagggaaataaactaatttttcccttaatccccacatttcccttctaaccaaaacaaattattatccctgctctcagtccacaaattgggcgcaacaactttttaaatcatgtcatttgcgtccgcatgttcgtttggccgttggatgggtccgcatgtagggtgtatttggtttggtgaatgaggtggtctatttctc

SEQ ID NO: 81305 - DNA, 2646 bp, Zea Mays
acgctagctctgtatgcaaacatgcctgactcgcccgttcgcctatctcgcccccccccccccccccccccagcatcggagaacggagggaaccagggagctccggccgcctagaaccggagctcccaaatagatcgatccatcggtcgttgagcggacacggcaatggaagcccacgcctcgcggggccgccgcaccctggaggagatccggcagaagagagccgccgagaggatgcagcacgccctcccgatcgcggcgtctcacgtcgactctcacgggaaccaaagagccggagctgagcttcttgctcgagttcaagaacttgaaaatgggaacacggaattggtgagggaaaacaaaatgctcttgtccaagattgatgagaagggagttgagaaggatgcccttgtaaaccgtttgaatgatctcgagcggaatgtagttccctctttgcaaaaaaacttgaatgacatttctttggagaaagatgctgctgtagttgctaaggaggatgctctagctcaactcaggagcatgaagaaacggctcaaggaagcagaagaagaacagtataaggcagaagaagactcagcctccttgagagcacagctaaacaccctgcagcagcaagtaatgggacactcttacagtggatatacaatgggaatatcgactgaggaatctgttgccatggaaaaggagatacaagatttacaggcacagctaaagcaagagtcactgctaagacaacaggagcaacaaaaattagctgaagagtcgcagctgaggcaacaagagcaagaaaaactagccaaagaacaaatccatattgcttctctggaggctgaaaagcaacagctggaagaccaaattactatgttgacaaagaaagctacaggtatggaggatacatatacttatgctaatctgtcctttataatgtcaggaaaaacaacagtccatgctagtaaacatgtaagttcactctacttactagcatgcgttttcttccatatttatattctgcagtgtctttgattgcttcactgtacatgctatagtagcattactgccacatgctaggtagttcttattttgtgacatccaaaattaagcatgcacaacactctagatataatatttgctgagaactgcaacaactttgtcttcaatggtgcaaatccagtatctcaatggtgctgcgaagtcacaattcacaaatgaatgcatccttcgctatactgctggagtagaaggcctccaggagttccttgccagttccattaggctagtgcagtagtgctcttgacttatggtcatcttgggtgtgtattttggggttttctataatcccttttgcactctcttctttcttaatcgaatgatatgcaattttcttgcatgttcgagaaaaaaaatatatttgcgaggattgtagccttgaattaaatcttctctttctgtgcagaggacgcttctgagtttgctgcacacaaggcattttcaatgcaagatagggaaaaacttgaaaaccagttgcatgacatggctttgatgattgagaggctagaggggagtcgtcaaaaactgctaatggagattgattctcaatcgtcagaaatagagaaactgtttgaggagaattcggccttatctacttcttatcaagaagccatagctattacagtacaatgggaaaaccagaaaattccaggttagagattgtctgaagcaaaatgaagagctccgttctcacttggagaaactaagacttgaacaagctagcctgttggaagtaagcaatatcactaccaaatcagatggacaaattgaaaacagtatctcaaacctaccagaaatggtcaccgagaatatttctctgaagggtcagcttataaaagaacagagcagatctgagagtttgttggcagagataatgaaactttcagctgagcttaggaaagcagtccaagcacagaataaccttgtacgcttgtacaggcctgtattaagagacattgagagcaatctgatgaaaatgaaacaagaaacttatgcgacgatccaatgatacatggtgtcaaactcaatccacgatactgtggaatggccgcatagtcacaagctccaccgtaggcctggttcggttgcatctgaattggagacgcaaccaacaagcccttgctcaagatgctggtgaatgtattggtctcatgccattttcaagatgctggtggaaagcagttctttcggtggctaccattcataagtagagttctgtcgagatcgttcaacctgtatcatactcttgtatacccgattcccaccggttcatcttataaactgggggcaaatggagaaaaagattggttagggcttgtttggtgaaaaagattggttagggcttgtttggttacaacttacaagggaggtggaggggactggagggaaataaactaatttttcccttaatccccacatttcccttctaaccaaaacaaattattatccctgctctcagtccacaaattgggcgcaacaactttttaaatcatgtcatttgcgtccgcatgttcgtttggccgttggatgggtccgcatgtagggtgtatttggtttggtgaatgaggtggtctatttctc

SEQ ID NO: 81306 - DNA, 2046 bp, Zea Mays
acgctagctctgtatgcaaacatgcctgactcgcccgttcgcctatctcgcccccccccccccccccccccagcatcggagaacggagggaaccagggagctccggccgcctagaaccggagctcccaaatagatcgatccatcggtcgttgagcggacacggcaatggaagcccacgcctcgcggggccgccgcaccctggaggagatccggcagaagagagccgccgagaggatgcagcacgccctcccgatcgcggcgtctcacgtcgactctcacgggaaccaaagagccggagctgagcttcttgctcgagttcaagaacttgaaaatgggaacacggaattgattgatgagaagggagttgagaaggatgcccttgtaaaccgtttgaatgatctcgagcggaatgtagttccctctttgcaaaaaaacttgaatgacatttctttggagaaagatgctgctgtagttgctaaggaggatgctctagctcaactcaggagcatgaagaaacggctcaaggaagcagaagaagaacagtataaggcagaagaagactcagcctccttgagagcacagctaaacaccctgcagcagcaagtaatgggacactcttacagtggatatacaatgggaatatcgactgaggaatctgttgccatggaaaaggagatacaagatttacaggcacagctaaagcaagagtcactgctaagacaacaggagcaacaaaaattagctgaagagtcgcagctgaggcaacaagagcaagaaaaactagccaaagaacaaatccatattgcttctctggaggctgaaaagcaacagctggaagaccaaattactatgttgacaaagaaagctacagaggacgcttctgagtttgctgcacacaaggcattttcaatgcaagatagggaaaaacttgaaaaccagttgcatgacatggctttgatgattgagaggctagaggggagtcgtcaaaaactgctaatggagattgattctcaatcgtcagaaatagagaaactgtttgaggagaattcggccttatctacttcttatcaagaagccatagctattacagtacaatgggaaaaccagaaaattccaggttagagattgtctgaagcaaaatgaagagctccgttctcacttggagaaactaagacttgaacaagctagcctgttggaagtaagcaatatcactaccaaatcagatggacaaattgaaaacagtatctcaaacctaccagaaatggtcaccgagaatatttctctgaagggtcagcttataaaagaacagagcagatctgagagtttgttggcagagataatgaaactttcagctgagcttaggaaagcagtccaagcacagaataaccttgtacgcttgtacaggcctgtattaagagacattgagagcaatctgatgaaaatgaaacaagaaacttatgcgacgatccaatgatacatggtgtcaaactcaatccacgatactgtggaatggccgcatagtcacaagctccaccgtaggcctggttcggttgcatctgaattggagacgcaaccaacaagcccttgctcaagatgctggtgaatgtattggtctcatgccattttcaagatgctggtggaaagcagttctttcggtggctaccattcataagtagagttctgtcgagatcgttcaacctgtatcatactcttgtatacccgattcccaccggttcatcttataaactgggggcaaatggagaaaaagattggttagggcttgtttggtgaaaaagattggttagggcttgtttggttacaacttacaagggaggtggaggggactggagggaaataaactaatttttcccttaatccccacatttcccttctaaccaaaacaaattattatccctgctctcagtccacaaattgggcgcaacaactttttaaatcatgtcatttgcgtccgcatgttcgtttggccgttggatgggtccgcatgtagggtgtatttggtttggtgaatgaggtggtctatttctc

SEQ ID NO: 81307 - DNA, 1970 bp, Zea Mays
acgctagctctgtatgcaaacatgcctgactcgcccgttcgcctatctcgcccccccccccccccccccccagcatcggagaacggagggaaccagggagctccggccgcctagaaccggagctcccaaatagatcgatccatcggtcgttgagcggacacggcaatggaagcccacgcctcgcggggccgccgcaccctggaggagatccggcagaagagagccgccgagaggatgcagcacgccctcccgatcgcggcgtctcacgtcgactctcacgggaaccaaagagccggagctgagcttcttgctcgagttcaagaacttgaaaatgggaacacggaattggtgagggaaaacaaaatgctcttgtccaagattgatgagaagggagttgagaaggatgcccttgtaaaccgtttgaatgatctcgagcggaatgtagttccctctttgcaaaaaaacttgaatgacatttctttggagaaagatgctgctgtagttgctaaggaggatgctctagctcaactcaggagcatgaagaaacggctcaaggaagcagaagaagaacagtataaggcagaagaagactcagcctccttgagagcacagctaaacaccctgcagcagcaagtaatgggacactcttacagtggatatacaatgggaatatcgactgaggaatctgttgccatggaaaaggagatacaagatttacaggcacagctaaagcaagagtcactgctaagacaacaggagcaacaaaaattagctgaagagtcgcagctgaggcaacaagagcaagaaaaactagccaaagaacaaatccatattgcttctctggaggctgaaaagcaacagctggaagaccaaattactatgttgacaaagaaagctacagaggacgcttctgagtttgctgcacacaaggcattttcaatgattgattctcaatcgtcagaaatagagaaactgtttgaggagaattcggccttatctacttcttatcaagaagccatagctattacagtacaatgggaaaaccaggttagagattgtctgaagcaaaatgaagagctccgttctcacttggagaaactaagacttgaacaagctagcctgttggaagtaagcaatatcactaccaaatcagatggacaaattgaaaacagtatctcaaacctaccagaaatggtcaccgagaatatttctctgaagcttataaaagaacagagcagatctgagagtttgttggcagagataatgaaactttcagctgagcttaggaaagcagtccaagcacagaataaccttgtacgcttgtacaggcctgtattaagagacattgagagcaatctgatgaaaatgaaacaagaaacttatgcgacgatccaatgatacatggtgtcaaactcaatccacgatactgtggaatggccgcatagtcacaagctccaccgtaggcctggttcggttgcatctgaattggagacgcaaccaacaagcccttgctcaagatgctggtgaatgtattggtctcatgccattttcaagatgctggtggaaagcagttctttcggtggctaccattcataagtagagttctgtcgagatcgttcaacctgtatcatactcttgtatacccgattcccaccggttcatcttataaactgggggcaaatggagaaaaagattggttagggcttgtttggtgaaaaagattggttagggcttgtttggttacaacttacaagggaggtggaggggactggagggaaataaactaatttttcccttaatccccacatttcccttctaaccaaaacaaattattatccctgctctcagtccacaaattgggcgcaacaactttttaaatcatgtcatttgcgtccgcatgttcgtttggccgttggatgggtccgcatgtagggtgtatttggtttggtgaatgaggtggtctatttctc

SEQ ID NO: 81308 - DNA, 2606 bp, Zea Mays
acgctagctctgtatgcaaacatgcctgactcgcccgttcgcctatctcgcccccccccccccccccccccagcatcggagaacggagggaaccagggagctccggccgcctagaaccggagctcccaaatagatcgatccatcggtcgttgagcggacacggcaatggaagcccacgcctcgcggggccgccgcaccctggaggagatccggcagaagagagccgccgagaggatgcagcacgccctcccgatcgcggcgtctcacgtcgactctcacgggaaccaaagagccggagctgagcttcttgctcgagttcaagaacttgaaaatgggaacacggaattgattgatgagaagggagttgagaaggatgcccttgtaaaccgtttgaatgatctcgagcggaatgtagttccctctttgcaaaaaaacttgaatgacatttctttggagaaagatgctgctgtagttgctaaggaggatgctctagctcaactcaggagcatgaagaaacggctcaaggaagcagaagaagaacagtataaggcagaagaagactcagcctccttgagagcacagctaaacaccctgcagcagcaagtaatgggacactcttacagtggatatacaatgggaatatcgactgaggaatctgttgccatggaaaaggagatacaagatttacaggcacagctaaagcaagagtcactgctaagacaacaggagcaacaaaaattagctgaagagtcgcagctgaggcaacaagagcaagaaaaactagccaaagaacaaatccatattgcttctctggaggctgaaaagcaacagctggaagaccaaattactatgttgacaaagaaagctacaggtatggaggatacatatacttatgctaatctgtcctttataatgtcaggaaaaacaacagtccatgctagtaaacatgtaagttcactctacttactagcatgcgttttcttccatatttatattctgcagtgtctttgattgcttcactgtacatgctatagtagcattactgccacatgctaggtagttcttattttgtgacatccaaaattaagcatgcacaacactctagatataatatttgctgagaactgcaacaactttgtcttcaatggtgcaaatccagtatctcaatggtgctgcgaagtcacaattcacaaatgaatgcatccttcgctatactgctggagtagaaggcctccaggagttccttgccagttccattaggctagtgcagtagtgctcttgacttatggtcatcttgggtgtgtattttggggttttctataatcccttttgcactctcttctttcttaatcgaatgatatgcaattttcttgcatgttcgagaaaaaaaatatatttgcgaggattgtagccttgaattaaatcttctctttctgtgcagaggacgcttctgagtttgctgcacacaaggcattttcaatgcaagatagggaaaaacttgaaaaccagttgcatgacatggctttgatgattgagaggctagaggggagtcgtcaaaaactgctaatggagattgattctcaatcgtcagaaatagagaaactgtttgaggagaattcggccttatctacttcttatcaagaagccatagctattacagtacaatgggaaaaccaggttagagattgtctgaagcaaaatgaagagctccgttctcacttggagaaactaagacttgaacaagctagcctgttggaagtaagcaatatcactaccaaatcagatggacaaattgaaaacagtatctcaaacctaccagaaatggtcaccgagaatatttctctgaagggtcagcttataaaagaacagagcagatctgagagtttgttggcagagataatgaaactttcagctgagcttaggaaagcagtccaagcacagaataaccttgtacgcttgtacaggcctgtattaagagacattgagagcaatctgatgaaaatgaaacaagaaacttatgcgacgatccaatgatacatggtgtcaaactcaatccacgatactgtggaatggccgcatagtcacaagctccaccgtaggcctggttcggttgcatctgaattggagacgcaaccaacaagcccttgctcaagatgctggtgaatgtattggtctcatgccattttcaagatgctggtggaaagcagttctttcggtggctaccattcataagtagagttctgtcgagatcgttcaacctgtatcatactcttgtatacccgattcccaccggttcatcttataaactgggggcaaatggagaaaaagattggttagggcttgtttggtgaaaaagattggttagggcttgtttggttacaacttacaagggaggtggaggggactggagggaaataaactaatttttcccttaatccccacatttcccttctaaccaaaacaaattattatccctgctctcagtccacaaattgggcgcaacaactttttaaatcatgtcatttgcgtccgcatgttcgtttggccgttggatgggtccgcatgtagggtgtatttggtttggtgaatgaggtggtctatttctc

SEQ ID NO: 81309 - DNA, 2076 bp, Zea Mays
acgctagctctgtatgcaaacatgcctgactcgcccgttcgcctatctcgcccccccccccccccccccccagcatcggagaacggagggaaccagggagctccggccgcctagaaccggagctcccaaatagatcgatccatcggtcgttgagcggacacggcaatggaagcccacgcctcgcggggccgccgcaccctggaggagatccggcagaagagagccgccgagaggatgcagcacgccctcccgatcgcggcgtctcacgtcgactctcacgggaaccaaagagccggagctgagcttcttgctcgagttcaagaacttgaaaatgggaacacggaattggtgagggaaaacaaaatgctcttgtccaagattgatgagaagggagttgagaaggatgcccttgtaaaccgtttgaatgatctcgagcggaatgtagttccctctttgcaaaaaaacttgaatgacatttctttggagaaagatgctgctgtagttgctaaggaggatgctctagctcaactcaggagcatgaagaaacggctcaaggaagcagaagaagaacagtataaggcagaagaagactcagcctccttgagagcacagctaaacaccctgcagcagcaagtaatgggacactcttacagtggatatacaatgggaatatcgactgaggaatctgttgccatggaaaaggagatacaagatttacaggcacagctaaagcaagagtcactgctaagacaacaggagcaacaaaaattagctgaagagtcgcagctgaggcaacaagagcaagaaaaactagccaaagaacaaatccatattgcttctctggaggctgaaaagcaacagctggaagaccaaattactatgttgacaaagaaagctacagaggacgcttctgagtttgctgcacacaaggcattttcaatgcaagatagggaaaaacttgaaaaccagttgcatgacatggctttgatgattgagaggctagaggggagtcgtcaaaaactgctaatggagattgattctcaatcgtcagaaatagagaaactgtttgaggagaattcggccttatctacttcttatcaagaagccatagctattacagtacaatgggaaaaccagaaaattccaggttagagattgtctgaagcaaaatgaagagctccgttctcacttggagaaactaagacttgaacaagctagcctgttggaagtaagcaatatcactaccaaatcagatggacaaattgaaaacagtatctcaaacctaccagaaatggtcaccgagaatatttctctgaagggtcagcttataaaagaacagagcagatctgagagtttgttggcagagataatgaaactttcagctgagcttaggaaagcagtccaagcacagaataaccttgtacgcttgtacaggcctgtattaagagacattgagagcaatctgatgaaaatgaaacaagaaacttatgcgacgatccaatgatacatggtgtcaaactcaatccacgatactgtggaatggccgcatagtcacaagctccaccgtaggcctggttcggttgcatctgaattggagacgcaaccaacaagcccttgctcaagatgctggtgaatgtattggtctcatgccattttcaagatgctggtggaaagcagttctttcggtggctaccattcataagtagagttctgtcgagatcgttcaacctgtatcatactcttgtatacccgattcccaccggttcatcttataaactgggggcaaatggagaaaaagattggttagggcttgtttggtgaaaaagattggttagggcttgtttggttacaacttacaagggaggtggaggggactggagggaaataaactaatttttcccttaatccccacatttcccttctaaccaaaacaaattattatccctgctctcagtccacaaattgggcgcaacaactttttaaatcatgtcatttgcgtccgcatgttcgtttggccgttggatgggtccgcatgtagggtgtatttggtttggtgaatgaggtggtctatttctc

SEQ ID NO: 81310 - DNA, 2632 bp, Zea Mays
acgctagctctgtatgcaaacatgcctgactcgcccgttcgcctatctcgcccccccccccccccccccccagcatcggagaacggagggaaccagggagctccggccgcctagaaccggagctcccaaatagatcgatccatcggtcgttgagcggacacggcaatggaagcccacgcctcgcggggccgccgcaccctggaggagatccggcagaagagagccgccgagaggatgcagcacgccctcccgatcgcggcgtctcacgtcgactctcacgggaaccaaagagccggagctgagcttcttgctcgagttcaagaacttgaaaatgggaacacggaattggtgagggaaaacaaaatgctcttgtccaagattgatgagaagggagttgagaaggatgcccttgtaaaccgtttgaatgatctcgagcggaatgtagttccctctttgcaaaaaaacttgaatgacatttctttggagaaagatgctgctgtagttgctaaggaggatgctctagctcaactcaggagcatgaagaaacggctcaaggaagcagaagaagaacagtataagaagaagactcagcctccttgagagcacagctaaacaccctgcagcagcaagtaatgggacactcttacagtggatatacaatgggaatatcgactgaggaatctgttgccatggaaaaggagatacaagatttacaggcacagctaaagcaagagtcactgctaagacaacaggagcaacaaaaattagctgaagagtcgcagctgaggcaacaagagcaagaaaaactagccaaagaacaaatccatattgcttctctggaggctgaaaagcaacagctggaagaccaaattactatgttgacaaagaaagctacaggtatggaggatacatatacttatgctaatctgtcctttataatgtcaggaaaaacaacagtccatgctagtaaacatgtaagttcactctacttactagcatgcgttttcttccatatttatattctgcagtgtctttgattgcttcactgtacatgctatagtagcattactgccacatgctaggtagttcttattttgtgacatccaaaattaagcatgcacaacactctagatataatatttgctgagaactgcaacaactttgtcttcaatggtgcaaatccagtatctcaatggtgctgcgaagtcacaattcacaaatgaatgcatccttcgctatactgctggagtagaaggcctccaggagttccttgccagttccattaggctagtgcagtagtgctcttgacttatggtcatcttgggtgtgtattttggggttttctataatcccttttgcactctcttctttcttaatcgaatgatatgcaattttcttgcatgttcgagaaaaaaaatatatttgcgaggattgtagccttgaattaaatcttctctttctgtgcagaggacgcttctgagtttgctgcacacaaggcattttcaatgcaagatagggaaaaacttgaaaaccagttgcatgacatggctttgatgattgagaggctagaggggagtcgtcaaaaactgctaatggagattgattctcaatcgtcagaaatagagaaactgtttgaggagaattcggccttatctacttcttatcaagaagccatagctattacagtacaatgggaaaaccaggttagagattgtctgaagcaaaatgaagagctccgttctcacttggagaaactaagacttgaacaagctagcctgttggaagtaagcaatatcactaccaaatcagatggacaaattgaaaacagtatctcaaacctaccagaaatggtcaccgagaatatttctctgaagggtcagcttataaaagaacagagcagatctgagagtttgttggcagagataatgaaactttcagctgagcttaggaaagcagtccaagcacagaataaccttgtacgcttgtacaggcctgtattaagagacattgagagcaatctgatgaaaatgaaacaagaaacttatgcgacgatccaatgatacatggtgtcaaactcaatccacgatactgtggaatggccgcatagtcacaagctccaccgtaggcctggttcggttgcatctgaattggagacgcaaccaacaagcccttgctcaagatgctggtgaatgtattggtctcatgccattttcaagatgctggtggaaagcagttctttcggtggctaccattcataagtagagttctgtcgagatcgttcaacctgtatcatactcttgtatacccgattcccaccggttcatcttataaactgggggcaaatggagaaaaagattggttagggcttgtttggtgaaaaagattggttagggcttgtttggttacaacttacaagggaggtggaggggactggagggaaataaactaatttttcccttaatccccacatttcccttctaaccaaaacaaattattatccctgctctcagtccacaaattgggcgcaacaactttttaaatcatgtcatttgcgtccgcatgttcgtttggccgttggatgggtccgcatgtagggtgtatttggtttggtgaatgaggtggtctatttctc

SEQ ID NO: 81311 - DNA, 3395 bp, Zea Mays
ccgccacctacctggtcgcccaacctactgcctatacgaggggagggggatagggagtagcagtagccagtaggcagcgtagcactgcggctcctactaccaagtaccaaccacacctccaacccccgccgtataccaatccgccggaggtctctattcagtccacttgcctttttccctcaccggtcactgcatcgagctatcggttcgtctctccctttccctcaggagtggtagatctgccggtgcggtccccagtttggatcttgatgatttggtgacttgagtggccgattttcttcgagcaaactggtttttgggaagtgcggtttcctcaatgtctatttgaatcacagcatactgaactgaatcaagtgataattgtgttctggtcatacactaagatatacctgaaacttctgcttcatatgttcacacatcataaatattccaacaaaggtcagatgaacagcgaaaggaatgtgaagatcatatcaggtcgtgatgggcaaaagaagggaaattcacagtatggccaaattgtacacatgccaaaggacatggtcacaacagtcaatggaaacgtagatgcaaaatttgaagatgaagttagagttgtgaagaatgataggttccaaaggcaacgagagtcttggggtggggaatgcaagaagggctcaaaaccatggcctggtcgaaaggcagctactgttgatgaacttgttaaacatatgtcaaatgttccttcatatttacagcgtaaagaaacttctgaccatcttcaagacaaggcactgaatgttggagttcttgagtgggggcttcttgctaactggtctcagcaagaaaagcataagctcactagaagctatggaccatctccacccaatactagcaggtctgtactattcccatctccatcacattcttctccaagccccagcagcagatctcttgagagtaatcaatctaccccaatgagtggccatcatcattcatccatcagagcacagcagaataggctcacagataaacaccatgagagggccagatgtccacctagcccaaattctgcagtactgagcttattgtcaggtcatggcacacatccctgtccagagaacggtcataattatgttgggttgggtctcagcaatgtttctttagcctcagactctctaggttcttcctctagaagttgtggaagacatgaaatggttggagatgaagagactagacggaagactgaagacgttgtccatcattgttctcgtaggctttttgcagacagcgataacattgggaaacatttcttcgcatcaaataccaatgactccatgtgtaatgatcctgaacagagtattggcttgaatggggaaaattttgagtcactaacgtctgatgctgtaatggacacagctagaaatgacagtaagtcgtctgactatttactggaggatattgagccatcccttgaatttcctcgaatcccatattcatgtccacttcccatcatagattcagcagccaaagagattggcatcactagcactgaggctggagatgcaaaagttctgggatgaatcgagggagctgcagctctagcctcaaggagtcaccacatattcgacaacccaatatagttcctcctgtcgataagacaggagacaggtcatcacccaacagcaaaggtaggcgaagcccattgaggaggatgttagatccaatattaaagccaagacattctagtccagtacgtccttcatttgttcctaagtgtcaacttccagtcaataccaccaagcagtctctggacttggggaaatcagtgccacataatgttcagcgaagtgcaagatacatacaaaaaggaaatgattcagcaacaacaaggcaagcacttctgcagctagcatggaagaacggcttgcctttattcatactctcttatggtgattctgacatcctggcagccactgttagaaggaagggcatccctgaaaaggatggtctggaaagcacatatgctgtattcactgttgaagaaccgaagaaaaaaagtggagcttggatcaagacagggggcaagaacaaaaaacatcaccttttatctagcatagttggggaaataaaggttgcgcgtcgaaaatcaagatgccaccatacaaccgatgttcatgtacacagggaatttgtgttggttggttccaaatttctaccatcgtctgaagaatcaggtgattcaaatgttagtggagagcttgcagcttttatcagcacacttcctcagcaagaagcagaaacctcgaagcaatcatcttcacagaataccaggcaaagaaattcaatgccaattggctgtggttgccccccactgggaaatttccatcctagcacgagaagtgctaattctgcttcagccaatgttgttgcagtacttcctgatggcttccatggcacaataacatctggacagccattgcctttgattgagaggtggaggtcaggaggagcttgtgactgtggcggatgggatgaaggttgtatgctaagcgtcctcactgatgcgtccgaagaaaatgatgccattcaggctaaccaggcaaaggatggcagccagagatttgagcttctagatcagggtcgatcacgagaagagaggcatgccttcagtatgacttccttcaaagaggggctttatacagtggaattcagatcatccattgcattacttcaggcttttgcaatgtgtatagtgatgctccatggaaggtacccaagaagaacgcaagttggctcgcaagcagagcaggagcatgatctccttgctggtcatgagctcaaggcaatggcagccagtcaaggaagaaggcctccgacaagctatgtgccccaccggccacctctttctcctgtaggccgagcctagcttatcacgatttagtgtatgttctttctgtgtctgtcctctttcttcagctgcgtagtgccggtgggattgatataccatggtccaatggtccatatgtaatacgcatgtccaaagtgacaatctctgcgcaagtctttagagatagctccctgtacatgctgtgatgttgttgatggtgtatgactgtaccagtaccgtgatgtggctgcaaggtccatctcagtgcttagttacccttttatatgtccgcttatctgttgcttctgtatatgctgaaatgcgcctgcaatctgttgcaacccttgtttaaattgtgcgttgcatcgcagcagcatttgtgcagctgctgaagttatgttttctggatgtctgaagcctctcgtttctgaatgcgtccagattaagggcctgtttggttcgtggctagctatgtcacactttgcctaaggttagtcgttcgaat

SEQ ID NO: 81312 - DNA, 3539 bp, Zea Mays
gcccaacctactgcctatacgaggggagggggatagggagtagcagtagccagtaggcagcgtagcactgcggctcctactaccaagtaccaaccacacctccaacccccgccgtataccaatccgccggaggtctctattcagtccacttgcctttttccctcaccggtcactgcatcgagctatcggagtggtagatctgccggtgcggtccccagtttggatcttgatgatttggtgacttgagtggccgattttcttcgagcaaactggtttttgggaagtgcggtttcctcaatgtctatttgaatcacagcatactgaactgaatcaagtgataattgtgttctggtcatacactaagatatacctgaaacttctgcttcatatgttcacacatcataaatattccaacaaaggtcagatgaacagcgaaaggaatgtgaagatcatatcaggtcgtgatgggcaaaagaagggaaattcacagtatggccaaattgtacacatgccaaaggacatggtcacaacagtcaatggaaacgtagatgcaaaatttgaagatgaagttagagttgtgaagaatgataggttccaaaggcaacgagagtcttggggtggggaatgcaagaagggctcaaaaccatggcctggtcgaaaggcagctactgttgatgaacttgttaaacatatgtcaaatgttccttcatatttacagcgtaaagaaacttctgaccatcttcaagacaaggcactgaatgttggagttcttgagtgggggcttcttgctaactggtctcagcaagaaaagcataagctcactagaagctatggaccatctccacccaatactagcaggtctgtactattcccatctccatcacattcttctccaagccccagcagcagatctcttgagagtaatcaatctaccccaatgagtggccatcatcattcatccatcagagcacagcagaataggctcacagataaacaccatgagagggccagatgtccacctagcccaaattctgcagtactgagcttattgtcaggtcatggcacacatccctgtccagagaacggtcataattatgttgggttgggtctcagcaatgtttctttagcctcagactctctaggttcttcctctagaagttgtggaagacatgaaatggttggagatgaagagactagacggaagactgaagacgttgtccatcattgttctcgtaggctttttgcagacagcgataacattgggaaacatttcttcgcatcaaataccaatgactccatgtgtaatgatcctgaacagagtattggcttgaatggggaaaattttgagtcactaacgtctgatgctgtaatggacacagctagaaatgacagtaagtcgtctgactatttactggaggatattgagccatcccttgaatttcctcgaatcccatattcatgtccacttcccatcatagattcagcagccaaagagattggcatcactagcactgaggctggagatgcaaaagtgagtaaaaattctaaccggaaccaatctgccatgaatgtcactgagaatcctccccaatactcagcaaagtttagtgataagatgccttattgtcatctaggttctgggatgaatcgagggagctgcagctctagcctcaaggagtcaccacatattcgacaacccaatatagttcctcctgtcgataagacaggagacaggtcatcacccaacagcaaaggtaggcgaagcccattgaggaggatgttagatccaatattaaagccaagacattctagtccagtacgtccttcatttgttcctaagtgtcaacttccagtcaataccaccaagcagtctctggacttggggaaatcagtgccacataatgttcagcgaaggtcggttgatttggtagtcaattcgaattatctgatcgaagaaaatagaaatcagcctcctccccgtgtgctattgaacagtgcaagatacatacaaaaaggaaatgattcagcaacaacaaggcaagcacttctgcagctagcatggaagaacggcttgcctttattcatactctcttatggtgattctgacatcctggcagccactgttagaaggaagggcatccctgaaaaggatggtctggaaagcacatatgctgtattcactgttgaagaaccgaagaaaaaaagtggagcttggatcaagacagggggcaagaacaaaaaacatcaccttttatctagcatagttggggaaataaaggttgcgcgtcgaaaatcaagatgccaccatacaaccgatgttcatgtacacagggaatttgtgttggttggttccaaatttctaccatcgtctgaagaatcaggtgattcaaatgttagtggagagcttgcagcttttatcagcacacttcctcagcaagaagcagaaacctcgaagcaatcatcttcacagaataccaggcaaagaaattcaatgccaattggctgtggttgccccccactgggaaatttccatcctagcacgagaagtgctaattctgcttcagccaatgttgttgcagtacttcctgatggcttccatggcacaataacatctggacagccattgcctttgattgagaggtggaggtcaggaggagcttgtgactgtggcggatgggatgaaggttgtatgctaagcgtcctcactgatgcgtccgaagaaaatgatgccattcaggctaaccaggcaaaggatggcagccagagatttgagcttctagatcagggtcgatcacgagaagagaggcatgccttcagtatgacttccttcaaagaggggctttatacagtggaattcagatcatccattgcattacttcaggcttttgcaatgtgtatagtgatgctccatggaaggtacccaagaagaacgcaagttggctcgcaagcagagcaggagcatgatctccttgctggtcatgagctcaaggcaatggcagccagtcaaggaagaaggcctccgacaagctatgtgccccaccggccacctctttctcctgtaggccgagcctagcttatcacgatttagtgtatgttctttctgtgtctgtcctctttcttcagctgcgtagtgccggtgggattgatataccatggtccaatggtccatatgtaatacgcatgtccaaagtgacaatctctgcgcaagtctttagagatagctccctgtacatgctgtgatgttgttgatggtgtatgactgtaccagtaccgtgatgtggctgcaaggtccatctcagtgcttagttacccttttatatgtccgcttatctgttgcttctgtatatgctgaaatgcgcctgcaatctgttgcaacccttgtttaaattgtgcgttgcatcgcagcagcatttgtgcagctgctgaagttatgttttctggatgtctgaagcctctcgtttctgaatgcgtccagattaagggcctgtttggttcgtggctagctatgtcacactttgcctaaggttagtcgttcgaat

SEQ ID NO: 81313 - DNA, 3254 bp, Zea Mays
tagcagtagccagtaggcagcgtagcactgcggctcctactaccaagtaccaaccacacctccaacccccgccgtataccaatccgccggaggtctctattcagtccacttgcctttttccctcaccggtcactgcatcgagctatcggttcgtctctccctttccctcaggtttttgggaagtgcggtttcctcaatgtctatttgaatcacagcatactgaactgaatcaagtgataattgtgttctggtcatacactaagatatacctgaaacttctgcttcatatgttcacacatcataaatattccaacaaaggtcagatgaacagcgaaaggaatgtgaagatcatatcaggtcgtgatgggcaaaagaagggaaattcacagtatggccaaattgtacacatgccaaaggacatggtcacaacagtcaatggaaacgtagatgcaaaatttgaagatgaagttagagttgtgaagaatgataggttccaaaggcaacgagagtcttggggtggggaatgcaagaagggctcaaaaccatggcctggtcgaaaggcagctactgttgatgaacttgttaaacatatgtcaaatgttccttcatatttacagcgtaaagaaacttctgaccatcttcaagacaaggcactgaatgttggagttcttgagtgggggcttcttgctaactggtctcagcaagaaaagcataagctcactagaagctatggaccatctccacccaatactagcaggtctgtactattcccatctccatcacattcttctccaagccccagcagcagatctcttgagagtaatcaatctaccccaatgagtggccatcatcattcatccatcagagcacagcagaataggctcacagataaacaccatgagagggccagatgtccacctagcccaaattctgcagtactgagcttattgtcaggtcatggcacacatccctgtccagagaacggtcataattatgttgggttgggtctcagcaatgtttctttagcctcagactctctaggttcttcctctagaagttgtggaagacatgaaatggttggagatgaagagactagacggaagactgaagacgttgtccatcattgttctcgtaggctttttgcagacagcgataacattgggaaacatttcttcgcatcaaataccaatgactccatgtgtaatgatcctgaacagagtattggcttgaatggggaaaattttgagtcactaacgtctgatgctgtaatggacacagctagaaatgacagtaagtcgtctgactatttactggaggatattgagccatcccttgaatttcctcgaatcccatattcatgtccacttcccatcatagattcagcagccaaagagattggcatcactagcactgaggctggagatgcaaaagttctgggatgaatcgagggagctgcagctctagcctcaaggagtcaccacatattcgacaacccaatatagttcctcctgtcgataagacaggagacaggtcatcacccaacagcaaaggtaggcgaagcccattgaggaggatgttagatccaatattaaagccaagacattctagtccagtacgtccttcatttgttcctaagtgtcaacttccagtcaataccaccaagcagtctctggacttggggaaatcagtgccacataatgttcagcgaagtgcaagatacatacaaaaaggaaatgattcagcaacaacaaggcaagcacttctgcagctagcatggaagaacggcttgcctttattcatactctcttatggtgattctgacatcctggcagccactgttagaaggaagggcatccctgaaaaggatggtctggaaagcacatatgctgtattcactgttgaagaaccgaagaaaaaaagtggagcttggatcaagacagggggcaagaacaaaaaacatcaccttttatctagcatagttggggaaataaaggttgcgcgtcgaaaatcaagatgccaccatacaaccgatgttcatgtacacagggaatttgtgttggttggttccaaatttctaccatcgtctgaagaatcaggtgattcaaatgttagtggagagcttgcagcttttatcagcacacttcctcagcaagaagcagaaacctcgaagcaatcatcttcacagaataccaggcaaagaaattcaatgccaattggctgtggttgccccccactgggaaatttccatcctagcacgagaagtgctaattctgcttcagccaatgttgttgcagtacttcctgatggcttccatggcacaataacatctggacagccattgcctttgattgagaggtggaggtcaggaggagcttgtgactgtggcggatgggatgaaggttgtatgctaagcgtcctcactgatgcgtccgaagaaaatgatgccattcaggctaaccaggcaaaggatggcagccagagatttgagcttctagatcagggtcgatcacgagaagagaggcatgccttcagtatgacttccttcaaagaggggctttatacagtggaattcagatcatccattgcattacttcaggcttttgcaatgtgtatagtgatgctccatggaaggtacccaagaagaacgcaagttggctcgcaagcagagcaggagcatgatctccttgctggtcatgagctcaaggcaatggcagccagtcaaggaagaaggcctccgacaagctatgtgccccaccggccacctctttctcctgtaggccgagcctagcttatcacgatttagtgtatgttctttctgtgtctgtcctctttcttcagctgcgtagtgccggtgggattgatataccatggtccaatggtccatatgtaatacgcatgtccaaagtgacaatctctgcgcaagtctttagagatagctccctgtacatgctgtgatgttgttgatggtgtatgactgtaccagtaccgtgatgtggctgcaaggtccatctcagtgcttagttacccttttatatgtccgcttatctgttgcttctgtatatgctgaaatgcgcctgcaatctgttgcaacccttgtttaaattgtgcgttgcatcgcagcagcatttgtgcagctgctgaagttatgttttctggatgtctgaagcctctcgtttctgaatgcgtccagattaagggcctgtttggttcgtggctagctatgtcacactttgcctaaggttagtcgttcgaat

SEQ ID NO: 81314 - DNA, 965 bp, Zea Mays
ctccaagtatgatgttaatacgtgcatcccaatccaactgttcagacttttctgcaaagatttacggacaaaaacaaagcaaggagtaaacataaaatattaatgctattttgcactgtgtcggatcaagaaaaaaaatgtgtgaatcctaaaagattcgttgagactggctgcaaaattctctaagcactagaaggacgccttgcacattgctgtagggatcacagaagttatgcaggagcattatttaaattaaaaagtgtatgattgtgatgactattttggtggagtaacaaatttatgatgagaaatgagaagtgcattaaaatttgcatttaaatagacaatactctcaagtgacagtattcgtggaaaaaaattaccgtttccattgactgggcttgtgaatctaagagatgggatgacattggacttggacggatggaatttgtacttgtagtgacaagtggacaacaacaaatgtgggatggtgtggatagcttgcatgaagagatagaatatcataaatgcatgctagtgggttttgttttataagggctatagataacctcaaaagagaacagggatttggtgtgctccaaaaatattttcaacctttagatcattgccctatatcagaatcaattgcaagtgtgacctagcatctcatactctcatgtgcccataatagctatgcccacaatatcaagaagccttattgttattcacattgaacaaaaacatgatatacttgtcatagtggcaaaaggactggtaacaagcttgttaatgtgtttatttaaaaaaaagcaattaaagatgaaaagataaatgcaatcaagatgtatgctgataaacaaaaatgacactttaccatgcagcacttcatccaggcttccaccttgaagataatcatatatcaaaagttttgatgaaggagagttgcaataaccacgaagattgac

SEQ ID NO: 81315 - DNA, 1567 bp, Zea Mays
tcagattgaacgaagtcctgggctttgtgccggaaattgagaattcagcccaacatcaaacaggaccaacgcgtgcacactgacctttccctgtgtctcgtcttcctagttcaggtctcaccgcaagcacctcgatacggcggagtcgtggggaaccgtggaggtgaggtcgtgaggagaggaaaatttccaccgccgtgcagccatgtcggtgcaggagtacctggagaagcacctgctctcgcgcaagatcgaggaggccgtgaacgcggcggtccgcgccaaggcccccgacccggtgctcttcatcgcgggccacatgcggcgggcggcgcccgccgtgatcacgagggttcgggcgcgccagatccttgacgggcacggcgcgccggctgtcgaggttgagttgcacaccaacaaggccatacaccgagcatccgcggccggctcgggcgcgctcgagggcgccgccgccgacgcggccggggccgccgagaggcggaagatactcgccaaggtggtcgccgactcggtgcggatgatcaatgacaaggtatcggaggcgctcgttgggatggatccgcaggagcagtcgcagatcgaccaggctatcatggacttgaacaaggcgcgccacaaggctgagcttggagttggagcaaatgctatgctggcagtgtcaattgcagcttgcaaagctggtgctgctgaaaaagaggttccactctacaagcatatagcgaatcttgttggcaaaagcgctacaactcttcctgtacctgcaattacagtcattaatggtggaaagcatgctggaaatggtcttcccattcaagaaattatgatccttcctattggtgctaagaactttgaagaagcaatgcagatgggttctgagacctatcatcatctcaaggatgttattttggagaaatatggctcagacagctgcaacattggagatcatggtgggtttgctccaaatatttccagcatatctgaaggcctggatcttgtcattgcggcaatagagagggctggatataatggaagaataaaattggcaattgatgttgctgccactgatttttgtacaggaaagaaatatgacctggagttcaaatcaacaaagaaatcagggcagaactttaaaactgctgatgatatgattgagatctatagccagctttgttcagagtacccacttgtctccattgaacagcccttcgataaagatgactgggagcactcaaaaaaattgaccactctagagctgtgccaggttgcaggggatgacttgttgatgtctgatcctgaacgcattaagcgggcagttaatgagtacacttgcaacgctcttgttctcaaggcaaatcaagtgggcactgtcactgaggccatagaggttgtgaagcaggcaaaggatgctcattggggtgtgatggtgtcacataggtcgggagacactgaagattctttcattgctgacctggctgttggtgcttcagccggacagatcaaagccggtgccccctgccgtggagagtgtctcactaattacaatcag

SEQ ID NO: 81316 - DNA, 1468 bp, Zea Mays
tcctagttcaggtctcaccgcaagcacctcgatacggcggagtcgtggggaaccgtggaggtgaggtcgtgaggagaggaaaatttccaccgccgtgcagccatgtcggtgcaggagtacctggagaagcacctgctctcgcgcaagatcgaggaggccgtgaacgcggcggtccgcgccaaggcccccgacccggtgctcttcatcgcgggccacatgcggcgggcggcgcccgccgtgatcacgagggttcgggcgcgccagatccttgacgggcacggcgcgccggctgtcgaggttgagttgcacaccaacaaggccatacaccgagcatccgcggccggctcgggcgcgctcgagggcgccgccgccgacgcggccggggccgccgagaggcggaagatactcgccaaggtggtcgccgactcggtgcggatgatcaatgacaaggtatcggaggcgctcgttgggatggatccgcaggagcagtcgcagatcgaccaggctatcatggacttgaacaaggcgcgccacaaggctgagcttggagttggagcaaatgctatgctggcagtgtcaattgcagcttgcaaagctggtgctgctgaaaaagaggttccactctacaagcatatagcgaatcttgttggcaaaagcgctacaactcttcctgtacctgcaattacagtcattaatggtggaaagcatgctggaaatggtcttcccattcaagaaattatgatccttcctattggtgctaagaactttgaagaagcaatgcagatgggttctgagacctatcatcatctcaaggatgttattttggagaaatatggctcagacagctgcaacattggagatcatggtgggtttgctccaaatatttccaggcaacatatctgaaggcctggatcttgtcattgcggcaatagagagggctggatataatggaagaataaaattggcaattgatgttgctgccactgatttttgtacaggaaagaaatatgacctggagttcaaatcaacaaagaaatcagggcagaactttaaaactgctgatgatatgattgagatctatagccagctttgttcagagtacccacttgtctccattgaacagcccttcgataaagatgactgggagcactcaaaaaaattgaccactctagagctgtgccaggttgcaggggatgacttgttgatgtctgatcctgaacgcattaagcgggcagttaatgagtacacttgcaacgctcttgttctcaaggcaaatcaagtgggcactgtcactgaggccatagaggttgtgaagcaggcaaaggatgctcattggggtgtgatggtgtcacataggtcgggagacactgaagattctttcattgctgacctggctgttggtgcttcagccggacagatcaaagccggtgccccctgccgtggagagtgtctcactaattacaatcag

SEQ ID NO: 81317 - DNA, 1377 bp, Zea Mays
ggccctatccagaagtccagaaccttccccaatcacccacacggccacacctggccccgcccaacttccatttatgcacaggcggactcgcggactcggggctcgtaccaacaggaaaaaaggcccagaggcagtgccgtgaccgattcgagacgcaagagaaggatcgagacgaggcggcggttttccggggcagcatcgtctcggccacgaagatgtcttactcaaggggctcaagtgaaaggtatggatctcgctcaccttactcgagaagcacaaggtaccgaagtcgctctaggagtgtcgactctagtgatgctgaaaaccctgggaacaacctgtatgtgactggtttgtcggctcgtgtaacggatcgagatctggagaagcacttctccactgagggtgaggtgattgatgcaagcgttgtgtatgatccttggacaagggaatcacgggggtttggttttgttaccatggctgctgttaaagatgcagatcgctgcatcaaatatctggaccgttctgtgttgcaaggtcgggtcataactgttgagaagattttgttgacagcaacagggtagatgttggtagctgctctgcaacaaactgatacaacctaacaccaaaccatgccaacctcagccaaagggcaaagagaagacgaggtagaaccccaacacctgggaagtatcttggcacaaaatcatcccgtggacggaggtactccacaagctactcacctgatcggaggggccgttacagttcccgctactcacctgatcggagggactgtcatggtagagaccggtcatactctccatatgacagaaggcgatcatactctccttacggcagggatgaatcatattccccttactatggccggcgatcatactcaccttactacagcagacggtatcgttcaaggtccccatactgctacagaagacgcaggtcaccttctgtttcgccatactaccgccggcacagccattccccagaatccgagagatcaacaagctattctcctaagaaagggagtaaaagggaaccctcgcgtagcagatactctggcaagagtcgtcattcaagggaaagccactctcatagccgcagttcgtactccaggtctgtgtccagggagcgctcagcttgatctgcgaggtgtgtcgtcctaggtggttataagatatgcgctgtatttgcatctatcagaacttgtgtacttcgtatattacgaacttgagaactgtatggatgtgtgcattgtgccaaattatgttcattctgtgctatctttctgatgctatcttgctattgttggtttgaacttggtaatttagtttacaaaatcattcgacatgtggagtccct

SEQ ID NO: 81318 - DNA, 1375 bp, Zea Mays
ggccctatccagaagtccagaaccttccccaatcacccacacggccacacctggccccgcccaacttccatttatgcacaggcggactcgcggactcggggctcgtaccaacaggaaaaaaggcccagaggcagtgccgtgaccgattcgagacgcaagagaaggatcgagacgaggcggcggttttccggggcagcatcgtctcggccacgaagatgtcttactcaaggggctcaaggtatggatctcgctcaccttactcgagaagcacaaggtaccgaagtcgctctaggagtgtcgactctagtgatgctgaaaaccctgggaacaacctgtatgtgactggtttgtcggctcgtgtaacggatcgagatctggagaagcacttctccactgagggtgaggtgattgatgcaagcgttgtgtatgatccttggacaagggaatcacgggggtttggttttgttaccatggctgctgttaaagatgcagatcgctgcatcaaatatctggaccgttctgtgttgcaaggtcgggtcataactgttgagaaggcaaagagaagacgaggtagaaccccaacacctgggaagtatcttggcacaaaatcatcccgtggacggaggtactccacaagctactcacctgatcggaggggccgttacagttcccgctactcacctgatcggagggactgtcatggtagagaccggtcatactctccatatgacagaaggcgatcatactctccttacggcagggatgaatcatattccccttactatggccggcgatcatactcaccttactacagcagacggtatcgttcaaggtccccatactgctacagaagacgcaggtcaccttctgtttcgccatactaccgccggcacaggtacagatctgtctccaagtcatccagttcatctccaagggccagaggacggagctattcgtgcagtttatcaccacagagaagctactcgcgcagccattccccagaatccgagagatcaacaagctattctcctaagaaagggagtaaaagggaaccctcgcgtagcagatactctggcaagagtcgtcattcaagggaaagccactctcatagccgcagttcgtactccaggtctgtgtccagggagcgctcagcttgatctgcgaggtgtgtcgtcctaggtggttataagatatgcgctgtatttgcatctatcagaacttgtgtacttcgtatattacgaacttgagaactgtatggatgtgtgcattgtgccaaattatgttcattctgtgctatctttctgatgctatcttgctattgttggtttgaacttggtaatttagtttacaaaatcattcgacatgtggagtccct

SEQ ID NO: 81319 - DNA, 1371 bp, Zea Mays
ggccctatccagaagtccagaaccttccccaatcacccacacggccacacctggccccgcccaacttccatttatgcacaggcggactcgcggactcggggctcgtaccaacaggaaaaaaggcccagaggcagtgccgtgaccgattcgagacgcaagagaaggatcgagacgaggcggcggttttccggggcagcatcgtctcggccacgaagatgtcttactcaaggggctcaaggtatggatctcgctcaccttactcgagaagcacaaggtaccgaagtcgctctaggagtgtcgactctagtgatgctgaaaaccctgggaacaacctgtatgtgactggtttgtcggctcgtgtaacggatcgagatctggagaagcacttctccactgagggtgaggtgattgatgcaagcgttgtgtatgatccttggacaagggaatcacgggggtttggttttgttaccatggctgctgttaaagatgcagatcgctgcatcaaatatctggaccgttctgtgttgcaaggtcgggtcataactgttgagaagattttgttgacagcaacagggtagatgttggtagctgctctgcaacaaactgatacaacctaacaccaaaccatgccaacctcagccaaagggcaaagagaagacgaggtagaaccccaacacctgggaagtatcttggcacaaaatcatcccgtggacggaggtactccacaagctactcacctgatcggaggggccgttacagttcccgctactcacctgatcggagggactgtcatggtagagaccggtcatactctccatatgacagaaggcgatcatactctccttacggcagggatgaatcatattccccttactatggccggcgatcatactcaccttactacagcagacggtatcgttcaaggtccccatactgctacagaagacgcaggtcaccttctgtttcgccatactaccgccggcacagccattccccagaatccgagagatcaacaagctattctcctaagaaagggagtaaaagggaaccctcgcgtagcagatactctggcaagagtcgtcattcaagggaaagccactctcatagccgcagttcgtactccaggtctgtgtccagggagcgctcagcttgatctgcgaggtgtgtcgtcctaggtggttataagatatgcgctgtatttgcatctatcagaacttgtgtacttcgtatattacgaacttgagaactgtatggatgtgtgcattgtgccaaattatgttcattctgtgctatctttctgatgctatcttgctattgttggtttgaacttggtaatttagtttacaaaatcattcgacatgtggagtccct

SEQ ID NO: 81320 - DNA, 2368 bp, Zea Mays
ctcaaaagggtgagagatccaaatctccatgactccatcccatagccccgctcacgctgtcgctgtcacgcacatcatcgtcctcctcccttccccgcaggccccctcgcctcgcgcgtgcgccccccctaccccgtctcctccctgcctgcgcgagcgactagtagaaataggcgcgcgtgccgcctcggccgctcgctcctctggttaatcccccctcgccacgactcgcagccatcccttcacattatccgcgcgcgcgcgagcggacgtagcgtgtgggtagcgtcgccgtgcggacggtctcttggtgccggtgcgggccgcgtgacggtgcgtgtgccgcccgcggggaggaggtcgttcggttggttggccctcggcgacgatggcggtccacggcggagaggcggtctccgtcgcgctcctcttctccctcgctttcttctgcgctcgcctcctgctcgaccgcctcgtctacaaggtatacccccgtcccgacaccgccagattcgtgccgggttccgcgagatctctggtctccccggtttcgctcccacgccccaatgccccccggtcgcgactcgcgagtggcgacgcgggcgcggggcgtggtatccgccgccgctcgttgcaccttccttaccgatcagctgattccgctcgtccggcgggggatcatccgagtgcgtgtgacgtaatgctcccgccagtcgttaattgcgttactggtggctggctggccgctactctgttaaggaccaacggcgctggtgcggtttgcagtagtatgtgcagatgtgctcgcagtagagcatggatcaataactttgtccttatgcaaagattgttcgtaatagaaccttgcacctaacaagtctacatctggcatggcttgccaattgcatgatattttcctgaattcctgcaagccagctatacgtcttccctttctctagaaggtttgagcccaacagaggtgatgatgtaaataaggtggcaaggtgatgtatgtacaagttttttttctatataagcacagtggtactcataagctgtgccaatatgcaactcttaattatcttggcattggatcgcttctaaaatttcagtatgaatagtaccttttgatatcatatggcagtttaactacacatcttaacgctatgctttccagccattagcagtctaccttttcaacaccaaagcttctaagttgatgaataatgaggccaggcaagcaaagattgtcaagttctcagagtccatttggaaacttacctactatgcttctgttcaagcatgggtcctcatgataataaagcaggaaccatggtcattggatatgatgcaatactttgatggctggccgaaccaacccatcgtgtcttcattgatgcttttctatatgtgccagtgtggattttatatctatagcatcggtgctcttgttgcttgggaaacccgcagaaaagattttgctgtaatgatgtctcatcatatttttccgaattgggaccatcattctcgctcttcatgatgcaagtgatgtgtttcttgagactgccaaattgtgcaaatacacagaaaaagagctgggtgctagcttgttttttggtctcttcgctatctcctggcttctattgcgtctgatttacttcccattttggataatcaaagcctctagctatcattccatcacattcttgaggaagctggatgaattcccaacaactttgtactacatcttgaacacaatgcttctcacattgcttgtattccatatgtactggtggaaactcatatgtttgatgataatgagacagctgaataataaaggacaagttacagacgatgtccgatctgattctgaggatgaggagtaatgggagattcattctttgacatctgcaacgtggcatttcctcgtcaatacttttctatgcctgcttccagaattgattgcttttaatcttggcaagtctcgggaacgtataggaaagtttaatctctgtatattgccttatgatatcaaacatggctagaccgggaatggatctatacatgatgacgggcatagctagcaagcttacttcaaggttccttaaaaaattttggttcacctttatttgatatggggaaagacatgagagggtgtacagctttttcctgaagcttgcagaacccccctctgtaccatgatcaatatacttcacttgtgagtagatttagttctaattgatgataataaattgattcttttgattgggaatgaatctcacctgaaccttaatgatctcatctgatgtgtattgagcattatgatgctatataattttttttttgaatcaatgcattaggacgtgac

SEQ ID NO: 81321 - DNA, 1706 bp, Zea Mays
ctcaaaagggtgagagatccaaatctccatgactccatcccatagccccgctcacgctgtcgctgtcacgcacatcatcgtcctcctcccttccccgcaggccccctcgcctcgcgcgtgcgccccccctaccccgtctcctccctgcctgcgcgagcgactagtagaaataggcgcgcgtgccgcctcggccgctcgctcctctggttaatcccccctcgccacgactcgcagccatcccttcacattatccgcgcgcgcgcgagcggacgtagcgtgtgggtagcgtcgccgtgcggacggtctcttggtgccggtgcgggccgcgtgacggtgcgtgtgccgcccgcggggaggaggtcgttcggttggttggccctcggcgacgatggcggtccacggcggagaggcggtctccgtcgcgctcctcttctccctcgctttcttctgcgctcgcctcctgctcgaccgcctcgtctacaagtctaccttttcaacaccaaagcttctaagttgatgaataatgaggccaggcaagcaaagattgtcaagttctcagagtccatttggaaacttacctactatgcttctgttcaagcatgggtcctcatgataataaagcaggaaccatggtcattggatatgatgcaatactttgatggctggccgaaccaacccatcgtgtcttcattgatgcttttctatatgtgccagtgtggattttatatctatagcatcggtgctcttgttgcttgggaaacccgcagaaaagattttgctgtaatgatgtctcatcatgtaataacatctactctaattggagtttcatatctgactggatttttccgaattgggaccatcattctcgctcttcatgatgcaagtgatgtgtttcttgagactgccaaattgtgcaaatacacagaaaaagagctgggtgctagcttgttttttggtctcttcgctatctcctggcttctattgcgtctgatttacttcccattttggataatcaaagcctctagctatcattccatcacattcttgaggaagctggatgaattcccaacaactttgtactacatcttgaacacaatgcttctcacattgcttgtattccatatgtactggtggaaactcatatgtttgatgataatgagacagctgaataataaaggacaagttacagacgatgtccgatctgattctgaggatgaggagtaatgggagattcattctttgacatctgcaacgtggcatttcctcgtcaatacttttctatgcctgcttccagaattgattgcttttaatcttggcaagtctcgggaacgtataggaaagtttaatctctgtatattgccttatgatatcaaacatggctagaccgggaatggatctatacatgatgacgggcatagctagcaagcttacttcaaggttccttaaaaaattttggttcacctttatttgatatggggaaagacatgagagggtgtacagctttttcctgaagcttgcagaacccccctctgtaccatgatcaatatacttcacttgtgagtagatttagttctaattgatgataataaattgattcttttgattgggaatgaatctcacctgaaccttaatgatctcatctgatgtgtattgagcattatgatgctatataattttttttttgaatcaatgcattaggacgtgac

SEQ ID NO: 81322 - DNA, 2067 bp, Zea Mays
ctcaaaagggtgagagatccaaatctccatgactccatcccatagccccgctcacgctgtcgctgtcacgcacatcatcgtcctcctcccttccccgcaggccccctcgcctcgcgcgtgcgccccccctaccccgtctcctccctgcctgcgcgagcgactagtagaaataggcgcgcgtgccgcctcggccgctcgctcctctggttaatcccccctcgccacgactcgcagccatcccttcacattatccgcgcgcgcgcgagcggacgtagcgtgtgggtagcgtcgccgtgcggacggtctcttggtgccggtgcgggccgcgtgacggtgcgtgtgccgcccgcggggaggaggtcgttcggttggttggccctcggcgacgatggcggtccacggcggagaggcggtctccgtcgcgctcctcttctccctcgctttcttctgcgctcgcctcctgctcgaccgcctcgtctacaaggtatacccccgtcccgacaccgccagattcgtgccgggttccgcgagatctctggtctccccggtttcgctcccacgccccaatgccccccggtcgcgactcgcgagtggcgacgcgggcgcggggcgtggtatccgccgccgctcgttgcaccttccttaccgatcagctgattccgctcgtccggcgggggatcatccgagtgcgtgtgacgtaatgctcccgccagtcgttaattgcgttactggtggctggctggccgctactctgttaaggaccaacggcgctggtgcggtttgcagtagtatgtgcagatgtgctcgcagtagagcatggatcaataactttgtccttatgcaaagattgttcgtaatagaaccttgcacctaacaagtctacatctggcatggcttgccaattgcatgatattttcctgaattcctgcaagccagctatacgtcttccctttctctagaaggtttgagcccaacagaggtgatgatgtaaataaggtggcaaggtgatgtatgtacaagttttttttctatataagcacagtggtactcataagctgtgccaatatgcaactcttaattatcttggcattggatcgcttctaaaatttcagtatgaatagtaccttttgatatcatatggcagtttaactacacatcttaacgctatgctttccagccattagcagtctaccttttcaacaccaaagcttctaagttgatgaataatgaggccaggcaagcaaagattgtcaagttctcagagtccatttggaaacttacctactatgcttctgttcaagcatgggtcctcatgataataaagcaggaaccatggtcattggatatgatgcaatactttgatggctggccgaaccaacccatcgtctatcattccatcacattcttgaggaagctggatgaattcccaacaactttgtactacatcttgaacacaatgcttctcacattgcttgtattccatatgtactggtggaaactcatatgtttgatgataatgagacagctgaataataaaggacaagttacagacgatgtccgatctgattctgaggatgaggagtaatgggagattcattctttgacatctgcaacgtggcatttcctcgtcaatacttttctatgcctgcttccagaattgattgcttttaatcttggcaagtctcgggaacgtataggaaagtttaatctctgtatattgccttatgatatcaaacatggctagaccgggaatggatctatacatgatgacgggcatagctagcaagcttacttcaaggttccttaaaaaattttggttcacctttatttgatatggggaaagacatgagagggtgtacagctttttcctgaagcttgcagaacccccctctgtaccatgatcaatatacttcacttgtgagtagatttagttctaattgatgataataaattgattcttttgattgggaatgaatctcacctgaaccttaatgatctcatctgatgtgtattgagcattatgatgctatataattttttttttgaatcaatgcattaggacgtgac

SEQ ID NO: 81323 - DNA, 1138 bp, Zea Mays
agcattgtggctctaggttagaattaatgtcttcattgatgcttttctatatgtgccagtgtggattttatatctatagcatcggtgctcttgttgcttgggaaacccgcagaaaagattttgctgtaatgatgtctcatcatgtaataacatctactctaattggagtttcatatctgactggatttttccgaattgggaccatcattctcgctcttcatgatgcaagtgatgtgtttcttgagactgccaaattgtgcaaatacacagaaaaagagctgggtgctagcttgttttttggtctcttcgctatctcctggcttctattgcgtctgatttacttcccattttggataatcaaagcctctaggtttgttttttacttctctttgtgataactttctgtttctgtagtcttgtagttttggacttattgctgttgccgttgcaatggcagctatcattccatcacattcttgaggaagctggatgaattcccaacaactttgtactacatcttgaacacaatgcttctcacattgcttgtattccatatgtactggtggaaactcatatgtttgatgataatgagacagctgaataataaaggacaagttacagacgatgtccgatctgattctgaggatgaggagtaatgggagattcattctttgacatctgcaacgtggcatttcctcgtcaatacttttctatgcctgcttccagaattgattgcttttaatcttggcaagtctcgggaacgtataggaaagtttaatctctgtatattgccttatgatatcaaacatggctagaccgggaatggatctatacatgatgacgggcatagctagcaagcttacttcaaggttccttaaaaaattttggttcacctttatttgatatggggaaagacatgagagggtgtacagctttttcctgaagcttgcagaacccccctctgtaccatgatcaatatacttcacttgtgagtagatttagttctaattgatgataataaattgattcttttgattgggaatgaatctcacctgaaccttaatgatctcatctgatgtgtattgagcattatgatgctatataattttttttttgaatcaatgcattaggacgtgac

SEQ ID NO: 81324 - DNA, 293 bp, Zea Mays
gcaaactcaaacacatagttcagcctgggtcacacatcagtgacccaaggatctcgttgccacctgatgtcgggccaaactaacgccatggtcgtgtgttatagtttgcgatttttaagagattgaactgttcaatatccaaattgccaagtcaatggaggatgctttgcactccgcgcagcactttgacttcttattttacaggtactctttcgagggacttattggtgtcggttctgggggcttctccaaaggcgtgaagaggacatcgtaaggatcaaagttgcctgcag

SEQ ID NO: 81325 - DNA, 3248 bp, Zea Mays
atatgtttcctgaaccaatccattaaagatcacaacagctagcgttctcccgctagcttccctctctcctctgccgatctttttcgtccaccagcatggagaagaggaacctgcagtggcggcgagggcgtgatggcatcgtgcagtaccctcacctcttcttcgcggccctggcgctggccctcctagtcgcggacccgttcggcctcagtccgctggccgaggtcgactaccggccggtgaagcacgagctcgcgccgtacggggaggtcatgggcagctggcccagagacaatgccagccggctcaggcgcgggaggctggagttcgtcggcgaggtgttcgggccggagtctatcgagttcgatctccagggccgcgggccgtacgccggcctcgccgacggccgcgtcgtgcggtggatgggcgaggaggccgggtgggagacgttcgccgtcatgaatcctgactggtcagaagaagtctgtgccaatggagtgaactcaacgacgaggaagcagcacgagaaggaggagttctgcggccggccgctcggcctgaggttccacggggagaccggcgagctctacgtcgccgacgcgtactacggtctcatggtcgttggccagagcggcggcgtggcgtcctccgtcgcgagggaagccgacggggaccccatccggttcgcgaacgacctcgatgtgcacaggaatggatccgtattcttcactgacacgagcatgagatacagcagaaaggaccatctgaacatcctgttagaaggagaaggcaccgggaggctgctcaggtatgatccagaaacaagcggtgtccatgtcgtgctcaaggggctggtgttcccaaacggcgtgcagatctcagaggaccatcagtttcttctcttctccgagacaacaaactgcaggataatgaggtactggctggaaggcccaagagcgggcgaggtagaggtgttcgcgaacctgccgggcttccccgacaacgtgcgctccaacggcaggggccagttctgggtggcgatcgactgctgccggacgccggcgcaggaggtgttcgccaagaggccgtggctccggaccctgtacttcaagttcccgctgtcgctcaaggtgctcacttggaaggccgccaggaggatgcacacggtgctcgcgctcctcgacggcgaagggcgcgtcgtggaggtgctcgaggaccggggccacgaggtgatgaagctggtgagcgaggtgcgggaggtgggccgcaagctgtggatcggaaccgtggcgcacaaccacatcgccaccatcccctaccctttagaggactaaccatgatctatgctgtttcaatgcctcctaatctgtgtacgtctataaatgtctaatgcagtcactggttgtaatcttgtttgtgtttggcaaattggcataataatggacagattcaatgggcattggtgctgtagtcgcatcacactaattgaatgggatcatgttgagctctcactttgctacaatttgctccagcttgtacggttgtaccctcttgctcgtctatagtaagggccatctaaaaaaaactcaaattagatctgcaatacaagtatgattgggccgaatttggattgtcacgggtccgcgaccgcgaattgggctcggtttgatttagccgacatagtagtgaccgacccgagccggcggcgagccaaaccgagcggacgccgccatggatcgcgagtggggctccaagcccggcagcggcggcgccgcctccgcgcagaatgaggccatcgaccggcgggagcgcctccgccgcctggccctcgagaccatcgacctcgccaaggacccctatttcatgcgcaaccacctcggcagctacgagtgcaagctgtgcctgacgctgcacaacaatgaggggaactacctggcccacacgcaggggaagcggcaccagaccaacctcgccaagcgcgccgcccgcgaggccaaggacgcacccgcgcagcctcagcccaacaagcgcaagcttgccccccgcaagtctgttaagattggcagacctgggtataaagtaaccaaacaatatgatcctgagatgaagcaacactcgtttctttttgaaattggttacccggaaatcgaagataattgcaagccaaggcaccgtttcatgtcatcatatgaacagtccaaagttgggataagggttatcagtacctactttttgctgcagagccctatgaaattattgcattcaagataccaagtacagagattgataaatcagcgaacaaattcttctcttactgggatcctgacaagaaggaatatctactgcaactgtacttcaagccaagaccgccagaagctaataaaccaccaccagctcctccggggactttgcctaatgggactggggttcctggtgctccaacaaggccaccggcgcaagcccctccacccctgccacaagttccaccgcccccgcctcatgcacctcctcctgcacccatgggaatgccccctaggattcctccaccccctatgggtggtgttcaacctccgccgcctcctccaccgccagttgcaaatggtccgcggccaatgattccaccgccacctaacttcactcctggagcacccccaccacgccctccaatgcatggttttcctgggcaacaacagcagtagttaagtgcttagcaatgttccagtaattgacagtcggcaaaagtttcacgcttgcttgtgttgccttatgttttccaactcaaaactttgaatgttatcataggcttacatggtctctagactatactcagatttggtcgaccgatttggtcaaattgcaagaaattgagttacatcaaaatccaaggtacaaaggaagacaacaattaaaaccatcaaaatggtgaaagtgcaatggagtcagtacttgtttgaagaagccacatggtaagtggaagtcacgataggaagcaatatccatatctcttcgactcaagataactagaagccattgttttgtagcaaagtttagtttgggttcaaagggatagctaggagggaacgaaaattgctaatttctctcgattttgattttcaatgcataacacctattttggttaatctcagggcacattttttccccaaaggggaggttggtcatgaccctatcatgatagtcatttccatactcatcatgagaattatatgcatttgaatctcaatttgttt

SEQ ID NO: 81326 - DNA, 3203 bp, Zea Mays
atatgtttcctgaaccaatccattaaagatcacaacagctagcgttctcccgctagcttccctctctcctctgccgatctttttcgtccaccagcatggagaagaggaacctgcagtggcggcgagggcgtgatggcatcgtgcagtaccctcacctcttcttcgcggccctggcgctggccctcctagtcgcggacccgttcggcctcagtccgctggccgaggtcgactaccggccggtgaagcacgagctcgcgccgtacggggaggtcatgggcagctggcccagagacaatgccagccggctcaggcgcgggaggctggagttcgtcggcgaggtgttcgggccggagtctatcgagttcgatctccagggccgcgggccgtacgccggcctcgccgacggccgcgtcgtgcggtggatgggcgaggaggccgggtgggagacgttcgccgtcatgaatcctgactggtcagaagaagtctgtgccaatggagtgaactcaacgacgaggaagcagcacgagaaggaggagttctgcggccggccgctcggcctgaggttccacggggagaccggcgagctctacgtcgccgacgcgtactacggtctcatggtcgttggccagagcggcggcgtggcgtcctccgtcgcgagggaagccgacggggaccccatccggttcgcgaacgacctcgatgtgcacaggaatggatccgtattcttcactgacacgagcatgagatacagcagaaaggaccatctgaacatcctgttagaaggagaaggcaccgggaggctgctcaggtatgatccagaaacaagcggtgtccatgtcgtgctcaaggggctggtgttcccaaacggcgtgcagatctcagaggaccatcagtttcttctcttctccgagacaacaaactgcaggataatgaggtactggctggaaggcccaagagcgggcgaggtagaggtgttcgcgaacctgccgggcttccccgacaacgtgcgctccaacggcaggggccagttctgggtggcgatcgactgctgccggacgccggcgcaggaggtgttcgccaagaggccgtggctccggaccctgtacttcaagttcccgctgtcgctcaaggtgctcacttggaaggccgccaggaggatgcacacggtgctcgcgctcctcgacggcgaagggcgcgtcgtggaggtgctcgaggaccggggccacgaggtgatgaagctggtgagcgaggtgcgggaggtgggccgcaagctgtggatcggaaccgtggcgcacaaccacatcgccaccatcccctaccctttagaggactaaccatgatctatgctgtttcaatgcctcctaatctgtgtacgtctataaatgtctaatgcagtcactggttgtaatcttgtttgtgtttggcaaattggcataataatggacagattcaatgggcattggtgctgtagtcgcatcacactaattgaatgggatcatgttgagctctcactttgctacaatttgctccagcttgtacggttgtaccctcttgctcgtctatagtaagggccatctaaaaaaaactcaaattagatctgcaatacaagtatgattgggccgaatttggattgtcacgggtccgcgaccgcgaattgggctcggtttgatttagccgacatagtagtgaccgacccgagccggcggcgagccaaaccgagcggacgccgccatggatcgcgagtggggctccaagcccggcagcggcggcgccgcctccgcgcagaatgaggccatcgaccggcgggagcgcctccgccgcctggccctcgagaccatcgacctcgccaaggacccctatttcatgcgcaaccacctcggcagctacgagtgcaagctgtgcctgacgctgcacaacaatgaggggaactacctggcccacacgcaggggaagcggcaccagaccaacctcgccaagcgcgccgcccgcgaggccaaggacgcacccgcgcagcctcagcccaacaagcgcaagcttgccccccgcaagtctgttaagattggcagacctgggtataaagtaaccaaacaatatgatcctgagatgaagcaacactcgtttctttttgaaattggttacccggaaatcgaagataattgcaagccaaggcaccgtttcatgtcatcatatgaacagagccctatgaaattattgcattcaagataccaagtacagagattgataaatcagcgaacaaattcttctcttactgggatcctgacaagaaggaatatctactgcaactgtacttcaagccaagaccgccagaagctaataaaccaccaccagctcctccggggactttgcctaatgggactggggttcctggtgctccaacaaggccaccggcgcaagcccctccacccctgccacaagttccaccgcccccgcctcatgcacctcctcctgcacccatgggaatgccccctaggattcctccaccccctatgggtggtgttcaacctccgccgcctcctccaccgccagttgcaaatggtccgcggccaatgattccaccgccacctaacttcactcctggagcacccccaccacgccctccaatgcatggttttcctgggcaacaacagcagtagttaagtgcttagcaatgttccagtaattgacagtcggcaaaagtttcacgcttgcttgtgttgccttatgttttccaactcaaaactttgaatgttatcataggcttacatggtctctagactatactcagatttggtcgaccgatttggtcaaattgcaagaaattgagttacatcaaaatccaaggtacaaaggaagacaacaattaaaaccatcaaaatggtgaaagtgcaatggagtcagtacttgtttgaagaagccacatggtaagtggaagtcacgataggaagcaatatccatatctcttcgactcaagataactagaagccattgttttgtagcaaagtttagtttgggttcaaagggatagctaggagggaacgaaaattgctaatttctctcgattttgattttcaatgcataacacctattttggttaatctcagggcacattttttccccaaaggggaggttggtcatgaccctatcatgatagtcatttccatactcatcatgagaattatatgcatttgaatctcaatttgttt

SEQ ID NO: 81327 - DNA, 1436 bp, Zea Mays
atggaaggagaatctccaaccagggaagaccttggatcgtcgaaatcttctgcgcgatgcaccgctctcccctccacctccgctccatggcgcgatgtaggctggtatgtgccagcatcctgcaatccccatgctctggatctgggaacgagcaatctccgcacatttgtgttggttcgtcctccatccatgtgcccccaatatcctacatcagcacgcgtatctttcacctacatccaccccattccatctaacatggaaacccaaatccccaccgcaatcagcgttcatcgtcgagtcccaccttccagtgcagactcggttccctcaacgctgtcaactcctattaaaatacacgaccactgtgagggatgtagacaaatcccccatcaaacttcgacgttcgttgtctgttcagcacccattacgatcgtagtgggcttcaacgccttcgccagtgagttattatgttctagcgagcgggtgcggaagaaggaagggagaggcgcttggttgacccagatcggatggcaggacatagtcaggggttcgctgcaacgcaacgacggctaccgcagcttctcaggccaagttggagatgaagtgactgactccatgggcatgtggttcacctccctgctggtgctagacaaatatcaggctagcattgatgtagaatgtgcggcaaagactgatgactgcttgaagcttcctggaaaccgcccctcctctacgggtttgttcaaccaagtcagcttccacatcggtcagtgtcttggactttctctgccactcccagaccttggtatcttttttatgggtgctcattatgtcattcaccacacctgtcttgttgctcaccgctcctactaccacaggtccaaagcaagaaagaaggaacggaggacgataatggctctggtcgggcaagtggcgatggtggcgcagctggtgggcgtggatgcgtttagcctcttcattcttggtatctttgtgtttgtacccattgctaatctggccttagtcttggatgaagttatagttctgttgcagaaagatgaaggtgcaaccattgctaagatggtaacgtacaacaggatactgatagttagagtagggacttgggacatagtgaagtcccttttccaaaatgattcgcctacaacattacttgctcgtgtgatgggcaccattggctccatagaacaagctatgcttgcacagggacgccacacctacaaatatttcataaaaaaccacatgttgtatgaaaaaaatcaggaaaggtttgcatttggaagaatgggatttgattggtgatttgtggatcgtatgactggtgattagagaagctagagtgcaacgacaaggagataatggagaataagtatttcaccccaatcaaagggagggcgtattgtggcggctacgaggga

SEQ ID NO: 81328 - DNA, 1140 bp, Zea Mays
atggaaggagaatctccaaccagggaagaccttggatcgtcgaaatcttctgcgcgatgcaccgctctcccctccacctccgctccatggcgcgatgtaggctggtatgtgccagcatcctgcaatccccatgctctggatctgggaacgagcaatctccgcacatttgtgttggttcgtcctccatccatgtgcccccaatatcctacatcagcacgcgtatctttcacctacatccaccccattccatctaacatggaaacccaaatccccaccgcaatcagcgttcatcgtcgagtcccaccttccagtgcagactcggttccctcaacgctgtcaactcctattaaaatacacgaccactgtgagggatgtagacaaatcccccatcaaacttcgacgttcgttgtctgttcagcacccattacgatcgtagtgggcttcaacgccttcgccagtgagttattatgttctagcgagcgggtgcggaagaaggaagggagaggcgcttggttgacccagatcggatggcaggacatagtcaggggttcgctgcaacgcaacgacggctaccgcagcttctcaggccaagttggagatgaagtgactgactccatgggcatgtggttcacctccctgctggtgctagacaaatatcaggctagcattgatgtagaatgtgcggcaaagactgatgactgcttgaagcttcctggaaaccgcccctcctctacgggtttgttcaaccaagtcagcttccacatcggtcagtgtcttggactttctctgccactcccagaccttggtatcttttttatgggtgctcattatgtcattcaccacacctgtcttgttgctcaccgctcctactaccacaggtccaaagcaagaaagaaggaacggaggacgataatggctctggtcgggcaagtggcgatggtggcgcagctggtgggcgtggatgcgtttagcctcttcattcttggaaaggtttgcatttggaagaatgggatttgattggtgatttgtggatcgtatgactggtgattagagaagctagagtgcaacgacaaggagataatggagaataagtatttcaccccaatcaaagggagggcgtattgtggcggctacgaggga

SEQ ID NO: 81329 - DNA, 4218 bp, Zea Mays
gctagtagcctgctacacagctctccaaggcaagttcggcggctaaccacagcacagcccattagtggtccaaggaccaagcccatcttttacccgacgattatgcaggggcccatagctaatctgatccgcagagaccattaaccaaagaatcccttcgtcccggagacccggacctccctggttgcgggttgcggcgcctgcctcctccgcccatgcgacgcgcgcccgcgcaaactacccgccttcgcagtcgtccgcgcgggaaacgtgaagctaatccaactccaacatttcctcccgatgcgctgtgctgtgctgtactccttcgcagggagctctcgaaacccaaaccctagctctgacccaccgcgattccccatttgatttctcgtacccatgggtggatccgctgatcccgaggcgccgtcgccgtctccgacgaagccatcgccctcgtcggctgacgggaagccgccgaggcggtgcgtgcagtcgaaactctcgtgggggcttgtcaaaccagccggcggcggccgcgaaggtggaggaaaaggaggcggcggtgaagcaggaagaggagatgccgaggctgttcctcctgtgcctgcggccggggaggcggcggcgacggaagttagagaggggctggagaaggggaagaagaagagaaagccgcggaaatcagaggatggcaagaagggctcttcaagcaaacagaaacaatggcaggatcaatcgaacaaagatggagtcattttggttgatgaaagccctcagaaaaagcaacgtaaaggtagaaagcaagatgcaatactgaaggagcctaatgctagcagaaagcgttgcaagacatcggaagctcctgatggtcctggaagctgtcagcaattgcatatcagccagattgaagccagctcgcctgcagcagcgccagtaataattgacgttgatttgatgagtacgccttctaaagcaggacatgctaattcaatcgatcaggatatatcaccgttgaaagttgacctaaggtcagaggcgaagatagctgcagaggaaattcgaaggttatcatctggaaagaaaattcaccctttctttcattctcggaaattgaacaaatgtgctagccaagatcaagatgtcatcaatattgaaaacatgcatgggctttgtgattctgaaagggatccaccattttatcctattcatgttgtgtaccaatcagagatcaacgtggacacacagaacttgttgaggcctggtgctagttgccaagcttctcttcttgatctgaatgtagagccagaagatccacagaatggttgtcagcctgcctgttacctatggactgacaagtaccgacctgaaactgtggcccaggtatgtggaaatagtgagcacgtaaagtttcttgctgaatggcttaaaagctgggatgaaaaaggccacaagattggagttgctaacggggacactaatgataactcatatcaagatatatctgattcagattattcagagagtgcttctgattgtgaaaatacacttctaatcactggacctgttgggtgtggaaaatcagctgcagtttttgcatgcgccagagaacaaggcttcaatgtgatagaggtaaatacatctgacatgagaaatggagcttatgtaaggcagaagtttgaggaagcaactaaatcacatggccttgaaaaatggtcacaggaggaggttatcaatccactaagggatgattccttggatccagattcaggaactcctgataggactgaataccaatgtttgatgtcctgtgctacaagagtaatgattgactgtgatcaacagaaatcacctgtaggatactactcaggtttgaaggcctgtgatgaacctcctaaacaagttgctaacaagacactcatactatttgaggatgtggatactgtctttgatgaggatcgtgggtttatttcaactattcttaagatggcagagactacaaaatggccaatcatactaactagcaacaagaaggatccgtctttgccgaatctcttggatcaacttgttttggatttcaaatacccatcgacctcagagctactttcacacgttgccatgatttgtaaatctgagggagtgaatgtcactgttcctcagttaaaacatgtaattgatgtttgtctaggtgacattaggagggtggtgatgtttttgcagttttggtaccaagggcatcaattcacagagaggccaaaggaatgtttgtgtggtcctttctcacttgatttagatgcagtacattctacagtgccaaaaatgttgccatgggagttcccttgtaagttatctgaaacattatgcatggaggtagacaaaactatccttttggctgaagaaaagaaaaaacagatggaaatatcagatcttgaaggcctgcagttacatgtaacagcacctttgatcaagggaagaacttctaaaacaagaagggctaagaaatccaaattaaagcgtgctcactcgactgagcataatgatatttcaccttctgatgtaggtactgaaaaacataacatatttactgttactgaagttggtttcttcccacaaccttcagaggtgcctcctatgcatgggcaagggatttctgatcagttccattttcccgttgaatcacgagagacatgtgaaattgctgattctttccaaaatccacctgaaagcaacatgtatgggtccatttcacaagtttgtgatacatttatgtcacaggacgtgtcatgtgtacccgagtcatccttaattttggacggcacatctgcatccataagtggtgatgaatttttgtcaagggcagtgtccaatggtttttctgccttttgtgagggtacatacactacctccagaatggtattagaagacagtgactgtgtgaagaatctaatggctgaacgacaaaaagatgttgaagatgtagttggtgagacaagtgagacttatatggaatcatttcggagaaatgaacaggcaagctgttcagctgctgggtttcaattaatggatgaatgtagtcgtgctgaaagcatctggctgctctctggcaaaaaatctaatgactcttgcaaggtggaactagtacaggacacttggaacaggctacggagttgtcgtcttgaatttaccagtgaggctaatcacaacagagcaacttctggagctttgaagcttgtctcagaagtgtctgatttaatatcagaatcagatcttatgcttttccgttgctaccctcttactaaggatacgttggatccgtctttaactccttgtgatgagccagttgattcttcttggtacagcaatcaggttgagatgggatctgtatatgcccagcatgctcttcgtattttatcgaggaattcccaaaaaatagatggtggttctgtcgatttgtcacaagagttgtttgccagtacagctgctgtatcctttggtaaaattacctgttcaggattcaggaatgattatggatctacggacctttctcatatgaaaaatccaactacctgtatttttaaaagaagggagcggcatgttcatctttgtgaaaccctgtctccagtggttcctccaaagttgttgcagtcattgagaggccctgcttttgttgattatttgtcttcaatcagccagatttccaaattagaaaacttgcgactctctgaaaataaagtcataaacaagcgaagaaggtcccgtcaggcaagacattacttgagttctggcgcacttcaactttcacatgaggatgttgtattattagaagaaagcggctgtttcagtagcagacgcgagagggttgaggttgtagagcaagcaccagtcagtacataagttaatgaactggtgctgatcatgagcggcagcattttgattttttttattagaaggcaatgtgactgggttggccgagccatttttatagttgcgtccgtgatcacggagcccggcggtggaggaaccggaatgtgtgcagttgattgctgtatctgttagataactagacattttaaagtttatttaaattttaaaattatttatagcaatcatgaatatggattaatcttagtatgtttacatgttcatgtttatcatctttataatcataaatagtataaaaataagaagtttaagaatgcacgttaaagtgaagctgtt

SEQ ID NO: 81330 - DNA, 4347 bp, Zea Mays
ctgatccgcagagaccattaaccaaagaatcccttcgtcccggagacccggacctccctggttgcgggttgcggcgcctgcctcctccgcccatgcgacgcgcgcccgcgcaaactacccgccttcgcagtcgtccgcgcgggaaacgtgaagctaatccaactccaacatttcctcccgatgcgctgtgctgtgctgtactccttcgcagggagctctcgaaacccaaaccctagctctgacccaccgcgattccccatttgatttctcgtacccatgggtggatccgctgatcccgaggcgccgtcgccgtctccgacgaagccatcgccctcgtcggctgacgggaagccgccgaggcggtgcgtgcagtcgaaactctcgtgggggcttgtcaaaccagccggcggcggccgcgaaggtggaggaaaaggaggcggcggtgaagcaggaagaggagatgccgaggctgttcctcctgtgcctgcggccggggaggcggcggcgacggaagttagagaggggctggagaaggggaagaagaagagaaagccgcggaaatcagaggatggcaagaagggctcttcaagcaaacagaaacaatggcaggatcaatcgaacaaagatggagtcattttggttgatgaaagccctcagaaaaagcaacgtaaaggtagaaagcaagatgcaatactgaaggagcctaatgctagcagaaagcgttgcaagacatcggaagctcctgatggtcctggaagctgtcagcaattgcatatcagccagattgaagccagctcgcctgcagcagcgccagtaataattgacgttgatttgatgagtacgccttctaaagcaggacatgctaattcaatcgatcaggatatatcaccgttgaaagttgacctaaggtcagaggcgaagatagctgcagaggaaattcgaaggttatcatctggaaagaaaattcaccctttctttcattctcggaaattgaacaaatgtgctagccaagatcaagatgtcatcaatattgaaaacatgcatgggctttgtgattctgaaagggatccaccattttatcctattcatgttgtgtaccaatcagaggccagcatgccaatccactggagtaattggataatcactgatatgtcatcatttgacactgatactgccgttcctcttaaaaaatctgtgtcatactttgagggcttggttaagccactgacaatagaaactaattgcaagaggcattctaatcaattgtcagatccgattcttgctgagtgtacaacttcaggaatgccttttccaagtttttctggcaagcaaagtgaacacagctgtttttcagatgcgatcaacgtggacacacagaacttgttgaggcctggtgctagttgccaagcttctcttcttgatctgaatgtagagccagaagatccacagaatggttgtcagcctgcctgttacctatggactgacaagtaccgacctgaaactgtggcccaggtatgtggaaatagtgagcacgtaaagtttcttgctgaatggcttaaaagctgggatgaaaaaggccacaagattggagttgctaacggggacactaatgataactcatatcaagatatatctgattcagattattcagagagtgcttctgattgtgaaaatacacttctaatcactggacctgttgggtgtggaaaatcagctgcagtttttgcatgcgccagagaacaaggcttcaatgtgatagaggtaaatacatctgacatgagaaatggagcttatgtaaggcagaagtttgaggaagcaactaaatcacatggccttgaaaaatggtcacaggaggaggttatcaatccactaagggatgattccttggatccagattcaggaactcctgataggactgaataccaatgtttgatgtcctgtgctacaagagtaatgattgactgtgatcaacagaaatcacctgtaggatactactcaggtttgaaggcctgtgatgaacctcctaaacaagttgctaacaagacactcatactatttgaggatgtggatactgtctttgatgaggatcgtgggtttatttcaactattcttaagatggcagagactacaaaatggccaatcatactaactagcaacaagaaggatccgtctttgccgaatctcttggatcaacttgttttggatttcaaatacccatcgacctcagagctactttcacacgttgccatgatttgtaaatctgagggagtgaatgtcactgttcctcagttaaaacatgtaattgatgtttgtctaggtgacattaggagggtggtgatgtttttgcagttttggtaccaagggcatcaattcacagagaggccaaaggaatgtttgtgtggtcctttctcacttgatttagatgcagtacattctacagtgccaaaaatgttgccatgggagttcccttgtaagttatctgaaacattatgcatggaggtagacaaaactatccttttggctgaagaaaagaaaaaacagatggaaatatcagatcttgaaggcctgcagttacatgtaacagcacctttgatcaagggaagaacttctaaaacaagaagggctaagaaatccaaattaaagcgtgctcactcgactgagcataatgatatttcaccttctgatgtaggtactgaaaaacataacatatttactgttactgaagttggtttcttcccacaaccttcagaggtgcctcctatgcatgggcaagggatttctgatcagttccattttcccgttgaatcacgagagacatgtgaaattgctgattctttccaaaatccacctgaaagcaacatgtatgggtccatttcacaagtttgtgatacatttatgtcacaggacgtgtcatgtgtacccgagtcatccttaattttggacggcacatctgcatccataagtggtgatgaatttttgtcaagggcagtgtccaatggtttttctgccttttgtgagggtacatacactacctccagaatggtattagaagacagtgactgtgtgaagaatctaatggctgaacgacaaaaagatgttgaagatgtagttggtgagacaagtgagacttatatggaatcatttcggagaaatgaacaggcaagctgttcagctgctgggtttcaattaatggatgaatgtagtcgtgctgaaagcatctggctgctctctggcaaaaaatctaatgactcttgcaaggtggaactagtacaggacacttggaacaggctacggagttgtcgtcttgaatttaccagtgaggctaatcacaacagagcaacttctggagctttgaagcttgtctcagaagtgtctgatttaatatcagaatcagatcttatgcttttccgttgctaccctcttactaaggatacgttggatccgtctttaactccttgtgatgagccagttgattcttcttggtacagcaatcaggttgagatgggatctgtatatgcccagcatgctcttcgtattttatcgaggaattcccaaaaaatagatggtggttctgtcgatttgtcacaagagttgtttgccagtacagctgctgtatcctttggtaaaattacctgttcaggattcaggaatgattatggatctacggacctttctcatatgaaaaatccaactacctgtatttttaaaagaagggagcggcatgttcatctttgtgaaaccctgtctccagtggttcctccaaagttgttgcagtcattgagaggccctgcttttgttgattatttgtcttcaatcagccagatttccaaattagaaaacttgcgactctctgaaaataaagtcataaacaagcgaagaaggtcccgtcaggcaagacattacttgagttctggcgcacttcaactttcacatgaggatgttgtattattagaagaaagcggctgtttcagtagcagacgcgagagggttgaggttgtagagcaagcaccagtcagtacataagttaatgaactggtgctgatcatgagcggcagcattttgattttttttattagaaggcaatgtgactgggttggccgagccatttttatagttgcgtccgtgatcacggagcccggcggtggaggaaccggaatgtgtgcagttgattgctgtatctgttagataactagacattttaaagtttatttaaattttaaaattatttatagcaatcatgaatatggattaatcttagtatgtttacatgttcatgtttatcatctttataatcataaatagtataaaaataagaagtttaagaatgcacgttaaagtgaagctgtt

SEQ ID NO: 81331 - DNA, 4262 bp, Zea Mays
atcccttcgtcccggagacccggacctccctggttgcgggttgcggcgcctgcctcctccgcccatgcgacgcgcgcccgcgcaaactacccgccttcgcagtcgtccgcgcgggaaacgtgaagctaatccaactccaacatttcctcccgatgcgctgtgctgtgctgtactccttcgcagggagctctcgaaacccaaaccctagctctgacccaccgcgattccccatttgatttctcgtacccatgggtggatccgctgatcccgaggcgccgtcgccgtctccgacgaagccatcgccctcgtcggctgacgggaagccgccgaggcggtgcgtgcagtcgaaactctcgtgggggcttgtcaaaccagccggcggcggccgcgaaggtggaggaaaaggaggcggcggtgaagcaggaagaggagatgccgaggctgttcctcctgtgcctgcggccggggaggcggcggcgacggaagttagagaggggctggagaaggggaagaagaagagaaagccgcggaaatcagaggatggcaagaagggctcttcaagcaaacagaaacaatggcaggatcaatcgaacaaagatggagtcattttggttgatgaaagccctcagaaaaagcaacgtaaaggtagaaagcaagatgcaatactgaaggagcctaatgctagcagaaagcgttgcaagacatcggaagctcctgatggtcctggaagctgtcagcaattgcatatcagccagattgaagccagctcgcctgcagcagcgccagtaataattgacgttgatttgatgagtacgccttctaaagcaggacatgctaattcaatcgatcaggatatatcaccgttgaaagttgacctaaggtcagaggcgaagatagctgcagaggccagcatgccaatccactggagtaattggataatcactgatatgtcatcatttgacactgatactgccgttcctcttaaaaaatctgtgtcatactttgagggcttggttaagccactgacaatagaaactaattgcaagaggcattctaatcaattgtcagatccgattcttgctgagtgtacaacttcaggaatgccttttccaagtttttctggcaagcaaagtgaacacagctgtttttcagatgcgatcaacgtggacacacagaacttgttgaggcctggtgctagttgccaagcttctcttcttgatctgaatgtagagccagaagatccacagaatggttgtcagcctgcctgttacctatggactgacaagtaccgacctgaaactgtggcccaggtatgtggaaatagtgagcacgtaaagtttcttgctgaatggcttaaaagctgggatgaaaaaggccacaagattggagttgctaacggggacactaatgataactcatatcaagatatatctgattcagattattcagagagtgcttctgattgtgaaaatacacttctaatcactggacctgttgggtgtggaaaatcagctgcagtttttgcatgcgccagagaacaaggcttcaatgtgatagaggtaaatacatctgacatgagaaatggagcttatgtaaggcagaagtttgaggaagcaactaaatcacatggccttgaaaaatggtcacaggaggaggttatcaatccactaagggatgattccttggatccagattcaggaactcctgataggactgaataccaatgtttgatgtcctgtgctacaagagtaatgattgactgtgatcaacagaaatcacctgtaggatactactcaggtttgaaggcctgtgatgaacctcctaaacaagttgctaacaagacactcatactatttgaggatgtggatactgtctttgatgaggatcgtgggtttatttcaactattcttaagatggcagagactacaaaatggccaatcatactaactagcaacaagaaggatccgtctttgccgaatctcttggatcaacttgttttggatttcaaatacccatcgacctcagagctactttcacacgttgccatgatttgtaaatctgagggagtgaatgtcactgttcctcagttaaaacatgtaattgatgtttgtctaggtgacattaggagggtggtgatgtttttgcagttttggtaccaagggcatcaattcacagagaggccaaaggaatgtttgtgtggtcctttctcacttgatttagatgcagtacattctacagtgccaaaaatgttgccatgggagttcccttgtaagttatctgaaacattatgcatggaggtagacaaaactatccttttggctgaagaaaagaaaaaacagatggaaatatcagatcttgaaggcctgcagttacatgtaacagcacctttgatcaagggaagaacttctaaaacaagaagggctaagaaatccaaattaaagcgtgctcactcgactgagcataatgatatttcaccttgtaagaatgaacttgatgatttccatgatcttccagatatatctcttccatctgataaacaaataaaaagaaatcggcatcgttcgctgctattatctgagtccgatgatgatccagctgatgtaggtactgaaaaacataacatatttactgttactgaagttggtttcttcccacaaccttcagaggtgcctcctatgcatgggcaagggatttctgatcagttccattttcccgttgaatcacgagagacatgtgaaattgctgattctttccaaaatccacctgaaagcaacatgtatgggtccatttcacaagtttgtgatacatttatgtcacaggacgtgtcatgtgtacccgagtcatccttaattttggacggcacatctgcatccataagtggtgatgaatttttgtcaagggcagtgtccaatggtttttctgccttttgtgagggtacatacactacctccagaatggtattagaagacagtgactgtgtgaagaatctaatggctgaacgacaaaaagatgttgaagatgtagttggtgagacaagtgagacttatatggaatcatttcggagaaatgaacaggcaagctgttcagctgctgggtttcaattaatggatgaatgtagtcgtgctgaaagcatctggctgctctctggcaaaaaatctaatgactcttgcaaggtggaactagtacaggacacttggaacaggctacggagttgtcgtcttgaatttaccagtgaggctaatcacaacagagcaacttctggagctttgaagcttgtctcagaagtgtctgatttaatatcagaatcagatcttatgcttttccgttgctaccctcttactaaggatacgttggatccgtctttaactccttgtgatgagccagttgattcttcttggtacagcaatcaggttgagatgggatctgtatatgcccagcatgctcttcgtattttatcgaggaattcccaaaaaatagatggtggttctgtcgatttgtcacaagagttgtttgccagtacagctgctgtatcctttggtaaaattacctgttcaggattcaggaatgattatggatctacggacctttctcatatgaaaaatccaactacctgtatttttaaaagaagggagcggcatgttcatctttgtgaaaccctgtctccagtggttcctccaaagttgttgcagtcattgagaggccctgcttttgttgattatttgtcttcaatcagccagatttccaaattagaaaacttgcgactctctgaaaataaagtcataaacaagcgaagaaggtcccgtcaggcaagacattacttgagttctggcgcacttcaactttcacatgaggatgttgtattattagaagaaagcggctgtttcagtagcagacgcgagagggttgaggttgtagagcaagcaccagtcagtacataagttaatgaactggtgctgatcatgagcggcagcattttgattttttttattagaaggcaatgtgactgggttggccgagccatttttatagttgcgtccgtgatcacggagcccggcggtggaggaaccggaatgtgtgcagttgattgctgtatctgttagataactagacattttaaagtttatttaaattttaaaattatttatagcaatcatgaatatggattaatcttagtatgtttacatgttcatgtttatcatctttataatcataaatagtataaaaataagaagtttaagaatgcacgttaaagtgaagctgtt

SEQ ID NO: 81332 - DNA, 4470 bp, Zea Mays
ccggacctccctggttgcgggttgcggcgcctgcctcctccgcccatgcgacgcgcgcccgcgcaaactacccgccttcgcagtcgtccgcgcgggaaacgtgaagctaatccaactccaacatttcctcccgatgcgctgtgctgtgctgtactccttcgcagggagctctcgaaacccaaaccctagctctgacccaccgcgattccccatttgatttctcgtacccatgggtggatccgctgatcccgaggcgccgtcgccgtctccgacgaagccatcgccctcgtcggctgacgggaagccgccgaggcggtgcgtgcagtcgaaactctcgtgggggcttgtcaaaccagccggcggcggccgcgaaggtggaggaaaaggaggcggcggtgaagcaggaagaggagatgccgaggctgttcctcctgtgcctgcggccggggaggcggcggcgacggaagttagagaggggctggagaaggggaagaagaagagaaagccgcggaaatcagaggatggcaagaagggctcttcaagcaaacagaaacaatggcaggatcaatcgaacaaagatggagtcattttggttgatgaaagccctcagaaaaagcaacgtaaaggtagaaagcaagatgcaatactgaaggagcctaatgctagcagaaagcgttgcaagacatcggaagctcctgatggtcctggaagctgtcagcaattgcatatcagccagattgaagccagctcgcctgcagcagcgccagtaataattgacgttgatttgatgagtacgccttctaaagcaggacatgctaattcaatcgatcaggatatatcaccgttgaaagttgacctaaggtcagaggcgaagatagctgcagaggaaattcgaaggttatcatctggaaagaaaattcaccctttctttcattctcggaaattgaacaaatgtgctagccaagatcaagatgtcatcaatattgaaaacatgcatgggctttgtgattctgaaagggatccaccattttatcctattcatgttgtgtaccaatcagaggccagcatgccaatccactggagtaattggataatcactgatatgtcatcatttgacactgatactgccgttcctcttaaaaaatctgtgtcatactttgagggcttggttaagccactgacaatagaaactaattgcaagaggcattctaatcaattgtcagatccgattcttgctgagtgtacaacttcaggaatgccttttccaagtttttctggcaagcaaagtgaacacagctgtttttcagatgcgatcaacgtggacacacagaacttgttgaggcctggtgctagttgccaagcttctcttcttgatctgaatgtagagccagaagatccacagaatggttgtcagcctgcctgttacctatggactgacaagtaccgacctgaaactgtggcccaggtatgtggaaatagtgagcacgtaaagtttcttgctgaatggcttaaaagctgggatgaaaaaggccacaagattggagttgctaacggggacactaatgataactcatatcaagatatatctgattcagattattcagagagtgcttctgattgtgaaaatacacttctaatcactggacctgttgggtgtggaaaatcagctgcagtttttgcatgcgccagagaacaaggcttcaatgtgatagaggtaaatacatctgacatgagaaatggagcttatgtaaggcagaagtttgaggaagcaactaaatcacatggccttgaaaaatggtcacaggaggaggttatcaatccactaagggatgattccttggatccagattcaggaactcctgataggactgaataccaatgtttgatgtcctgtgctacaagagtaatgattgactgtgatcaacagaaatcacctgtaggatactactcaggtttgaaggcctgtgatgaacctcctaaacaagttgctaacaagacactcatactatttgaggatgtggatactgtctttgatgaggatcgtgggtttatttcaactattcttaagatggcagagactacaaaatggccaatcatactaactagcaacaagaaggatccgtctttgccgaatctcttggatcaacttgttttggatttcaaatacccatcgacctcagagctactttcacacgttgccatgatttgtaaatctgagggagtgaatgtcactgttcctcagttaaaacatgtaattgatgtttgtctaggtgacattaggagggtggtgatgtttttgcagttttggtaccaagggcatcaattcacagacctttcagcatgtaaaacttactatgatggtacatgatgaagtggaagatgctggttgtttatgggtattgtgctcaataatagccccccccccatctagaattacattctacagtgccaaaaatgttgccatgggagttcccttgtaagttatctgaaacattatgcatggaggtagacaaaactatccttttggctgaagaaaagaaaaaacagatggaaatatcagatcttgaaggcctgcagttacatgtaacagcacctttgatcaagggaagaacttctaaaacaagaagggctaagaaatccaaattaaagcgtgctcactcgactgagcataatgatatttcaccttgtaagaatgaacttgatgatttccatgatcttccagatatatctcttccatctgataaacaaataaaaagaaatcggcatcgttcgctgctattatctgagtccgatgatgatccagctgatgtaggtactgaaaaacataacatatttactgttactgaagttggtttcttcccacaaccttcagaggtgcctcctatgcatgggcaagggatttctgatcagttccattttcccgttgaatcacgagagacatgtgaaattgctgattctttccaaaatccacctgaaagcaacatgtatgggtccatttcacaagtttgtgatacatttatgtcacaggacgtgtcatgtgtacccgagtcatccttaattttggacggcacatctgcatccataagtggtgatgaatttttgtcaagggcagtgtccaatggtttttctgccttttgtgagggtacatacactacctccagaatggtattagaagacagtgactgtgtgaagaatctaatggctgaacgacaaaaagatgttgaagatgtagttggtgagacaagtgagacttatatggaatcatttcggagaaatgaacaggcaagctgttcagctgctgggtttcaattaatggatgaatgtagtcgtgctgaaagcatctggctgctctctggcaaaaaatctaatgactcttgcaaggtggaactagtacaggacacttggaacaggctacggagttgtcgtcttgaatttaccagtgaggctaatcacaacagagcaacttctggagctttgaagcttgtctcagaagtgtctgatttaatatcagaatcagatcttatgcttttccgttgctaccctcttactaaggatacgttggatccgtctttaactccttgtgatgagccagttgattcttcttggtacagcaatcaggttgagatgggatctgtatatgcccagcatgctcttcgtattttatcgaggaattcccaaaaaatagatggtggttctgtcgatttgtcacaagagttgtttgccagtacagctgctgtatcctttggtaaaattacctgttcaggattcaggaatgattatggatctacggacctttctcatatgaaaaatccaactacctgtatttttaaaagaagggagcggcatgttcatctttgtgaaaccctgtctccagtggttcctccaaagttgttgcagtcattgagaggccctgcttttgttgattatttgtcttcaatcagccagatttccaaattagaaaacttgcgactctctgaaaataaagtcataaacaagcgaagaaggtcccgtcaggcaagacattacttgagttctggcgcacttcaactttcacatgaggatgttgtattattagaagaaagcggctgtttcagtagcagacgcgagagggttgaggttgtagagcaagcaccagtcagtacataagttaatgaactggtgctgatcatgagcggcagcattttgattttttttattagaaggcaatgtgactgggttggccgagccatttttatagttgcgtccgtgatcacggagcccggcggtggaggaaccggaatgtgtgcagttgattgctgtatctgttagataactagacattttaaagtttatttaaattttaaaattatttatagcaatcatgaatatggattaatcttagtatgtttacatgttcatgtttatcatctttataatcataaatagtataaaaataagaagtttaagaatgcacgttaaagtgaagctgtt

SEQ ID NO: 81333 - DNA, 1816 bp, Zea Mays
cggcgcctgcctcctccgcccatgcgacgcgcgcccgcgcaaactacccgccttcgcagtcgtccgcgcgggaaacgtgaagctaatccaactccaacatttcctcccgatgcgctgtgctgtgctgtactccttcgcagggagctctcgaaacccaaaccctagctctgacccaccgcgattccccatttgatttctcgtacccatgggtggatccgctgatcccgaggcgccgtcgccgtctccgacgaagccatcgccctcgtcggctgacgggaagccgccgaggcggtgcgtgcagtcgaaactctcgtgggggcttgtcaaaccagccggcggcggccgcgaaggtggaggaaaaggaggcggcggtgaagcaggaagaggagatgccgaggctgttcctcctgtgcctgcggccggggaggcggcggcgacggaagttagagaggggctggagaaggggaagaagaagagaaagccgcggaaatcagaggatggcaagaagggctcttcaagcaaacagaaacaatggcaggatcaatcgaacaaagatggagtcattttggttgatgaaagccctcagaaaaagcaacgtaaaggtagaaagcaagatgcaatactgaaggagcctaatgctagcagaaagcgttgcaagacatcggaagctcctgatggtcctggaagctgtcagcaattgcatatcagccagattgaagccagctcgcctgcagcagcgccagtaataattgacgttgatttgatgagtacgccttctaaagcaggacatgctaattcaatcgatcaggatatatcaccgttgaaagttgacctaaggtcagaggcgaagatagctgcagaggaaattcgaaggttatcatctggaaagaaaattcaccctttctttcattctcggaaattgaacaaatgtgctagccaagatcaagatgtcatcaatattgaaaacatgcatgggctttgtgattctgaaagggatccaccattttatcctattcatgttgtgtaccaatcagaggccagcatgccaatccactggagtaattggataatcactgatatgtcatcatttgacactgatactgccgttcctcttaaaaaatctgtgtcatactttgagggcttggttaagccactgacaatagaaactaattgcaagaggcattctaatcaattgtcagatccgattcttgctgagtgtacaacttcaggaatgccttttccaagtttttctggcaagcaaagtgaacacagctgtttttcagatgcgatcaacgtggacacacagaacttgttgaggcctggtgctagttgccaagcttctcttcttgatctgaatgtagagccagaagatccacagaatggttgtcagcctgcctgttacctatggactgacaagtaccgacctgaaactgtggcccaggtatgtggaaatagtgagcacgtaaagtttcttgctgaatggcttaaaagctgggatgaaaaaggccacaagattggagttgctaacggggacactaatgataactcatatcaagatatatctgattcagattattcagagagtgcttctgattgtgaaaatacacttctaatcactggacctgttgggtgtggaaaatcagctgcagtttttgcatgcgccagagaacaaggcttcaatgtgatagaggtaaatacatctgacatgagaaatggagcttatgtaaggcagaagtttgaggaagcaactaaatcacatggccttgaaaaatgtagcatgcgggaaacaacatctgcagagaatgatggtataagg

SEQ ID NO: 81334 - DNA, 4243 bp, Zea Mays
gcgcctgcctcctccgcccatgcgacgcgcgcccgcgcaaactacccgccttcgcagtcgtccgcgcgggaaacgtgaagctaatccaactccaacatttcctcccgatgcgctgtgctgtgctgtactccttcgcagggagctctcgaaacccaaaccctagctctgacccaccgcgattccccatttgatttctcgtacccatgggtggatccgctgatcccgaggcgccgtcgccgtctccgacgaagccatcgccctcgtcggctgacgggaagccgccgaggcggtgcgtgcagtcgaaactctcgtgggggcttgtcaaaccagccggcggcggccgcgaaggtggaggaaaaggaggcggcggtgaagcaggaagaggagatgccgaggctgttcctcctgtgcctgcggccggggaggcggcggcgacggaagttagagaggggctggagaaggggaagaagaagagaaagccgcggaaatcagaggatggcaagaagggctcttcaagcaaacagaaacaatggcaggatcaatcgaacaaagatggagtcattttggttgatgaaagccctcagaaaaagcaacgtaaaggtagaaagcaagatgcaatactgaaggagcctaatgctagcagaaagcgttgcaagacatcggaagctcctgatggtcctggaagctgtcagcaattgcatatcagccagattgaagccagctcgcctgcagcagcgccagtaataattgacgttgatttgatgagtacgccttctaaagcaggacatgctaattcaatcgatcaggatatatcaccgttgaaagttgacctaaggtcagaggcgaagatagctgcagaggaaattcgaaggttatcatctggaaagaaaattcaccctttctttcattctcggaaattgaacaaatgtgctagccaagatcaagatgtcatcaatattgaaaacatgcatgggctttgtgattctgaaagggatccaccattttatcctattcatgttgtgtaccaatcagagatcaacgtggacacacagaacttgttgaggcctggtgctagttgccaagcttctcttcttgatctgaatgtagagccagaagatccacagaatggttgtcagcctgcctgttacctatggactgacaagtaccgacctgaaactgtggcccaggtatgtggaaatagtgagcacgtaaagtttcttgctgaatggcttaaaagctgggatgaaaaaggccacaagattggagttgctaacggggacactaatgataactcatatcaagatatatctgattcagattattcagagagtgcttctgattgtgaaaatacacttctaatcactggacctgttgggtgtggaaaatcagctgcagtttttgcatgcgccagagaacaaggcttcaatgtgatagaggtaaatacatctgacatgagaaatggagcttatgtaaggcagaagtttgaggaagcaactaaatcacatggccttgaaaaatggtcacaggaggaggttatcaatccactaagggatgattccttggatccagattcaggaactcctgataggactgaataccaatgtttgatgtcctgtgctacaagagtaatgattgactgtgatcaacagaaatcacctgtaggatactactcaggtttgaaggcctgtgatgaacctcctaaacaagttgctaacaagacactcatactatttgaggatgtggatactgtctttgatgaggatcgtgggtttatttcaactattcttaagatggcagagactacaaaatggccaatcatactaactagcaacaagaaggatccgtctttgccgaatctcttggatcaacttgttttggatttcaaatacccatcgacctcagagctactttcacacgttgccatgatttgtaaatctgagggagtgaatgtcactgttcctcagttaaaacatgtaattgatgtttgtctaggtgacattaggagggtggtgatgtttttgcagttttggtaccaagggcatcaattcacagacctttcagcatgtaaaacttactatgatggtacatgatgaagtggaagatgctggttgtttatgggtattgtgctcaataatagccccccccccatctagaatagaggccaaaggaatgtttgtgtggtcctttctcacttgatttagatgcagtacattctacagtgccaaaaatgttgccatgggagttcccttgtaagttatctgaaacattatgcatggaggtagacaaaactatccttttggctgaagaaaagaaaaaacagatggaaatatcagatcttgaaggcctgcagttacatgtaacagcacctttgatcaagggaagaacttctaaaacaagaagggctaagaaatccaaattaaagcgtgctcactcgactgagcataatgatatttcaccttgtaagaatgaacttgatgatttccatgatcttccagatatatctcttccatctgataaacaaataaaaagaaatcggcatcgttcgctgctattatctgagtccgatgatgatccagctgatgtaggtactgaaaaacataacatatttactgttactgaagttggtttcttcccacaaccttcagaggtgcctcctatgcatgggcaagggatttctgatcagttccattttcccgttgaatcacgagagacatgtgaaattgctgattctttccaaaatccacctgaaagcaacatgtatgggtccatttcacaagtttgtgatacatttatgtcacaggacgtgtcatgtgtacccgagtcatccttaattttggacggcacatctgcatccataagtggtgatgaatttttgtcaagggcagtgtccaatggtttttctgccttttgtgagggtacatacactacctccagaatggtattagaagacagtgactgtgtgaagaatctaatggctgaacgacaaaaagatgttgaagatgtagttggtgagacaagtgagacttatatggaatcatttcggagaaatgaacaggcaagctgttcagctgctgggtttcaattaatggatgaatgtagtcgtgctgaaagcatctggctgctctctggcaaaaaatctaatgactcttgcaaggtggaactagtacaggacacttggaacaggctacggagttgtcgtcttgaatttaccagtgaggctaatcacaacagagcaacttctggagctttgaagcttgtctcagaagtgtctgatttaatatcagaatcagatcttatgcttttccgttgctaccctcttactaaggatacgttggatccgtctttaactccttgtgatgagccagttgattcttcttggtacagcaatcaggttgagatgggatctgtatatgcccagcatgctcttcgtattttatcgaggaattcccaaaaaatagatggtggttctgtcgatttgtcacaagagttgtttgccagtacagctgctgtatcctttggtaaaattacctgttcaggattcaggaatgattatggatctacggacctttctcatatgaaaaatccaactacctgtatttttaaaagaagggagcggcatgttcatctttgtgaaaccctgtctccagtggttcctccaaagttgttgcagtcattgagaggccctgcttttgttgattatttgtcttcaatcagccagatttccaaattagaaaacttgcgactctctgaaaataaagtcataaacaagcgaagaaggtcccgtcaggcaagacattacttgagttctggcgcacttcaactttcacatgaggatgttgtattattagaagaaagcggctgtttcagtagcagacgcgagagggttgaggttgtagagcaagcaccagtcagtacataagttaatgaactggtgctgatcatgagcggcagcattttgattttttttattagaaggcaatgtgactgggttggccgagccatttttatagttgcgtccgtgatcacggagcccggcggtggaggaaccggaatgtgtgcagttgattgctgtatctgttagataactagacattttaaagtttatttaaattttaaaattatttatagcaatcatgaatatggattaatcttagtatgtttacatgttcatgtttatcatctttataatcataaatagtataaaaataagaagtttaagaatgcacgttaaagtgaagctgtt

SEQ ID NO: 81335 - DNA, 4386 bp, Zea Mays
gcgcctgcctcctccgcccatgcgacgcgcgcccgcgcaaactacccgccttcgcagtcgtccgcgcgggaaacgtgaagctaatccaactccaacatttcctcccgatgcgctgtgctgtgctgtactccttcgcagggagctctcgaaacccaaaccctagctctgacccaccgcgattccccatttgatttctcgtacccatgggtggatccgctgatcccgaggcgccgtcgccgtctccgacgaagccatcgccctcgtcggctgacgggaagccgccgaggcggtgcgtgcagtcgaaactctcgtgggggcttgtcaaaccagccggcggcggccgcgaaggtggaggaaaaggaggcggcggtgaagcaggaagaggagatgccgaggctgttcctcctgtgcctgcggccggggaggcggcggcgacggaagttagagaggggctggagaaggggaagaagaagagaaagccgcggaaatcagaggatggcaagaagggctcttcaagcaaacagaaacaatggcaggatcaatcgaacaaagatggagtcattttggttgatgaaagccctcagaaaaagcaacgtaaaggtagaaagcaagatgcaatactgaaggagcctaatgctagcagaaagcgttgcaagacatcggaagctcctgatggtcctggaagctgtcagcaattgcatatcagccagattgaagccagctcgcctgcagcagcgccagtaataattgacgttgatttgatgagtacgccttctaaagcaggacatgctaattcaatcgatcaggatatatcaccgttgaaagttgacctaaggtcagaggcgaagatagctgcagaggaaattcgaaggttatcatctggaaagaaaattcaccctttctttcattctcggaaattgaacaaatgtgctagccaagatcaagatgtcatcaatattgaaaacatgcatgggctttgtgattctgaaagggatccaccattttatcctattcatgttgtgtaccaatcagaggccagcatgccaatccactggagtaattggataatcactgatatgtcatcatttgacactgatactgccgttcctcttaaaaaatctgtgtcatactttgagggcttggttaagccactgacaatagaaactaattgcaagaggcattctaatcaattgtcagatccgattcttgctgagtgtacaacttcaggaatgccttttccaagtttttctggcaagcaaagtgaacacagctgtttttcagatgcgatcaacgtggacacacagaacttgttgaggcctggtgctagttgccaagcttctcttcttgatctgaatgtagagccagaagatccacagaatggttgtcagcctgcctgttacctatggactgacaagtaccgacctgaaactgtggcccaggtatgtggaaatagtgagcacgtaaagtttcttgctgaatggcttaaaagctgggatgaaaaaggccacaagattggagttgctaacggggacactaatgataactcatatcaagatatatctgattcagattattcagagagtgcttctgattgtgaaaatacacttctaatcactggacctgttgggtgtggaaaatcagctgcagtttttgcatgcgccagagaacaaggcttcaatgtgatagaggtaaatacatctgacatgagaaatggagcttatgtaaggcagaagtttgaggaagcaactaaatcacatggccttgaaaaatggtcacaggaggaggttatcaatccactaagggatgattccttggatccagattcaggaactcctgataggactgaataccaatgtttgatgtcctgtgctacaagagtaatgattgactgtgatcaacagaaatcacctgtaggatactactcaggtttgaaggcctgtgatgaacctcctaaacaagttgctaacaagacactcatactatttgaggatgtggatactgtctttgatgaggatcgtgggtttatttcaactattcttaagatggcagagactacaaaatggccaatcatactaactagcaacagatccgtctttgccgaatctcttggatcaacttgttttggatttcaaatacccatcgacctcagagctactttcacacgttgccatgatttgtaaatctgagggagtgaatgtcactgttcctcagttaaaacatgtaattgatgtttgtctaggtgacattaggagggtggtgatgtttttgcagttttggtaccaagggcatcaattcacagagaggccaaaggaatgtttgtgtggtcctttctcacttgatttagatgcagtacattctacagtgccaaaaatgttgccatgggagttcccttgtaagttatctgaaacattatgcatggaggtagacaaaactatccttttggctgaagaaaagaaaaaacagatggaaatatcagatcttgaaggcctgcagttacatgtaacagcacctttgatcaagggaagaacttctaaaacaagaagggctaagaaatccaaattaaagcgtgctcactcgactgagcataatgatatttcaccttgtaagaatgaacttgatgatttccatgatcttccagatatatctcttccatctgataaacaaataaaaagaaatcggcatcgttcgctgctattatctgagtccgatgatgatccagctgatgtaggtactgaaaaacataacatatttactgttactgaagttggtttcttcccacaaccttcagaggtgcctcctatgcatgggcaagggatttctgatcagttccattttcccgttgaatcacgagagacatgtgaaattgctgattctttccaaaatccacctgaaagcaacatgtatgggtccatttcacaagtttgtgatacatttatgtcacaggacgtgtcatgtgtacccgagtcatccttaattttggacggcacatctgcatccataagtggtgatgaatttttgtcaagggcagtgtccaatggtttttctgccttttgtgagggtacatacactacctccagaatggtattagaagacagtgactgtgtgaagaatctaatggctgaacgacaaaaagatgttgaagatgtagttggtgagacaagtgagacttatatggaatcatttcggagaaatgaacaggcaagctgttcagctgctgggtttcaattaatggatgaatgtagtcgtgctgaaagcatctggctgctctctggcaaaaaatctaatgactcttgcaaggtggaactagtacaggacacttggaacaggctacggagttgtcgtcttgaatttaccagtgaggctaatcacaacagagcaacttctggagctttgaagcttgtctcagaagtgtctgatttaatatcagaatcagatcttatgcttttccgttgctaccctcttactaaggatacgttggatccgtctttaactccttgtgatgagccagttgattcttcttggtacagcaatcaggttgagatgggatctgtatatgcccagcatgctcttcgtattttatcgaggaattcccaaaaaatagatggtggttctgtcgatttgtcacaagagttgtttgccagtacagctgctgtatcctttggtaaaattacctgttcaggattcaggaatgattatggatctacggacctttctcatatgaaaaatccaactacctgtatttttaaaagaagggagcggcatgttcatctttgtgaaaccctgtctccagtggttcctccaaagttgttgcagtcattgagaggccctgcttttgttgattatttgtcttcaatcagccagatttccaaattagaaaacttgcgactctctgaaaataaagtcataaacaagcgaagaaggtcccgtcaggcaagacattacttgagttctggcgcacttcaactttcacatgaggatgttgtattattagaagaaagcggctgtttcagtagcagacgcgagagggttgaggttgtagagcaagcaccagtcagtacataagttaatgaactggtgctgatcatgagcggcagcattttgattttttttattagaaggcaatgtgactgggttggccgagccatttttatagttgcgtccgtgatcacggagcccggcggtggaggaaccggaatgtgtgcagttgattgctgtatctgttagataactagacattttaaagtttatttaaattttaaaattatttatagcaatcatgaatatggattaatcttagtatgtttacatgttcatgtttatcatctttataatcataaatagtataaaaataagaagtttaagaatgcacgttaaagtgaagctgtt

SEQ ID NO: 81336 - DNA, 3897 bp, Zea Mays
gtgtccgcaaagagatcatgagctacattaggccctctgctgacagcgatgggtggcctggttgaagtcaggtgccggtgcagggacctggtgatgaggcaagtgacgccatggcctcctgaagtgtccggctcttcaagcaaacagaaacaatggcaggatcaatcgaacaaagatggagtcattttggttgatgaaagccctcagaaaaagcaacgtaaaggtagaaagcaagatgcaatactgaaggagcctaatgctagcagaaagcgttgcaagacatcggaagctcctgatggtcctggaagctgtcagcaattgcatatcagccagattgaagccagctcgcctgcagcagcgccagtaataattgacgttgatttgatgagtacgccttctaaagcaggacatgctaattcaatcgatcaggatatatcaccgttgaaagttgacctaaggtcagaggcgaagatagctgcagaggaaattcgaaggttatcatctggaaagaaaattcaccctttctttcattctcggaaattgaacaaatgtgctagccaagatcaagatgtcatcaatattgaaaacatgcatgggctttgtgattctgaaagggatccaccattttatcctattcatgttgtgtaccaatcagaggccagcatgccaatccactggagtaattggataatcactgatatgtcatcatttgacactgatactgccgttcctcttaaaaaatctgtgtcatactttgagggcttggttaagccactgacaatagaaactaattgcaagaggcattctaatcaattgtcagatccgattcttgctgagtgtacaacttcaggaatgccttttccaagtttttctggcaagcaaagtgaacacagctgtttttcagatgcgatcaacgtggacacacagaacttgttgaggcctggtgctagttgccaagcttctcttcttgatctgaatgtagagccagaagatccacagaatggttgtcagcctgcctgttacctatggactgacaagtaccgacctgaaactgtggcccaggtatgtggaaatagtgagcacgtaaagtttcttgctgaatggcttaaaagctgggatgaaaaaggccacaagattggagttgctaacggggacactaatgataactcatatcaagatatatctgattcagattattcagagagtgcttctgattgtgaaaatacacttctaatcactggacctgttgggtgtggaaaatcagctgcagtttttgcatgcgccagagaacaaggcttcaatgtgatagaggtaaatacatctgacatgagaaatggagcttatgtaaggcagaagtttgaggaagcaactaaatcacatggccttgaaaaatggtcacaggaggaggttatcaatccactaagggatgattccttggatccagattcaggaactcctgataggactgaataccaatgtttgatgtcctgtgctacaagagtaatgattgactgtgatcaacagaaatcacctgtaggatactactcaggtttgaaggcctgtgatgaacctcctaaacaagttgctaacaagacactcatactatttgaggatgtggatactgtctttgatgaggatcgtgggtttatttcaactattcttaagatggcagagactacaaaatggccaatcatactaactagcaacaagaaggatccgtctttgccgaatctcttggatcaacttgttttggatttcaaatacccatcgacctcagagctactttcacacgttgccatgatttgtaaatctgagggagtgaatgtcactgttcctcagttaaaacatgtaattgatgtttgtctaggtgacattaggagggtggtgatgtttttgcagttttggtaccaagggcatcaattcacagagaggccaaaggaatgtttgtgtggtcctttctcacttgatttagatgcagtacattctacagtgccaaaaatgttgccatgggagttcccttgtaagttatctgaaacattatgcatggaggtagacaaaactatccttttggctgaagaaaagaaaaaacagatggaaatatcagatcttgaaggcctgcagttacatgtaacagcacctttgatcaagggaagaacttctaaaacaagaagggctaagaaatccaaattaaagcgtgctcactcgactgagcataatgatatttcaccttctgatgtaggtactgaaaaacataacatatttactgttactgaagttggtttcttcccacaaccttcagaggtgcctcctatgcatgggcaagggatttctgatcagttccattttcccgttgaatcacgagagacatgtgaaattgctgattctttccaaaatccacctgaaagcaacatgtatgggtccatttcacaagtttgtgatacatttatgtcacaggacgtgtcatgtgtacccgagtcatccttaattttggacggcacatctgcatccataagtggtgatgaatttttgtcaagggcagtgtccaatggtttttctgccttttgtgagggtacatacactacctccagaatggtattagaagacagtgactgtgtgaagaatctaatggctgaacgacaaaaagatgttgaagatgtagttggtgagacaagtgagacttatatggaatcatttcggagaaatgaacaggcaagctgttcagctgctgggtttcaattaatggatgaatgtagtcgtgctgaaagcatctggctgctctctggcaaaaaatctaatgactcttgcaaggtggaactagtacaggacacttggaacaggctacggagttgtcgtcttgaatttaccagtgaggctaatcacaacagagcaacttctggagctttgaagcttgtctcagaagtgtctgatttaatatcagaatcagatcttatgcttttccgttgctaccctcttactaaggatacgttggatccgtctttaactccttgtgatgagccagttgattcttcttggtacagcaatcaggttgagatgggatctgtatatgcccagcatgctcttcgtattttatcgaggaattcccaaaaaatagatggtggttctgtcgatttgtcacaagagttgtttgccagtacagctgctgtatcctttggtaaaattacctgttcaggattcaggaatgattatggatctacggacctttctcatatgaaaaatccaactacctgtatttttaaaagaagggagcggcatgttcatctttgtgaaaccctgtctccagtggttcctccaaagttgttgcagtcattgagaggccctgcttttgttgattatttgtcttcaatcagccagatttccaaattagaaaacttgcgactctctgaaaataaagtcataaacaagcgaagaaggtcccgtcaggcaagacattacttgagttctggcgcacttcaactttcacatgaggatgttgtattattagaagaaagcggctgtttcagtagcagacgcgagagggttgaggttgtagagcaagcaccagtcagtacataagttaatgaactggtgctgatcatgagcggcagcattttgattttttttattagaaggcaatgtgactgggttggccgagccatttttatagttgcgtccgtgatcacggagcccggcggtggaggaaccggaatgtgtgcagttgattgctgtatctgttagataactagacattttaaagtttatttaaattttaaaattatttatagcaatcatgaatatggattaatcttagtatgtttacatgttcatgtttatcatctttataatcataaatagtataaaaataagaagtttaagaatgcacgttaaagtgaagctgtt

SEQ ID NO: 81337 - DNA, 3597 bp, Zea Mays
atgggtggcctggttgaagtcaggtgccggtgcagggacctggtgatgaggcaagtgacgccatggcctcctgaagtgtccggctcttcaagcaaacagaaacaatggcaggatcaatcgaacaaagatggagtcattttggttgatgaaagccctcagaaaaagcaacgtaaaggtagaaagcaagatgcaatactgaaggagcctaatgctagcagaaagcgttgcaagacatcggaagctcctgatggtcctggaagctgtcagcaattgcatatcagccagattgaagccagctcgcctgcagcagcgccagtaataattgacgttgatttgatgagtacgccttctaaagcaggacatgctaattcaatcgatcaggatatatcaccgttgaaagttgacctaaggtcagaggcgaagatagctgcagaggaaattcgaaggttatcatctggaaagaaaattcaccctttctttcattctcggaaattgaacaaatgtgctagccaagatcaagatgtcatcaatattgaaaacatgcatgggctttgtgattctgaaagggatccaccattttatcctattcatgttgtgtaccaatcagagatcaacgtggacacacagaacttgttgaggcctggtgctagttgccaagcttctcttcttgatctgaatgtagagccagaagatccacagaatggttgtcagcctgcctgttacctatggactgacaagtaccgacctgaaactgtggcccaggtatgtggaaatagtgagcacgtaaagtttcttgctgaatggcttaaaagctgggatgaaaaaggccacaagattggagttgctaacggggacactaatgataactcatatcaagatatatctgattcagattattcagagagtgcttctgattgtgaaaatacacttctaatcactggacctgttgggtgtggaaaatcagctgcagtttttgcatgcgccagagaacaaggcttcaatgtgatagaggtaaatacatctgacatgagaaatggagcttatgtaaggcagaagtttgaggaagcaactaaatcacatggccttgaaaaatggtcacaggaggaggttatcaatccactaagggatgattccttggatccagattcaggaactcctgataggactgaataccaatgtttgatgtcctgtgctacaagagtaatgattgactgtgatcaacagaaatcacctgtaggatactactcaggtttgaaggcctgtgatgaacctcctaaacaagttgctaacaagacactcatactatttgaggatgtggatactgtctttgatgaggatcgtgggtttatttcaactattcttaagatggcagagactacaaaatggccaatcatactaactagcaacaagaaggatccgtctttgccgaatctcttggatcaacttgttttggatttcaaatacccatcgacctcagagctactttcacacgttgccatgatttgtaaatctgagggagtgaatgtcactgttcctcagttaaaacatgtaattgatgtttgtctaggtgacattaggagggtggtgatgtttttgcagttttggtaccaagggcatcaattcacagagaggccaaaggaatgtttgtgtggtcctttctcacttgatttagatgcagtacattctacagtgccaaaaatgttgccatgggagttcccttgtaagttatctgaaacattatgcatggaggtagacaaaactatccttttggctgaagaaaagaaaaaacagatggaaatatcagatcttgaaggcctgcagttacatgtaacagcacctttgatcaagggaagaacttctaaaacaagaagggctaagaaatccaaattaaagcgtgctcactcgactgagcataatgatatttcaccttctgatgtaggtactgaaaaacataacatatttactgttactgaagttggtttcttcccacaaccttcagaggtgcctcctatgcatgggcaagggatttctgatcagttccattttcccgttgaatcacgagagacatgtgaaattgctgattctttccaaaatccacctgaaagcaacatgtatgggtccatttcacaagtttgtgatacatttatgtcacaggacgtgtcatgtgtacccgagtcatccttaattttggacggcacatctgcatccataagtggtgatgaatttttgtcaagggcagtgtccaatggtttttctgccttttgtgagggtacatacactacctccagaatggtattagaagacagtgactgtgtgaagaatctaatggctgaacgacaaaaagatgttgaagatgtagttggtgagacaagtgagacttatatggaatcatttcggagaaatgaacaggcaagctgttcagctgctgggtttcaattaatggatgaatgtagtcgtgctgaaagcatctggctgctctctggcaaaaaatctaatgactcttgcaaggtggaactagtacaggacacttggaacaggctacggagttgtcgtcttgaatttaccagtgaggctaatcacaacagagcaacttctggagctttgaagcttgtctcagaagtgtctgatttaatatcagaatcagatcttatgcttttccgttgctaccctcttactaaggatacgttggatccgtctttaactccttgtgatgagccagttgattcttcttggtacagcaatcaggttgagatgggatctgtatatgcccagcatgctcttcgtattttatcgaggaattcccaaaaaatagatggtggttctgtcgatttgtcacaagagttgtttgccagtacagctgctgtatcctttggtaaaattacctgttcaggattcaggaatgattatggatctacggacctttctcatatgaaaaatccaactacctgtatttttaaaagaagggagcggcatgttcatctttgtgaaaccctgtctccagtggttcctccaaagttgttgcagtcattgagaggccctgcttttgttgattatttgtcttcaatcagccagatttccaaattagaaaacttgcgactctctgaaaataaagtcataaacaagcgaagaaggtcccgtcaggcaagacattacttgagttctggcgcacttcaactttcacatgaggatgttgtattattagaagaaagcggctgtttcagtagcagacgcgagagggttgaggttgtagagcaagcaccagtcagtacataagttaatgaactggtgctgatcatgagcggcagcattttgattttttttattagaaggcaatgtgactgggttggccgagccatttttatagttgcgtccgtgatcacggagcccggcggtggaggaaccggaatgtgtgcagttgattgctgtatctgttagataactagacattttaaagtttatttaaattttaaaattatttatagcaatcatgaatatggattaatcttagtatgtttacatgttcatgtttatcatctttataatcataaatagtataaaaataagaagtttaagaatgcacgttaaagtgaagctgtt

SEQ ID NO: 81338 - DNA, 3766 bp, Zea Mays
atgggtggcctggttgaagtcaggtgccggtgcagggacctggtgatgaggcaagtgacgccatggcctcctgaagtgtccggctcttcaagcaaacagaaacaatggcaggatcaatcgaacaaagatggagtcattttggttgatgaaagccctcagaaaaagcaacgtaaaggtagaaagcaagatgcaatactgaaggagcctaatgctagcagaaagcgttgcaagacatcggaagctcctgatggtcctggaagctgtcagcaattgcatatcagccagattgaagccagctcgcctgcagcagcgccagtaataattgacgttgatttgatgagtacgccttctaaagcaggacatgctaattcaatcgatcaggatatatcaccgttgaaagttgacctaaggtcagaggcgaagatagctgcagaggaaattcgaaggttatcatctggaaagaaaattcaccctttctttcattctcggaaattgaacaaatgtgctagccaagatcaagatgtcatcaatattgaaaacatgcatgggctttgtgattctgaaagggatccaccattttatcctattcatgttgtgtaccaatcagaggccagcatgccaatccactggagtaattggataatcactgatatgtcatcatttgacactgatactgccgttcctcttaaaaaatctgtgtcatactttgagggcttggttaagccactgacaatagaaactaattgcaagaggcattctaatcaattgtcagatccgattcttgctgagtgtacaacttcaggaatgccttttccaagtttttctggcaagcaaagtgaacacagctgtttttcagatgcgatcaacgtggacacacagaacttgttgaggcctggtgctagttgccaagcttctcttcttgatctgaatgtagagccagaagatccacagaatggttgtcagcctgcctgttacctatggactgacaagtaccgacctgaaactgtggcccaggtatgtggaaatagtgagcacgtaaagtttcttgctgaatggcttaaaagctgggatgaaaaaggccacaagattggagttgctaacggggacactaatgataactcatatcaagatatatctgattcagattattcagagagtgcttctgattgtgaaaatacacttctaatcactggacctgttgggtgtggaaaatcagctgcagtttttgcatgcgccagagaacaaggcttcaatgtgatagaggtcacaggaggaggttatcaatccactaagggatgattccttggatccagattcaggaactcctgataggactgaataccaatgtttgatgtcctgtgctacaagagtaatgattgactgtgatcaacagaaatcacctgtaggatactactcaggtttgaaggcctgtgatgaacctcctaaacaagttgctaacaagacactcatactatttgaggatgtggatactgtctttgatgaggatcgtgggtttatttcaactattcttaagatggcagagactacaaaatggccaatcatactaactagcaacaagaaggatccgtctttgccgaatctcttggatcaacttgttttggatttcaaatacccatcgacctcagagctactttcacacgttgccatgatttgtaaatctgagggagtgaatgtcactgttcctcagttaaaacatgtaattgatgtttgtctaggtgacattaggagggtggtgatgtttttgcagttttggtaccaagggcatcaattcacagagaggccaaaggaatgtttgtgtggtcctttctcacttgatttagatgcagtacattctacagtgccaaaaatgttgccatgggagttcccttgtaagttatctgaaacattatgcatggaggtagacaaaactatccttttggctgaagaaaagaaaaaacagatggaaatatcagatcttgaaggcctgcagttacatgtaacagcacctttgatcaagggaagaacttctaaaacaagaagggctaagaaatccaaattaaagcgtgctcactcgactgagcataatgatatttcaccttctgatgtaggtactgaaaaacataacatatttactgttactgaagttggtttcttcccacaaccttcagaggtgcctcctatgcatgggcaagggatttctgatcagttccattttcccgttgaatcacgagagacatgtgaaattgctgattctttccaaaatccacctgaaagcaacatgtatgggtccatttcacaagtttgtgatacatttatgtcacaggacgtgtcatgtgtacccgagtcatccttaattttggacggcacatctgcatccataagtggtgatgaatttttgtcaagggcagtgtccaatggtttttctgccttttgtgagggtacatacactacctccagaatggtattagaagacagtgactgtgtgaagaatctaatggctgaacgacaaaaagatgttgaagatgtagttggtgagacaagtgagacttatatggaatcatttcggagaaatgaacaggcaagctgttcagctgctgggtttcaattaatggatgaatgtagtcgtgctgaaagcatctggctgctctctggcaaaaaatctaatgactcttgcaaggtggaactagtacaggacacttggaacaggctacggagttgtcgtcttgaatttaccagtgaggctaatcacaacagagcaacttctggagctttgaagcttgtctcagaagtgtctgatttaatatcagaatcagatcttatgcttttccgttgctaccctcttactaaggatacgttggatccgtctttaactccttgtgatgagccagttgattcttcttggtacagcaatcaggttgagatgggatctgtatatgcccagcatgctcttcgtattttatcgaggaattcccaaaaaatagatggtggttctgtcgatttgtcacaagagttgtttgccagtacagctgctgtatcctttggtaaaattacctgttcaggattcaggaatgattatggatctacggacctttctcatatgaaaaatccaactacctgtatttttaaaagaagggagcggcatgttcatctttgtgaaaccctgtctccagtggttcctccaaagttgttgcagtcattgagaggccctgcttttgttgattatttgtcttcaatcagccagatttccaaattagaaaacttgcgactctctgaaaataaagtcataaacaagcgaagaaggtcccgtcaggcaagacattacttgagttctggcgcacttcaactttcacatgaggatgttgtattattagaagaaagcggctgtttcagtagcagacgcgagagggttgaggttgtagagcaagcaccagtcagtacataagttaatgaactggtgctgatcatgagcggcagcattttgattttttttattagaaggcaatgtgactgggttggccgagccatttttatagttgcgtccgtgatcacggagcccggcggtggaggaaccggaatgtgtgcagttgattgctgtatctgttagataactagacattttaaagtttatttaaattttaaaattatttatagcaatcatgaatatggattaatcttagtatgtttacatgttcatgtttatcatctttataatcataaatagtataaaaataagaagtttaagaatgcacgttaaagtgaagctgtt

SEQ ID NO: 81339 - DNA, 3899 bp, Zea Mays
atgggtggcctggttgaagtcaggtgccggtgcagggacctggtgatgaggcaagtgacgccatggcctcctgaagtgtccggctcttcaagcaaacagaaacaatggcaggatcaatcgaacaaagatggagtcattttggttgatgaaagccctcagaaaaagcaacgtaaaggtagaaagcaagatgcaatactgaaggagcctaatgctagcagaaagcgttgcaagacatcggaagctcctgatggtcctggaagctgtcagcaattgcatatcagccagattgaagccagctcgcctgcagcagcgccagtaataattgacgttgatttgatgagtacgccttctaaagcaggacatgctaattcaatcgatcaggatatatcaccgttgaaagttgacctaaggtcagaggcgaagatagctgcagaggaaattcgaaggttatcatctggaaagaaaattcaccctttctttcattctcggaaattgaacaaatgtgctagccaagatcaagatgtcatcaatattgaaaacatgcatgggctttgtgattctgaaagggatccaccattttatcctattcatgttgtgtaccaatcagaggccagcatgccaatccactggagtaattggataatcactgatatgtcatcatttgacactgatactgccgttcctcttaaaaaatctgtgtcatactttgagggcttggttaagccactgacaatagaaactaattgcaagaggcattctaatcaattgtcagatccgattcttgctgagtgtacaacttcaggaatgccttttccaagtttttctggcaagcaaagtgaacacagctgtttttcagatgcgatcaacgtggacacacagaacttgttgaggcctggtgctagttgccaagcttctcttcttgatctgaatgtagagccagaagatccacagaatggttgtcagcctgcctgttacctatggactgacaagtaccgacctgaaactgtggcccaggtatgtggaaatagtgagcacgtaaagtttcttgctgaatggcttaaaagctgggatgaaaaaggccacaagattggagttgctaacggggacactaatgataactcatatcaagatatatctgattcagattattcagagagtgcttctgattgtgaaaatacacttctaatcactggacctgttgggtgtggaaaatcagctgcagtttttgcatgcgccagagaacaaggcttcaatgtgatagaggtaaatacatctgacatgagaaatggagcttatgtaaggcagaagtttgaggaagcaactaaatcacatggccttgaaaaatggtcacaggaggaggttatcaatccactaagggatgattccttggatccagattcaggaactcctgataggactgaataccaatgtttgatgtcctgtgctacaagagtaatgattgactgtgatcaacagaaatcacctgtaggatactactcaggtttgaaggcctgtgatgaacctcctaaacaagttgctaacaagacactcatactatttgaggatgtggatactgtctttgatgaggatcgtgggtttatttcaactattcttaagatggcagagactacaaaatggccaatcatactaactagcaacaagaaggatccgtctttgccgaatctcttggatcaacttgttttggatttcaaatacccatcgacctcagagctactttcacacgttgccatggtgacattaggagggtggtgatgtttttgcagttttggtaccaagggcatcaattcacagagaggccaaaggaatgtttgtgtggtcctttctcacttgatttagatgcagtacattctacagtgccaaaaatgttgccatgggagttcccttgtaagttatctgaaacattatgcatggaggtagacaaaactatccttttggctgaagaaaagaaaaaacagatggaaatatcagatcttgaaggcctgcagttacatgtaacagcacctttgatcaagggaagaacttctaaaacaagaagggctaagaaatccaaattaaagcgtgctcactcgactgagcataatgatatttcaccttgtaagaatgaacttgatgatttccatgatcttccagatatatctcttccatctgataaacaaataaaaagaaatcggcatcgttcgctgctattatctgagtccgatgatgatccagctgatgtaggtactgaaaaacataacatatttactgttactgaagttggtttcttcccacaaccttcagaggtgcctcctatgcatgggcaagggatttctgatcagttccattttcccgttgaatcacgagagacatgtgaaattgctgattctttccaaaatccacctgaaagcaacatgtatgggtccatttcacaagtttgtgatacatttatgtcacaggacgtgtcatgtgtacccgagtcatccttaattttggacggcacatctgcatccataagtggtgatgaatttttgtcaagggcagtgtccaatggtttttctgccttttgtgagggtacatacactacctccagaatggtattagaagacagtgactgtgtgaagaatctaatggctgaacgacaaaaagatgttgaagatgtagttggtgagacaagtgagacttatatggaatcatttcggagaaatgaacaggcaagctgttcagctgctgggtttcaattaatggatgaatgtagtcgtgctgaaagcatctggctgctctctggcaaaaaatctaatgactcttgcaaggtggaactagtacaggacacttggaacaggctacggagttgtcgtcttgaatttaccagtgaggctaatcacaacagagcaacttctggagctttgaagcttgtctcagaagtgtctgatttaatatcagaatcagatcttatgcttttccgttgctaccctcttactaaggatacgttggatccgtctttaactccttgtgatgagccagttgattcttcttggtacagcaatcaggttgagatgggatctgtatatgcccagcatgctcttcgtattttatcgaggaattcccaaaaaatagatggtggttctgtcgatttgtcacaagagttgtttgccagtacagctgctgtatcctttggtaaaattacctgttcaggattcaggaatgattatggatctacggacctttctcatatgaaaaatccaactacctgtatttttaaaagaagggagcggcatgttcatctttgtgaaaccctgtctccagtggttcctccaaagttgttgcagtcattgagaggccctgcttttgttgattatttgtcttcaatcagccagatttccaaattagaaaacttgcgactctctgaaaataaagtcataaacaagcgaagaaggtcccgtcaggcaagacattacttgagttctggcgcacttcaactttcacatgaggatgttgtattattagaagaaagcggctgtttcagtagcagacgcgagagggttgaggttgtagagcaagcaccagtcagtacataagttaatgaactggtgctgatcatgagcggcagcattttgattttttttattagaaggcaatgtgactgggttggccgagccatttttatagttgcgtccgtgatcacggagcccggcggtggaggaaccggaatgtgtgcagttgattgctgtatctgttagataactagacattttaaagtttatttaaattttaaaattatttatagcaatcatgaatatggattaatcttagtatgtttacatgttcatgtttatcatctttataatcataaatagtataaaaataagaagtttaagaatgcacgttaaagtgaagctgtt

SEQ ID NO: 81340 - DNA, 4118 bp, Zea Mays
atgggtggcctggttgaagtcaggtgccggtgcagggacctggtgatgaggcaagtgacgccatggcctcctgaagtgtccggctcttcaagcaaacagaaacaatggcaggatcaatcgaacaaagatggagtcattttggttgatgaaagccctcagaaaaagcaacgtaaaggtagaaagcaagatgcaatactgaaggagcctaatgctagcagaaagcgttgcaagacatcggaagctcctgatggtcctggaagctgtcagcaattgcatatcagccagattgaagccagctcgcctgcagcagcgccagtaataattgacgttgatttgatgagtacgccttctaaagcaggacatgctaattcaatcgatcaggatatatcaccgttgaaagttgacctaaggtcagaggcgaagatagctgcagaggaaattcgaaggttatcatctggaaagaaaattcaccctttctttcattctcggaaattgaacaaatgtgctagccaagatcaagatgtcatcaatattgaaaacatgcatgggctttgtgattctgaaagggatccaccattttatcctattcatgttgtgtaccaatcagaggccagcatgccaatccactggagtaattggataatcactgatatgtcatcatttgacactgatactgccgttcctcttaaaaaatctgtgtcatactttgagggcttggttaagccactgacaatagaaactaattgcaagaggcattctaatcaattgtcagatccgattcttgctgagtgtacaacttcaggaatgccttttccaagtttttctggcaagcaaagtgaacacagctgtttttcagatgcgatcaacgtggacacacagaacttgttgaggcctggtgctagttgccaagcttctcttcttgatctgaatgtagagccagaagatccacagaatggttgtcagcctgcctgttacctatggactgacaagtaccgacctgaaactgtggcccaggtatgtggaaatagtgagcacgtaaagtttcttgctgaatggcttaaaagctgggatgaaaaaggccacaagattggagttgctaacggggacactaatgataactcatatcaagatatatctgattcagattattcagagagtgcttctgattgtgaaaatacacttctaatcactggacctgttgggtgtggaaaatcagctgcagtttttgcatgcgccagagaacaaggcttcaatgtgatagaggtaaatacatctgacatgagaaatggagcttatgtaaggcagaagtttgaggaagcaactaaatcacatggccttgaaaaatggtcacaggaggaggttatcaatccactaagggatgattccttggatccagattcaggaactcctgataggactgaataccaatgtttgatgtcctgtgctacaagagtaatgattgactgtgatcaacagaaatcacctgtaggatactactcaggtttgaaggcctgtgatgaacctcctaaacaagttgctaacaagacactcatactatttgaggatgtggatactgtctttgatgaggatcgtgggtttatttcaactattcttaagatggcagagactacaaaatggccaatcatactaactagcaacaagaaggatccgtctttgccgaatctcttggatcaacttgttttggatttcaaatacccatcgacctcagagctactttcacacgttgccatgatttgtaaatctgagggagtgaatgtcactgttcctcagttaaaacatgtaattgatgtttgtctaggtgacattaggagggtggtgatgtttttgcagttttggtaccaagggcatcaattcacagacctttcagcatgtaaaacttactatgatggtacatgatgaagtggaagatgctggttgtttatgggtattgtgctcaataatagccccccccccatctagaatagaggccaaaggaatgtttgtgtggtcctttctcacttgatttagatgcagtacattctacagtgccaaaaatgttgccatgggagttcccttgtaagttatctgaaacattatgcatggaggtagacaaaactatccttttggctgaagaaaagaaaaaacagatggaaatatcagatcttgaaggcctgcagttacatgtaacagcacctttgatcaagggaagaacttctaaaacaagaagggctaagaaatccaaattaaagcgtgctcactcgactgagcataatgatatttcaccttgtaagaatgaacttgatgatttccatgatcttccagatatatctcttccatctgataaacaaataaaaagaaatcggcatcgttcgctgctattatctgagtccgatgatgatccagctgatgtaggtactgaaaaacataacatatttactgttactgaagttggtttcttcccacaaccttcagaggtgcctcctatgcatgggcaagggatttctgatcagttccattttcccgttgaatcacgagagacatgtgaaattgctgattctttccaaaatccacctgaaagcaacatgtatgggtccatttcacaagtttgtgatacatttatgtcacaggacgtgtcatgtgtacccgagtcatccttaattttggacggcacatctgcatccataagtggtgatgaatttttgtcaagggcagtgtccaatggtttttctgccttttgtgagggtacatacactacctccagaatggtattagaagacagtgactgtgtgaagaatctaatggctgaacgacaaaaagatgttgaagatgtagttggtgagacaagtgagacttatatggaatcatttcggagaaatgaacaggcaagctgttcagctgctgggtttcaattaatggatgaatgtagtcgtgctgaaagcatctggctgctctctggcaaaaaatctaatgactcttgcaaggtggaactagtacaggacacttggaacaggctacggagttgtcgtcttgaatttaccagtgaggctaatcacaacagagcaacttctggagctttgaagcttgtctcagaagtgtctgatttaatatcagaatcagatcttatgcttttccgttgctaccctcttactaaggatacgttggatccgtctttaactccttgtgatgagccagttgattcttcttggtacagcaatcaggttgagatgggatctgtatatgcccagcatgctcttcgtattttatcgaggaattcccaaaaaatagatggtggttctgtcgatttgtcacaagagttgtttgccagtacagctgctgtatcctttggtaaaattacctgttcaggattcaggaatgattatggatctacggacctttctcatatgaaaaatccaactacctgtatttttaaaagaagagatgcttaccttattctgagtccccataattttgctaggatccactgggagcggcatgttcatctttgtgaaaccctgtctccagtggttcctccaaagttgttgcagtcattgagaggccctgcttttgttgattatttgtcttcaatcagccagatttccaaattagaaaacttgcgactctctgaaaataaagtcataaacaagcgaagaaggtcccgtcaggcaagacattacttgagttctggcgcacttcaactttcacatgaggatgttgtattattagaagaaagcggctgtttcagtagcagacgcgagagggttgaggttgtagagcaagcaccagtcagtacataagttaatgaactggtgctgatcatgagcggcagcattttgattttttttattagaaggcaatgtgactgggttggccgagccatttttatagttgcgtccgtgatcacggagcccggcggtggaggaaccggaatgtgtgcagttgattgctgtatctgttagataactagacattttaaagtttatttaaattttaaaattatttatagcaatcatgaatatggattaatcttagtatgtttacatgttcatgtttatcatctttataatcataaatagtataaaaataagaagtttaagaatgcacgttaaagtgaagctgtt

SEQ ID NO: 81341 - DNA, 2329 bp, Zea Mays
ccgaaaacccaaaagccccagccacggctacgaacccaaaaaatctccccccttgccgtctccccgcccccgcgtccccaagccgagctctcgctttcggcgctctcctcaatcctcgtccccgcgtctttcagagcgcccatgagctgaggccgccgccgatgggcccgccccccggtgcgcaggacccggcgccgtcgccgtcgggcggctccggctcttccaggcgccgcttccgccgcctcgaccgccgcaacgcatccaagcacatcgcctacgacgccaccaacttctgccagtacccgccgtccccgcaggccgcatccgcgccggggtcagggcgggcttcgctcgccagctccgctgcctgctccatcgatctcgtcaacagcttccgcatcggcggcagcggagacgggggcggggacctccgcttcctgtgcgagaacctcggcctctccgggcctgacgacttcgccgtcccgcgggccgactgggaggcacacaaggccgcccgatcatctgcctccgcttcgagctcccccaactccgcacgccccaactacgactcccctcagcggaactcaccgctctctcaggtgggtgccgaggagcccgcccaggcttcggacgccgagacggagctaccggccgcaacgggaagggacggcccaatcgaagccccggagcggccggcacgcttggatctaccgctcgagtccacctgtccggatgccaggagggcgcctgggcagggaggaatcaagggcgtgcgcccgccaccggtgctcaagccgccgccttcgatggccctaccagctgtctgcggcgtgggatccacgtgggatatcttgcggtcgttggcgccggatgagaaagatgacgcccccgctagcagatctggccgtcgttttggacacctggatgcagtggagaaggatgacgacgagcgtgcggcggttctgttaatgttggatgatcttaggctggaggagtcgtccgagagctttactggtacttcttcgctatcaacgaccaacgatgacgacacctcaagcaccaccacagaatccatgttctatatttcaccgaacgggaggtttaggaggaggatcaagtcatggagccgaggggtgctcctgggtagtggctcgtttgggacagtctatgagggcatcagcgagaaattgcacttctgagccagtttgagcatgagaatatagtgcagtactatgggacagacaaagaagattcgaaactttacatcttccttgaattagtgacccaaggatcccttgcattactatatcagaagtatcgcctgcgtgatactcaagtctctgcatatacaagacagattcttaatggattgatttacctccatgaaagaaatattgttcacagagacattaaatgcgcaaatattctggtgcatgcaaatggatctgtgaagcttgcagattttggactcgctaaggagattaccaaattcaatgaacttaaatcatgcaaaggaactgtttattggatggcaccggaggttgttaatccgcagcagacatatggacctgcagctgatatatggagtcttggttgcactgtcctggagatgttgacacgccagataccctatcctgaccttgaatgggcacaagctctatacaggatcggtaagggggaatcaccagcaattccaaacactctttcgagggatgctcgcgattttataagccggtgtgtaaaaccgaatccggaagacagaccatcagcatccaaactgttggagcatccattcgtaaacaagtccataagatcagtacggtctatgaggacgacaccttcacgctcgaattcatctactcgtggcatcaattaattggccgtccgtcatcatctattgggcagcggcagaatgatattggtccgcgcaaatcatgcggagctggccgagagggagtttgttttgactggagctagtattgtcaacgctcaacagcattgtcgtcaacctcttattggtgtttcattagttgattctttggcatacgcccgcgaggaagatgtcctcgttgagccgccggctaatgtatgttcttctgcctggatagagaatagtgggtgtgcatttgagcgcatgggttgtagagtgagaacgggctgtgtaaatagcttgtcctgatgccaaggatatgttattagttgtcacgagaaaaaagaaagaaaggaaaaaaggttcaaagctttggaactgtcaacagcggttgttagattggaatttgctgtcagcttttgtggtagaacagaatcatacggctatgctatctttttc

SEQ ID NO: 81342 - DNA, 2256 bp, Zea Mays
ccgaaaacccaaaagccccagccacggctacgaacccaaaaaatctccccccttgccgtctccccgcccccgcgtccccaagccgagctctcgctttcggcgctctcctcaatcctcgtccccgcgtctttcagagcgcccatgagctgaggccgccgccgatgggcccgccccccggtgcgcaggacccggcgccgtcgccgtcgggcggctccggctcttccaggcgccgcttccgccgcctcgaccgccgcaacgcatccaagcacatcgcctacgacgccaccaacttctgccagtacccgccgtccccgcaggccgcatccgcgccggggtcagggcgggcttcgctcgccagctccgctgcctgctccatcgatctcgtcaacagcttccgcatcggcggcagcggagacgggggcggggacctccgcttcctgtgcgagaacctcggcctctccgggcctgacgacttcgccgtcccgcgggccgactgggaggcacacaaggccgcccgatcatctgcctccgcttcgagctcccccaactccgcacgccccaactacgactcccctcagcggaactcaccgctctctcaggtgggtgccgaggagcccgcccaggcttcggacgccgagacggagctaccggccgcaacgggaagggacggcccaatcgaagccccggagcggccggcacgcttggatctaccgctcgagtccacctgtccggatgccaggagggcgcctgggcagggaggaatcaagggcgtgcgcccgccaccggtgctcaagccgccgccttcgatggccctaccagctgtctgcggcgtgggatccacgtgggatatcttgcggtcgttggcgccggatgagaaagatgacgcccccgctagcagatctggccgtcgttttggacacctggatgcagtggagaaggatgacgacgagcgtgcggcggttctgttaatgttggatgatcttaggctggaggagtcgtccgagagctttactggtacttcttcgctatcaacgaccaacgatgacgacacctcaagcaccaccacagaatccatgttctatatttcaccgaacgggaggtttaggaggaggatcaagtcatggagccgaggggtgctcctgggtagtggctcgtttgggacagtctatgagggcatcagcgatgagggtgtcttctttgctgtcaaagaagtgaacttatttgataaagggagcaatgcgaagcagtgtatctttcagcttgagcaggaaattgcacttctgagccagtttgagcatgagaatatagtgcagtactatgggacagacaaaagacattaaatgcgcaaatattctggtgcatgcaaatggatctgtgaagcttgcagattttggactcgctaaggagattaccaaattcaatgaacttaaatcatgcaaaggaactgtttattggatggcaccggaggttgttaatccgcagcagacatatggacctgcagctgatatatggagtcttggttgcactgtcctggagatgttgacacgccagataccctatcctgaccttgaatgggcacaagctctatacaggatcggtaagggggaatcaccagcaattccaaacactctttcgagggatgctcgcgattttataagccggtgtgtaaaaccgaatccggaagacagaccatcagcatccaaactgttggagcatccattcgtaaacaagtccataagatcagtacggtctatgaggacgacaccttcacgctcgaattcatctactcgtggcatcaattaattggccgtccgtcatcatctattgggcagcggcagaatgatattggtccgcgcaaatcatgcggagctggccgagagggagtttgttttgactggagctagtattgtcaacgctcaacagcattgtcgtcaacctcttattggtgtttcattagttgattctttggcatacgcccgcgaggaagatgtcctcgttgagccgccggctaatgtatgttcttctgcctggatagagaatagtgggtgtgcatttgagcgcatgggttgtagagtgagaacgggctgtgtaaatagcttgtcctgatgccaaggatatgttattagttgtcacgagaaaaaagaaagaaaggaaaaaaggttcaaagctttggaactgtcaacagcggttgttagattggaatttgctgtcagcttttgtggtagaacagaatcatacggctatgctatctttttc

SEQ ID NO: 81343 - DNA, 1596 bp, Zea Mays
gcgaaaacaaagcagtccaaaaccagacgcgcgttagagtctccaaagcttatccctccactccactctccgccgcaagccgcagcctccccttccggttatataacgcggccgcgtgctctgcctcctcctggcctacacaagatttaaataaacacacgcgctagctgcgccaacgtagctttgctataggctagtgtcacttgccgaggacaaacaggggagacatggcactgacagtgttggagaccaccgagcagcagctcctcccgtgccagcagtccgttgagcatggcgctggcgatggcggcaacggcaaggccgccgctgctggcgccgagaaggctaccgtcatgctgaaggagacgggccacggcggcgacgtcgaccggccggacagggacaacatatggagcatgattcaggcgcagaagccgccgcctgccgcgccaaggcaggcgcaggcgccggcgccgtacgtgcacccgctcgcacgccgctcgtccggtctgctgacgcagaagagcctggagacctgcaccgagagcctcggctcggagacaggctcggacggcttctccgacgccgacgactccgccaccgaccgctcgtgcacgggctgcggcgacgacgagcgcggggaggaggaggaggaggaggtggccccgcacgcggccccgcccaggtcgttcccgccgccgctgccgtcgctggcgcggcgcagggtggagcccaccaccatggagatgaggcaggagcgccaggacgggcgcctgctcgtcaaggtcgtcccggtggcgtcgtccaccctgctccgcgcgcagcgccgcgacggccgcctactcctgtcgttcgcggacacggtcgcccctgccttggacgagctggacaggaggagcggcgaccagccggagaccgagcagcaggccgacgaggaagacgaggaggacgaggtcgaggtcgtggacagggggacagtcttggaggtcaaggtgagcgcgcagccgcagcggcaggcgcgcagcgggagcggcccgcgagtgcaccgctccgcgctcgtcatcaacaagttcgtgggcgccgagccggtcatcacctcctcctgcgagatcgacggcggcgccccagccgcacagcacccggtggcgccggtgaagcccccgaggcgcgccactgggtccaccaccacagcggtcgcggccctgctggcagcggcctcagcgctgagcgcgaccgccgcgccgccgagcaatggcgacgacgccgccgtccccggcgccacgtgcggcgagaacaaactcctcatgacggcgaggcggcacagcagcaaggaggagctgatgatgcacatgcgccggtgcagcggccagctcagcccgtcgcttttcgtttgggaagggaccaagggtgcatcgcaattcgcaacctcctcatgaacgcgccattgccgatgatccattccatatttgcatgcatgctttcaacgagtgctctgtttgtttgcagcagccggtgctgctctaacgtccgtaactccgtaaataaagacaaaacaaatgtatcaggcttcaggcatgtgttcatgagcttgctccg

SEQ ID NO: 81344 - DNA, 1153 bp, Zea Mays
caccccagctgctgcgtgcatgcccgctctccccgtcgacgacgtgcacctgcactgcactgcactcctcgccggcgcgcgcgcgagctgcggcggcactgtggtggtgggtgttgacgtggtccgccacagctggcagctggtcgtccccggccctatagtcgtccgagatatatagtagtatggcccggggagtgaggctggcggcgggcggcgggctggtggtggtcggggcgccgtggctcctcatcgccgtcctcgtccactcctccttgctcggctccaccgtcctcacggccgtcgacgccgcccgcgcgtcgtcggcgttcgtggtgacgacgacgacggccccgctgcggacgtcgacgacgatggctcccgcgccgtcacccgccgacggcagcacgctcgggacggacgacagcaagaggaaagtgcccaccggctccaaccccttgcacaactaacaggtgacgcgagcgagatcgatcggcaggaacgacgacgttgcgtgcgtgcatatatatgtgacgcacgcgcgcggtgcgttggagcagcagaggtggcggcggatgcgcgcgctggaggtacgaggtgaacgagattgcgaggtgcgtacgactgacggcggtgcttggcgcgacgagacgactgccggcgtacgtgagagcttctgattctgcttcttttattcctccgccgccgcgctcgtggcgattacgtaccttggtcgggttggctccgagagcgaggagagagaaaggaagttgaatgagagcgcattcagtcagatagctaggagtgtagcttgctgctagaagctcttcttgtttttcttttcccttcttcttcttctctcagtttttggcatgcatgttggacgccttcatcgtcaaaagtataaaaagagattcgatctgtaatgtactcatttgttactccagagatcagagaggaataattaagtacacgtttcgttgcgtacgtgttgctttgccactgcgctgacttcggagctcggagggggatcacacaggtctaatttctctcgatcggtcactagtgcatgcaagcgcttctctgaagagtgaagactcaagttctgaaccatatgcatgcttttgcttcaaaccttcgattgacccgatggctt

SEQ ID NO: 81345 - DNA, 3036 bp, Zea Mays
gctatacttgggatctcatttaaaacccgttgagatatgttttttttgcataataacatcttaaattaattttagggactctgattgagaagatgctcggcctgatgcagccagacatggacggatcttcgcgccctcatccagcccgcggcccgcagtcgtctgtgccttgcggaaggagcactcttcttccttagcagcagccagcgcccagcaggcaataccgtcactcggtcggctccttgccgattcccccacccccgcaagccgcggcgatggcctacgatctcccgttcactctcttcgtactcctcttcctcgtcctcctacagacgccgagctcctcatggcgaccggctgacgacgacgacgcgtcggtctcgaggtcggctttccccatggagggtgacgtcgcctgggtggtgcaggtcagcgacctccatatcagcacctacaaccctgagcgtgccgccgaactcgcgctcctcggcaccgcgctgcgcgcaatccggcctcaccttctcctcgtcaccggtgacatcaccgatgctaagaatcagcaaagaactagttcaaggcaggatgaatacgaatggattacctacaagaaaactattgatgcaattgttggaagcggtggcattgataagagcaggatatttgatattagaggcaatcatgatacatatggagtgccttatagaggaggaaaattggacttcttctcaacttacagcgttaactcacagtttaagcgattaagcaccatcagtagtatattgcttcagtagggagatagaagctaccaatttctgggtattgatgataccatgaatgttggcattcgttttcctgcaaatctttttggccattctactgataaaaggatagaagcggtaaattcagagcttcaatactggaccaatcattccaatgttccagttaccaaagtagtttttggacatttccctatgtcattcactgcatcatctgaaaaaggacagcgatatgaaagtgtgcttgcagggcagtctatttcagcatacctatgtggtcatctccatgcaaaagttagtaagcagctttggaggtatcatgaaatcagaacaacagaagatcacaagtcaagcttttgggaatgggaacttggagactggaaggactccagattgatgaggattttagcaatagatggtggtgcagtctcattcatagaccacacattgaaacatgcactccaaacttccatcttgatcacatatccaacagattcaagaagtatgaatatgttggattcagaaaagtggtcgatgagaaatgatataaatgtccttattttctctcatcaatttataagtaatgtgagtgctagaatctttgactctcattgtgagtttaagattgtcgaggagatacctctgcagcttgttaccagtacttctgctcacagacctttgttccatgccaaatggaatgctgaaaattacagaagttcatccgccactcgctactggttgcaggtgtttgttcttgattctcatggtgtaaaaatttcaagtgagcagagaccattttcagttgagggtaagatggcaattcccacaagtccatggaccaactatctgctctttgaagtccagtgggaaggcatgtatcaagttcttctgtggagtaatttggccttcaccattgtattgttgttcatccccaaactattgtatcactttgttaggagaagttcatcatatcaaaggtgggctgtgtcaattccgtcctcctctatccagcagagaaaaccttacttttggttggtttggtttttaatggagggcacaaggagtaaacctttctggttttctatggtaacatatgtgctctggctaattgaaatgccatggttttggggccatgcaacgtctgaaaatggagaaatcgctcaaatgtacttatctggatggagcgtgccaattcatgatgggggcttgacgggcaacaaactgagcaacccagatgtgcttgtcatcacactaccgttcctctatctggtgcttgtcccagtaatagtccttacatatggtctgtttgcagaaaaggctactgtgtttttgcagcacagaagaagagtagtatactctcttgactcaacaaatgtgcatgccgagtcaccaagattgctgccagttgctccaagggcttcactaatgaaattcgccgacaagatggtgtccatggtgatccaattttgtggtagctggacaagaagggctcttctacttgcatgcttgatcaccgcagcaatacatttgaagctctgttccaaactaatgtcagcatatggaactgtaccagtagcattgtcacccccattgacatggataccattgttgctattaggtggtgctgcctattgtacagttctccatgcagattagcgctcagtactctgcaatcctgaagtgtagtacttatttgcattggaggattagggctcataactgtgaattcctgaagtgaacgtagttgcgtttcgggtgcgtgctgctgctgtgcattaaatcctggaactgtggaacatgtcacctttcgatggttaactgcatgggtgctggctaaccaaagataaagtagaaacagtttaatggttgagacttgagagtgcaaactgcagagtagaacatctggatggatggaccaaaactggtagcggtggctcgtcgttgtgtctaaccctcgccgcagcaagaggagatggaacagtggcttggacagagaggttgttgatcggatggctgtgaggggagtgatgggggtagggacgtagggtgagagggaaaccatggcggctaggtattttttgtgctgagtaggctgttgtgtttgtgtacaggggatattttcccaagtggaccactctattggtgtgtgggcctctcggccagaatttcggtctgcatggttattttcacgagtgggtcattttgttggtggagcgtattttggttagaaattctaacggcttcgggctagtttggtaat

SEQ ID NO: 81346 - DNA, 2913 bp, Zea Mays
agacatggacggatcttcgcgccctcatccagcccgcggcccgcagtcgtctgtgccttgcggaaggagcactcttcttccttagcagcagccagcgcccagcaggcaataccgtcactcggtcggctccttgccgattcccccacccccgcaagccgcggcgatggcctacgatctcccgttcactctcttcgtactcctcttcctcgtcctcctacagacgccgagctcctcatggcgaccggctgacgacgacgacgcgtcggtctcgaggtcggctttccccatggagggtgacgtcgcctgggtggtgcaggtcagcgacctccatatcagcacctacaaccctgagcgtgccgccgaactcgcgctcctcggcaccgcgctgcgcgcaatccggcctcaccttctcctcgtcaccggtgacatcaccgaatcagcaaagaactagttcaaggcaggatgaatacgaatggattacctacaagaaaactattgatgcaattgttggaagcggtggcattgataagagcaggatatttgatattagaggcaatcatgatacatatggagtgccttatagaggaggaaaattggacttcttctcaacttacagcgttaactcacagtttaagcgattaagcaccatcagtagtatattgcttcagggagatagaagctaccaatttctgggtattgatgataccatgaatgttggcattcgttttcctgcaaatctttttggccattctactgataaaaggatagaagcggtaaattcagagcttcaatactggaccaatcattccaatgttccagttaccaaagtagtttttggacatttccctatgtcattcactgcatcatctgaaaaaggacagcgatatgaaagtgtgcttgcagggcagtctatttcagcatacctatgtggtcatctccatgcaaaagttagtaagcagctttggaggtatcatgaaatcagaacaacagaagatcacaagtcaagcttttgggaatgggaacttggagactggaaggactccagattgatgaggattttagcaatagatggtggtgcagtctcattcatagaccacacattgaaacatgcactccaaacttccatcttgatcacatatccaacagattcaagaagtatgaatatgttggattcagaaaagtggtcgatgagaaatgatataaatgtccttattttctctcatcaatttataagtaatgtgagtgctagaatctttgactctcattgtgagtttaagattgtcgaggagatacctctgcagcttgttaccagtacttctgctcacagacctttgttccatgccaaatggaatgctgaaaattacagaagttcatccgccactcgctactggttgcaggtgtttgttcttgattctcatggtgtaaaaatttcaagtgagcagagaccattttcagttgagggtaagatggcaattcccacaagtccatggaccaactatctgctctttgaagtccagtgggaaggcatgtatcaagttcttctgtggagtaatttggccttcaccattgtattgttgttcatccccaaactattgtatcactttgttaggagaagttcatcatatcaaaggtgggctgtgtcaattccgtcctcctctatccagcagagaaaaccttacttttggttggtttggtttttaatggagggcacaaggagtaaacctttctggttttctatggtaacatatgtgctctggctaattgaaatgccatggttttggggccatgcaacgtctgaaaatggagaaatcgctcaaatgtacttatctggatggagcgtgccaattcatgatgggggcttgacgggcaacaaactgagcaacccagatgtgcttgtcatcacactaccgttcctctatctggtgcttgtcccagtaatagtccttacatatggtctgtttgcagaaaaggctactgtgtttttgcagcacagaagaagagtagtatactctcttgactcaacaaatgtgcatgccgagtcaccaagattgctgccagttgctccaagggcttcactaatgaaattcgccgacaagatggtgtccatggtgatccaattttgtggtagctggacaagaagggctcttctacttgcatgcttgatcaccgcagcaatacatttgaagctctgttccaaactaatgtcagcatatggaactgtaccagtagcattgtcacccccattgacatggataccattgttgctattaggtggtgctgcctattgtacagttctccatgcagattagcgctcagtactctgcaatcctgaagtgtagtacttatttgcattggaggattagggctcataactgtgaattcctgaagtgaacgtagttgcgtttcgggtgcgtgctgctgctgtgcattaaatcctggaactgtggaacatgtcacctttcgatggttaactgcatgggtgctggctaaccaaagataaagtagaaacagtttaatggttgagacttgagagtgcaaactgcagagtagaacatctggatggatggaccaaaactggtagcggtggctcgtcgttgtgtctaaccctcgccgcagcaagaggagatggaacagtggcttggacagagaggttgttgatcggatggctgtgaggggagtgatgggggtagggacgtagggtgagagggaaaccatggcggctaggtattttttgtgctgagtaggctgttgtgtttgtgtacaggggatattttcccaagtggaccactctattggtgtgtgggcctctcggccagaatttcggtctgcatggttattttcacgagtgggtcattttgttggtggagcgtattttggttagaaattctaacggcttcgggctagtttggtaat

SEQ ID NO: 81347 - DNA, 3127 bp, Zea Mays
ctgtgccttgcggaaggagcactcttcttccttagcagcagccagcgcccagcaggcaataccgtcactcggtcggctccttgccgattcccccacccccgcaagccgcggcgatggcctacgatctcccgttcactctcttcgtactcctcttcctcgtcctcctacagacgccgagctcctcatggcgaccggctgacgacgacgacgcgtcggtctcgaggtcggctttccccatggagggtgacgtcgcctgggtggtgcaggtcagcgacctccatatcagcacctacaaccctgagcgtgccgccgaactcgcgctcctcggcaccgcgctgcgcgcaatccggcctcaccttctcctcgtcaccggtgacatcaccggtgagccctgtgctctcatatgtctggatctgaaattttcggtgtcggattgcaacttgtattcaaacttgtcccgtgcccatggatatttatgagtcgatatttatttatttgaaatgctgtgcccatggattatattactacgaaaatactgggagcagtcagcatatcaagtacatggtggaaaattgacgagaagtacttcgaacaggccaaattggcatagcaccagaaacctactctatcgatgctaagaatcagcaaagaactagttcaaggcaggatgaatacgaatggattacctacaagaaaactattgatgcaattgttggaagcggtggcattgataagagcaggatatttgatattagaggcaatcatgatacatatggagtgccttatagaggaggaaaattggacttcttctcaacttacagcgttaactcacagtttaagcgattaagcaccatcagtagtatattgcttcaggcactgtagggagatagaagctaccaatttctgggtattgatgataccatgaatgttggcattcgttttcctgcaaatctttttggccattctactgataaaaggatagaagcggtaaattcagagcttcaatactggaccaatcattccaatgttccagttaccaaagtagtttttggacatttccctatgtcattcactgcatcatctgaaaaaggacagcgatatgaaagtgtgcttgcagggcagtctatttcagcatacctatgtggtcatctccatgcaaaagttagtaagcagctttggaggtatcatgaaatcagaacaacagaagatcacaagtcaagcttttgggaatgggaacttggagactggaaggactccagattgatgaggattttagcaatagatggtggtgcagtctcattcatagaccacacattgaaacatgcactccaaacttccatcttgatcacatatccaacagattcaagaagtatgaatatgttggattcagaaaagtggtcgatgagaaatgatataaatgtccttattttctctcatcaatttataagtaatgtgagtgctagaatctttgactctcattgtgagtttaagattgtcgaggagatacctctgcagcttgttaccagtacttctgctcacagacctttgttccatgccaaatggaatgctgaaaattacagaagttcatccgccactcgctactggttgcaggtgtttgttcttgattctcatggtgtaaaaatttcaagtgagcagagaccattttcagttgagggtaagatggcaattcccacaagtccatggaccaactatctgctctttgaagtccagtgggaaggcatgtatcaagttcttctgtggagtaatttggccttcaccattgtattgttgttcatccccaaactattgtatcactttgttaggagaagttcatcatatcaaaggtgggctgtgtcaattccgtcctcctctatccagcagagaaaaccttacttttggttggtttggtttttaatggagggcacaaggagtaaacctttctggttttctatggtaacatatgtgctctggctaattgaaatgccatggttttggggccatgcaacgtctgaaaatggagaaatcgctcaaatgtacttatctggatggagcgtgccaattcatgatgggggcttgacgggcaacaaactgagcaacccagatgtgcttgtcatcacactaccgttcctctatctggtgcttgtcccagtaatagtccttacatatggtctgtttgcagaaaaggctactgtgtttttgcagcacagaagaagagtagtatactctcttgactcaacaaatgtgcatgccgagtcaccaagattgctgccagttgctccaagggcttcactaatgaaattcgccgacaagatggtgtccatggtgatccaattttgtggtagctggacaagaagggctcttctacttgcatgcttgatcaccgcagcaatacatttgaagctctgttccaaactaatgtcagcatatggaactgtaccagtagcattgtcacccccattgacatggataccattgttgctattaggtggtgctgcctattgtacagttctccatgcagattagcgctcagtactctgcaatcctgaagtgtagtacttatttgcattggaggattagggctcataactgtgaattcctgaagtgaacgtagttgcgtttcgggtgcgtgctgctgctgtgcattaaatcctggaactgtggaacatgtcacctttcgatggttaactgcatgggtgctggctaaccaaagataaagtagaaacagtttaatggttgagacttgagagtgcaaactgcagagtagaacatctggatggatggaccaaaactggtagcggtggctcgtcgttgtgtctaaccctcgccgcagcaagaggagatggaacagtggcttggacagagaggttgttgatcggatggctgtgaggggagtgatgggggtagggacgtagggtgagagggaaaccatggcggctaggtattttttgtgctgagtaggctgttgtgtttgtgtacaggggatattttcccaagtggaccactctattggtgtgtgggcctctcggccagaatttcggtctgcatggttattttcacgagtgggtcattttgttggtggagcgtattttggttagaaattctaacggcttcgggctagtttggtaat

SEQ ID NO: 81348 - DNA, 2721 bp, Zea Mays
ctgtgccttgcggaaggagcactcttcttccttagcagcagccagcgcccagcaggcaataccgtcactcggtcggctccttgccgattcccccacccccgcaagccgcggcgatggcctacgatctcccgttcactctcttcgtactcctcttcctcgtcctcctacagacgccgagctcctcatggcgaccggctgacgacgacgacgcgtcggtctcgaggtcggctttccccatggagggtgacgtcgcctgggtggtgcaggtcagcgacctccatatcagcacctacaaccctgagcgtgccgccgaactcgcgctcctcggcaccgcgctgcgcgcaatccggcctcaccttctcctcgtcaccggtgacatcaccgatgctaagaatcagcaaagaactagttcaaggcaggatgaatacgaatggattacctacaagaaaactattgatgcaattgttggaagcggtggcattgataagagcaggatatttgatattagaggcaatcatgatacatatggagtgccttatagaggaggaaaattggacttcttctcaacttacagcgttaactcacagtttaagcgattaagcaccatcagtagtatattgcttcaggcactgtagggagatagaagctaccaatttctgggtattgatgataccatgaatgttggcattcgttttcctgcaaatctttttggccattctactgataaaaggatagaagcggtaaattcagagcttcaatactggaccaatcattccaatgttccagttaccaaagtagtttttggacatttccctatgtcattcactgcatcatctgaaaaaggacagcgatatgaaagtgtgcttgcagggcagtctatttcagcatacctatgtggtcatctccatgcaaaagttagtaagcagctttggaggtatcatgaaatcagaacaacagaagatcacaagtcaagcttttgggaatgggaacttggagactggaaggactccagattgatgaggattttagcaatagatggtggtgcagtctcattcatagaccacacattgaaacatgcactccaaacttccatcttgatcacatatccaacagattcaagaagtatgaatatgttggattcagaaaagtggtcgatgagaaatgatataaatgtccttattttctctcatcaatttataagtaatgtgtttgttcttgattctcatggtgtaaaaatttcaagtgagcagagaccattttcagttgagggtaagatggcaattcccacaagtccatggaccaactatctgctctttgaagtccagtgggaaggcatgtatcaagttcttctgtggagtaatttggccttcaccattgtattgttgttcatccccaaactattgtatcactttgttaggagaagttcatcatatcaaaggtgggctgtgtcaattccgtcctcctctatccagcagagaaaaccttacttttggttggtttggtttttaatggagggcacaaggagtaaacctttctggttttctatggtaacatatgtgctctggctaattgaaatgccatggttttggggccatgcaacgtctgaaaatggagaaatcgctcaaatgtacttatctggatggagcgtgccaattcatgatgggggcttgacgggcaacaaactgagcaacccagatgtgcttgtcatcacactaccgttcctctatctggtgcttgtcccagtaatagtccttacatatggtctgtttgcagaaaaggctactgtgtttttgcagcacagaagaagagtagtatactctcttgactcaacaaatgtgcatgccgagtcaccaagattgctgccagttgctccaagggcttcactaatgaaattcgccgacaagatggtgtccatggtgatccaattttgtggtagctggacaagaagggctcttctacttgcatgcttgatcaccgcagcaatacatttgaagctctgttccaaactaatgtcagcatatggaactgtaccagtagcattgtcacccccattgacatggataccattgttgctattaggtggtgctgcctattgtacagttctccatgcagattagcgctcagtactctgcaatcctgaagtgtagtacttatttgcattggaggattagggctcataactgtgaattcctgaagtgaacgtagttgcgtttcgggtgcgtgctgctgctgtgcattaaatcctggaactgtggaacatgtcacctttcgatggttaactgcatgggtgctggctaaccaaagataaagtagaaacagtttaatggttgagacttgagagtgcaaactgcagagtagaacatctggatggatggaccaaaactggtagcggtggctcgtcgttgtgtctaaccctcgccgcagcaagaggagatggaacagtggcttggacagagaggttgttgatcggatggctgtgaggggagtgatgggggtagggacgtagggtgagagggaaaccatggcggctaggtattttttgtgctgagtaggctgttgtgtttgtgtacaggggatattttcccaagtggaccactctattggtgtgtgggcctctcggccagaatttcggtctgcatggttattttcacgagtgggtcattttgttggtggagcgtattttggttagaaattctaacggcttcgggctagtttggtaat

SEQ ID NO: 81349 - DNA, 4018 bp, Zea Mays
ctgtgccttgcggaaggagcactcttcttccttagcagcagccagcgcccagcaggcaataccgtcactcggtcggctccttgccgattcccccacccccgcaagccgcggcgatggcctacgatctcccgttcactctcttcgtactcctcttcctcgtcctcctacagacgccgagctcctcatggcgaccggctgacgacgacgacgcgtcggtctcgaggtcggctttccccatggagggtgacgtcgcctgggtggtgcaggtcagcgacctccatatcagcacctacaaccctgagcgtgccgccgaactcgcgctcctcggcaccgcgctgcgcgcaatccggcctcaccttctcctcgtcaccggtgacatcaccggtgagccctgtgctctcatatgtctggatctgaaattttcggtgtcggattgcaacttgtattcaaacttgtcccgtgcccatggatatttatgagtcgatatttatttatttgaaatgctgtgcccatggattatattactacgaaaatactgggagcagtcagcatatcaagtacatggtggaaaattgacgagaagtacttcgaacaggccaaattggcatagcaccagaaacctactctatcggttaggcttgttcgttttgctcatgtgaattgggtgggattgagtcagatactcagatttaaatcatatcatgttttttttctaatctcacaaatccacatgggataggaataaccgaataaggccttgtatgttttgacttaccatgtgatataatttgaaacgaagagaatctaagactagtacaaaatataaactttgagatactcgaattatgactgctatggcttttaagatagctcagtagcccactccaattcgtttgctgcgaagttgtaatgaccatctaagggcctgtttggaataacccagttttaagaaactagtttataaaatctgaggtggttccaaacataccggtttatagaaattggattcctagtttcttaaaaccaagaagctagcctctcttagctaaaactagtttatgaaaactgagatagttccaaatactataaatcagttttttttacaaatcagtttctagaagttagagatacaaacttaaaaactaggttgcttctaaacagggcctaaaccattctgtttttatttggcatgcaaaccattactgttccatacaaggaatcaaggcaaggcatttgtacatcgaaacaaaatttcgttttgatgacaaatggaatattgaaaatgatgctgcattgttgtcatattgaaaagtatctctggataacactttctgtgtcccgacataagagaactttttggagcaccctgtccatgcaagtatggtagatagaaaggcgttgcaacaaaaataaggcaacatcataagcgcacacatgattattgtgatcgacctgtatcgttttccgtgtggttttatggacctttttattatatattttaacttcacgttttcattgtcatttcaataagatgctaagaatcagcaaagaactagttcaaggcaggatgaatacgaatggattacctacaagaaaactattgatgcaattgttggaagcggtggcattgataagagcaggatatttgatattagaggcaatcatgatacatatggagtgccttatagaggaggaaaattggacttcttctcaacttacagcgttaactcacagtttaagcgattaagcaccatcagtagtatattgcttcagggagatagaagctaccaatttctgggtattgatgataccatgaatgttggcattcgttttcctgcaaatctttttggccattctactgataaaaggatagaagcggtaaattcagagcttcaatactggaccaatcattccaatgttccagttaccaaagtagtttttggacatttccctatgtcattcactgcatcatctgaaaaaggacagcgatatgaaagtgtgcttgcagggcagtctatttcagcatacctatgtggtcatctccatgcaaaagttagtaagcagctttggaggtatcatgaaatcagaacaacagaagatcacaagtcaagcttttgggaatgggaacttggagactggaaggactccagattgatgaggattttagcaatagatggtggtgcagtctcattcatagaccacacattgaaacatgcactccaaacttccatcttgatcacatatccaacagattcaagaagtatgaatatgttggattcagaaaagtggtcgatgagaaatgatataaatgtccttattttctctcatcaatttataagtaatgtgagtgctagaatctttgactctcattgtgagtttaagattgtcgaggagatacctctgcagcttgttaccagtacttctgctcacagacctttgttccatgccaaatggaatgctgaaaattacagaagttcatccgccactcgctactggttgcaggtgtttgttcttgattctcatggtgtaaaaatttcaagtgagcagagaccattttcagttgagggtaagatggcaattcccacaagtccatggaccaactatctgctctttgaagtccagtgggaaggcatgtatcaagttcttctgtggagtaatttggccttcaccattgtattgttgttcatccccaaactattgtatcactttgttaggagaagttcatcatatcaaaggtgggctgtgtcaattccgtcctcctctatccagcagagaaaaccttacttttggttggtttggtttttaatggagggcacaaggagtaaacctttctggttttctatggtaacatatgtgctctggctaattgaaatgccatggttttggggccatgcaacgtctgaaaatggagaaatcgctcaaatgtacttatctggatggagcgtgccaattcatgatgggggcttgacgggcaacaaactgagcaacccagatgtgcttgtcatcacactaccgttcctctatctggtgcttgtcccagtaatagtccttacatatggtctgtttgcagaaaaggctactgtgtttttgcagcacagaagaagagtagtatactctcttgactcaacaaatgtgcatgccgagtcaccaagattgctgccagttgctccaagggcttcactaatgaaattcgccgacaagatggtgtccatggtgatccaattttgtggtagctggacaagaagggctcttctacttgcatgcttgatcaccgcagcaatacatttgaagctctgttccaaactaatgtcagcatatggaactgtaccagtagcattgtcacccccattgacatggataccattgttgctattaggtggtgctgcctattgtacagttctccatgcagattagcgctcagtactctgcaatcctgaagtgtagtacttatttgcattggaggattagggctcataactgtgaattcctgaagtgaacgtagttgcgtttcgggtgcgtgctgctgctgtgcattaaatcctggaactgtggaacatgtcacctttcgatggttaactgcatgggtgctggctaaccaaagataaagtagaaacagtttaatggttgagacttgagagtgcaaactgcagagtagaacatctggatggatggaccaaaactggtagcggtggctcgtcgttgtgtctaaccctcgccgcagcaagaggagatggaacagtggcttggacagagaggttgttgatcggatggctgtgaggggagtgatgggggtagggacgtagggtgagagggaaaccatggcggctaggtattttttgtgctgagtaggctgttgtgtttgtgtacaggggatattttcccaagtggaccactctattggtgtgtgggcctctcggccagaatttcggtctgcatggttattttcacgagtgggtcattttgttggtggagcgtattttggttagaaattctaacggcttcgggctagtttggtaat

SEQ ID NO: 81350 - DNA, 4027 bp, Zea Mays
ctgtgccttgcggaaggagcactcttcttccttagcagcagccagcgcccagcaggcaataccgtcactcggtcggctccttgccgattcccccacccccgcaagccgcggcgatggcctacgatctcccgttcactctcttcgtactcctcttcctcgtcctcctacagacgccgagctcctcatggcgaccggctgacgacgacgacgcgtcggtctcgaggtcggctttccccatggagggtgacgtcgcctgggtggtgcaggtcagcgacctccatatcagcacctacaaccctgagcgtgccgccgaactcgcgctcctcggcaccgcgctgcgcgcaatccggcctcaccttctcctcgtcaccggtgacatcaccggtgagccctgtgctctcatatgtctggatctgaaattttcggtgtcggattgcaacttgtattcaaacttgtcccgtgcccatggatatttatgagtcgatatttatttatttgaaatgctgtgcccatggattatattactacgaaaatactgggagcagtcagcatatcaagtacatggtggaaaattgacgagaagtacttcgaacaggccaaattggcatagcaccagaaacctactctatcggttaggcttgttcgttttgctcatgtgaattgggtgggattgagtcagatactcagatttaaatcatatcatgttttttttctaatctcacaaatccacatgggataggaataaccgaataaggccttgtatgttttgacttaccatgtgatataatttgaaacgaagagaatctaagactagtacaaaatataaactttgagatactcgaattatgactgctatggcttttaagatagctcagtagcccactccaattcgtttgctgcgaagttgtaatgaccatctaagggcctgtttggaataacccagttttaagaaactagtttataaaatctgaggtggttccaaacataccggtttatagaaattggattcctagtttcttaaaaccaagaagctagcctctcttagctaaaactagtttatgaaaactgagatagttccaaatactataaatcagttttttttacaaatcagtttctagaagttagagatacaaacttaaaaactaggttgcttctaaacagggcctaaaccattctgtttttatttggcatgcaaaccattactgttccatacaaggaatcaaggcaaggcatttgtacatcgaaacaaaatttcgttttgatgacaaatggaatattgaaaatgatgctgcattgttgtcatattgaaaagtatctctggataacactttctgtgtcccgacataagagaactttttggagcaccctgtccatgcaagtatggtagatagaaaggcgttgcaacaaaaataaggcaacatcataagcgcacacatgattattgtgatcgacctgtatcgttttccgtgtggttttatggacctttttattatatattttaacttcacgttttcattgtcatttcaataagatgctaagaatcagcaaagaactagttcaaggcaggatgaatacgaatggattacctacaagaaaactattgatgcaattgttggaagcggtggcattgataagagcaggatatttgatattagaggcaatcatgatacatatggagtgccttatagaggaggaaaattggacttcttctcaacttacagcgttaactcacagtttaagcgattaagcaccatcagtagtatattgcttcaggcactgtagggagatagaagctaccaatttctgggtattgatgataccatgaatgttggcattcgttttcctgcaaatctttttggccattctactgataaaaggatagaagcggtaaattcagagcttcaatactggaccaatcattccaatgttccagttaccaaagtagtttttggacatttccctatgtcattcactgcatcatctgaaaaaggacagcgatatgaaagtgtgcttgcagggcagtctatttcagcatacctatgtggtcatctccatgcaaaagttagtaagcagctttggaggtatcatgaaatcagaacaacagaagatcacaagtcaagcttttgggaatgggaacttggagactggaaggactccagattgatgaggattttagcaatagatggtggtgcagtctcattcatagaccacacattgaaacatgcactccaaacttccatcttgatcacatatccaacagattcaagaagtatgaatatgttggattcagaaaagtggtcgatgagaaatgatataaatgtccttattttctctcatcaatttataagtaatgtgagtgctagaatctttgactctcattgtgagtttaagattgtcgaggagatacctctgcagcttgttaccagtacttctgctcacagacctttgttccatgccaaatggaatgctgaaaattacagaagttcatccgccactcgctactggttgcaggtgtttgttcttgattctcatggtgtaaaaatttcaagtgagcagagaccattttcagttgagggtaagatggcaattcccacaagtccatggaccaactatctgctctttgaagtccagtgggaaggcatgtatcaagttcttctgtggagtaatttggccttcaccattgtattgttgttcatccccaaactattgtatcactttgttaggagaagttcatcatatcaaaggtgggctgtgtcaattccgtcctcctctatccagcagagaaaaccttacttttggttggtttggtttttaatggagggcacaaggagtaaacctttctggttttctatggtaacatatgtgctctggctaattgaaatgccatggttttggggccatgcaacgtctgaaaatggagaaatcgctcaaatgtacttatctggatggagcgtgccaattcatgatgggggcttgacgggcaacaaactgagcaacccagatgtgcttgtcatcacactaccgttcctctatctggtgcttgtcccagtaatagtccttacatatggtctgtttgcagaaaaggctactgtgtttttgcagcacagaagaagagtagtatactctcttgactcaacaaatgtgcatgccgagtcaccaagattgctgccagttgctccaagggcttcactaatgaaattcgccgacaagatggtgtccatggtgatccaattttgtggtagctggacaagaagggctcttctacttgcatgcttgatcaccgcagcaatacatttgaagctctgttccaaactaatgtcagcatatggaactgtaccagtagcattgtcacccccattgacatggataccattgttgctattaggtggtgctgcctattgtacagttctccatgcagattagcgctcagtactctgcaatcctgaagtgtagtacttatttgcattggaggattagggctcataactgtgaattcctgaagtgaacgtagttgcgtttcgggtgcgtgctgctgctgtgcattaaatcctggaactgtggaacatgtcacctttcgatggttaactgcatgggtgctggctaaccaaagataaagtagaaacagtttaatggttgagacttgagagtgcaaactgcagagtagaacatctggatggatggaccaaaactggtagcggtggctcgtcgttgtgtctaaccctcgccgcagcaagaggagatggaacagtggcttggacagagaggttgttgatcggatggctgtgaggggagtgatgggggtagggacgtagggtgagagggaaaccatggcggctaggtattttttgtgctgagtaggctgttgtgtttgtgtacaggggatattttcccaagtggaccactctattggtgtgtgggcctctcggccagaatttcggtctgcatggttattttcacgagtgggtcattttgttggtggagcgtattttggttagaaattctaacggcttcgggctagtttggtaat

SEQ ID NO: 81351 - DNA, 3321 bp, Zea Mays
agaaagtgcgggcgtgagggacgagcggacgagcctcagcggcgagagaaaatagaacggggagaccggagcggcggcgggggaggaggagacggaaggaggggatcgagaggggcgcgcgcgaacagaagagagaaagaggaggtggcaggtttggttccgcgcgcgccgacgtgagattccgggcccccgtgccagcaggttcaaataatggattaaaaacttaagctgacacttatggcggatgctcaattcaacccagtgaatccgaagctgacccatgaagaactaaaataagctttatgcttcagtgtcttctgaaatcatcctgaggtattgataagtcagcaacctagagcagaaaatgtcagctccggaattcaggacttcttaccagcaagtatcatcatcacagccccctgagaatgtcggtcaactcaaggtctgccgatgtgggtcgggagactctaactttcagatcactaataaatctgatgctggtgaaaattcaccgacaacttgtccaagctgtcaggttcttaagagtggaaatttattgctctcatctaaagggattggatggacagtatggaaaaaacggtggtttattcttacaaggacatcattagtgttcttcaggagcgatcctagtgtcccccctcccagaggaagtgaaccaattgttacacttggtggaattgacttgaataacagtgcaagtatgatagtcaaagaagaaaggaaagttataacagtcatctttcctgatggccgtgatggacgcacttttacccttaaggcagaaactatagaggacctaaatgaatggagaagtgcattggagaatgctctggctcaggcacccagtgttgcgaatacagcggggcaacatctggcagtcagcactgatataacagaacctgttgaagctgctgttgaacaattggaggataagtctgtaattggcagaccagcagaatttgcacttgtcgatgctgatggcactacagcattcctggagaaggccttaaagttcatcgaagactatggtgtcaaggttgaaggaattctccgtcagtctgctgatgttgaagaagtcaaacgcagggttcaggattacgaaaaggggaagaatgagttctccccagaagaggatgcacatgttatcggtgactgtattaagtgcattcttcgagagatgccatcttccccaattccggcaccatgttgcactgccctggttagagcttaccgaactgacaagacaagaagacttgatgctatgaatagagtgatatatgaagtattcccagaaccaaatcgtcaattgttacagaggattctcaaaatgatgcagattgttggatcacacaaagctgaaaataggatgtctccgtctgctttggcagcttgcatggcaccgcttcttcttcgtcctcttcttcttggtgaatgtgaaattgatagtgaattcaatatggctggggatggttcattccagttgcttcaagctgctgctgctgccaaccatgctcaagctattgttattattatgcttgaggaatatgatcagatatttgatgatattgaagacggttcgtactcttcagatgcttatactgagtctgacattgacaaggaatattcgacagacaatgacatccctgaagacgatggttcctatggttgtggtgaagatgttgaagaagatttaaatgatgatactgaacactcttctggcattaggattgataatgcagatgataaggttaataacaataaatcaagcactacatgtgatgacaatgataaagttgttcagcctcctgctgcaagggccatgagaatagaacatggtgtgcccatggatgacagtaatcaaatttcttctctttcaaaagtggatgatacctctaaaatgcagagcaacagttcattcacagatcatatacaaaaaccaaatgctgattcatcatatttgagtgcaaagtttacagagaaaactggcggctcaacttatgaaagcaaaaggaactcatgggggcgtacttcagcaagaaaaggcttgtcaacagaggaggctggctgttgcagtgataatgacgaggctcatattgcgaagcttgaaaacaagaagacccatctccaatctaaacttacggaggaggtaaaagaaaacacagtcctccaggcaaatttagaaaggcgaaaagcagcactacatgagcgtcgtgtagcacttgaaaaagaagtggaaaatttacgagaccagctgcagaaggagagaaatttgagggcttcattggagtctgggttaatgaatatgcgaagaggacaagtgtccttcccatcaacgatagacaccaagactaaagctgatcttgaggaagttgctgctgctgaagctgatattatgaacttgaagcaaaaggtttctgatcttcgggggcaactcaactaccaagtccagttgagttccacctcgttatgtgaatcatgcaacaagcgggcaataaatgcagacaagcttgtcgaaggtgaacaaaatgctggcctttctccacagattggctcctcagtcgaagcaccaccaattcaagggtctaattctgtagttcctgacatgttatgggctacaaaccaaatggttcagaagatgttgtattcaaagggtgagattgcaaaggacggccaagatggatcacttacatcaaaatggaactttgcacagagaccacactcaaatagtccagttatgagcagggttcaaggttccaatgcctattcaagtactaaaaacgaggaatctggagccgcaccgtcctctgcattagccaagctgactactcgactcaactttttgaaagaaagaagggccttgctcgccagtgagatgcaaaacttagatctgggtcgctcccaggcccagaggcacacggctcctccgaaaactgagactccgaccgacaagtagaatcgttttattgttaggctacacaagcccacaaaagcattctgccatcggggtgtgacaagtccagctgccacgatcgatgctcatgtaggatcgcaggcagtgaagaaaagttcgattggacaatggataggctacctacctatagagtaacttgatttgtaaattgcagaggtaatcgtgtcttcgccatgatgattcatatgtcaagttttgtagcgacaccgacgaccaacctggtttgtactattatctccaattacacaataccctgaatactctggaacaaaaagccaaatggcgcttgcaaataatctgtcggtctgtgtggtactctgatatgtaca

SEQ ID NO: 81352 - DNA, 3351 bp, Zea Mays
gagcggacgagcctcagcggcgagagaaaatagaacggggagaccggagcggcggcgggggaggaggagacggaaggaggggatcgagaggggcgcgcgcgaacagaagagagaaagaggaggtggcaggtttggttccgcgcgcgccgacgtgagattccgggcccccgtgccagcaggttcaaataatggattaaaaacttaagctgacacttatggcggatgctcaattcaacccagtgaatccgaagctgacccatgaagaactaaaataagctttatgcttcagtgtcttctgaaatcatcctgaggtattgataagtcagcaacctagagcagaaaatgtcagctccggaattcaggacttcttaccagcaagtatcatcatcacagccccctgagaatgtcggtcaactcaaggtctgccgatgtgggtcgggagactctaactttcagatcactaataaatctgatgctggtgaaaattcaccgacaacttgtccaagctgtcaggttcttaagagtggaaatttattgctctcatctaaagggattggatggacagtatggaaaaaacggtggtttattcttacaaggacatcattagtgttcttcaggagcgatcctagtgtcccccctcccagaggaagtgaaccaattgttacacttggtggaattgacttgaataacagtgcaagtatgatagtcaaagaagaaaggaaagttataacagtcatctttcctgatggccgtgatggacgcacttttacccttaagtgactactgactagtggggcaacaggtgcgtcagtaggattggggttgcaatgcagaaactatagaggacctaaatgaatggagaagtgcattggagaatgctctggctcaggcacccagtgttgcgaatacagcggggcaacatctggcagtcagcactgatataacagaacctgttgaagctgctgttgaacaattggaggataagtctgtaattggcagaccagcagaatttgcacttgtcgatgctgatggcactacagcattcctggagaaggccttaaagttcatcgaagactatggtgtcaaggttgaaggaattctccgtcagtctgctgatgttgaagaagtcaaacgcagggttcaggattacgaaaaggggaagaatgagttctccccagaagaggatgcacatgttatcggtgactgtattaagtgcattcttcgagagatgccatcttccccaattccggcaccatgttgcactgccctggttagagcttaccgaactgacaagacaagaagacttgatgctatgaatagagtgatatatgaagtattcccagaaccaaatcgtcaattgttacagaggattctcaaaatgatgcagattgttggatcacacaaagctgaaaataggatgtctccgtctgctttggcagcttgcatggcaccgcttcttcttcgtcctcttcttcttggtgaatgtgaaattgatagtgaattcaatatggctggggatggttcattccagttgcttcaagctgctgctgctgccaaccatgctcaagctattgttattattatgcttgaggaatatgatcagatatttgatgatattgaagacggttcgtactcttcagatgcttatactgagtctgacattgacaaggaatattcgacagacaatgacatccctgaagacgatggttcctatggttgtggtgaagatgttgaagaagatttaaatgatgatactgaacactcttctggcattaggattgataatgcagatgataaggttaataacaataaatcaagcactacatgtgatgacaatgataaagttgttcagcctcctgctgcaagggccatgagaatagaacatggtgtgcccatggatgacagtaatcaaatttcttctctttcaaaagtggatgatacctctaaaatgcagagcaacagttcattcacagatcatatacaaaaaccaaatgctgattcatcatatttgagtgcaaagtttacagagaaaactggcggctcaacttatgaaagcaaaaggaactcatgggggcgtacttcagcaagaaaaggcttgtcaacagaggaggctggctgttgcagtgataatgacgaggctcatattgcgaagcttgaaaacaagaagacccatctccaatctaaacttacggaggaggtaaaagaaaacacagtcctccaggcaaatttagaaaggcgaaaagcagcactacatgagcgtcgtgtagcacttgaaaaagaagtggaaaatttacgagaccagctgcagaaggagagaaatttgagggcttcattggagtctgggttaatgaatatgcgaagaggacaagtgtccttcccatcaacgatagacaccaagactaaagctgatcttgaggaagttgctgctgctgaagctgatattatgaacttgaagcaaaaggtttctgatcttcgggggcaactcaactaccaagtccagttgagttccacctcgttatgtgaatcatgcaacaagcgggcaataaatgcagacaagcttgtcgaaggtgaacaaaatgctggcctttctccacagattggctcctcagtcgaagcaccaccaattcaagggtctaattctgtagttcctgacatgttatgggctacaaaccaaatggttcagaagatgttgtattcaaagggtgagattgcaaaggacggccaagatggatcacttacatcaaaatggaactttgcacagagaccacactcaaatagtccagttatgagcagggttcaaggttccaatgcctattcaagtactaaaaacgaggaatctggagccgcaccgtcctctgcattagccaagctgactactcgactcaactttttgaaagaaagaagggccttgctcgccagtgagatgcaaaacttagatctgggtcgctcccaggcccagaggcacacggctcctccgaaaactgagactccgaccgacaagtagaatcgttttattgttaggctacacaagcccacaaaagcattctgccatcggggtgtgacaagtccagctgccacgatcgatgctcatgtaggatcgcaggcagtgaagaaaagttcgattggacaatggataggctacctacctatagagtaacttgatttgtaaattgcagaggtaatcgtgtcttcgccatgatgattcatatgtcaagttttgtagcgacaccgacgaccaacctggtttgtactattatctccaattacacaataccctgaatactctggaacaaaaagccaaatggcgcttgcaaataatctgtcggtctgtgtggtactctgatatgtaca

SEQ ID NO: 81353 - DNA, 3298 bp, Zea Mays
tcagcggcgagagaaaatagaacggggagaccggagcggcggcgggggaggaggagacggaaggaggggatcgagaggggcgcgcgcgaacagaagagagaaagaggaggtggcaggtttggttccgcgcgcgccgacgtgagattccgggcccccgtgccagcaggttcaaataatggattaaaaacttaagctgacacttatggcggatgctcaattcaacccagtgaatccgaagctgacccatgaagaactaaaataagctttatgcttcagtgtcttctgaaatcatcctgaggtattgataagtcagcaacctagagcagaaaatgtcagctccggaattcaggacttcttaccagcaagtatcatcatcacagccccctgagaatgtcggtcaactcaaggtctgccgatgtgggtcgggagactctaactttcagatcactaataaatctgatgctggtgaaaattcaccgacaacttgtccaagctgtcaggttcttaagagtggaaatttattgctctcatctaaagggattggatggacagtatggaaaaaacggtggtttattcttacaaggacatcattagtgttcttcaggagcgatcctagtgtcccccctcccagaggaagtgaaccaattgttacacttggtggaattgacttgaataacagtgcaagtatgatagtcaaagaagaaaggaaagttataacagtcatctttcctgatggccgtgatggacgcacttttacccttaaggcagaaactatagaggacctaaatgaatggagaagtgcattggagaatgctctggctcaggcacccagtgttgcgaatacagcggggcaacatctggcagtcagcactgatataacagaacctgttgaagctgctgttgaacaattggaggataagtctgtaattggcagaccagcagaatttgcacttgtcgatgctgatggcactacagcattcctggagaaggccttaaagttcatcgaagactatggtgtcaaggttgaaggaattctccgtcagtctgctgatgttgaagaagtcaaacgcagggttcaggattacgaaaaggggaagaatgagttctccccagaagaggatgcacatgttatcggtgactgtattaagtgcattcttcgagagatgccatcttccccaattccggcaccatgttgcactgccctggttagagcttaccgaactgacaagacaagaagacttgatgctatgaatagagtgatatatgaagtattcccagaaccaaatcgtcaattgttacagaggattctcaaaatgatgcagattgttggatcacacaaagctgaaaataggatgtctccgtctgctttggcagcttgcatggcaccgcttcttcttcgtcctcttcttcttggtgaatgtgaaattgatagtgaattcaatatggctggggatggttcattccagttgcttcaagctgctgctgctgccaaccatgctcaagctattgttattattatgcttgaggaatatgatcagatatttgatgatattgaagacggttcgtactcttcagatgcttatactgagtctgacattgacaaggaatattcgacagacaatgacatccctgaagacgatggttcctatggttgtggtgaagatgttgaagaagatttaaatgatgatactgaacactcttctggcattaggattgataatgcagatgataaggttaataacaataaatcaagcactacatgtgatgacaatgataaagttgttcagcctcctgctgcaagggccatgagaatagaacatggtgtgcccatggatgacagtaatcaaatttcttctctttcaaaagtggatgatacctctaaaatgcagagcaacagttcattcacagatcatatacaaaaaccaaatgctgattcatcatatttgagtgcaaagtttacagagaaaactggcggctcaacttatgaaagcaaaaggaactcatgggggcgtacttcagcaagaaaaggcttgtcaacagaggaggctggctgttgcagtgataatgacgacttctgaactagggctcatattgcgaagcttgaaaacaagaagacccatctccaatctaaacttacggaggaggtaaaagaaaacacagtcctccaggcaaatttagaaaggcgaaaagcagcactacatgagcgtcgtgtagcacttgaaaaagaagtggaaaatttacgagaccagctgcagaaggagagaaatttgagggcttcattggagtctgggttaatgaatatgcgaagaggacaagtgtccttcccatcaacgatagacaccaagactaaagctgatcttgaggaagttgctgctgctgaagctgatattatgaacttgaagcaaaaggtttctgatcttcgggggcaactcaactaccaagtccagttgagttccacctcgttatgtgaatcatgcaacaagcgggcaataaatgcagacaagcttgtcgaaggtgaacaaaatgctggcctttctccacagattggctcctcagtcgaagcaccaccaattcaagggtctaattctgtagttcctgacatgttatgggctacaaaccaaatggttcagaagatgttgtattcaaagggtgagattgcaaaggacggccaagatggatcacttacatcaaaatggaactttgcacagagaccacactcaaatagtccagttatgagcagggttcaaggttccaatgcctattcaagtactaaaaacgaggaatctggagccgcaccgtcctctgcattagccaagctgactactcgactcaactttttgaaagaaagaagggccttgctcgccagtgagatgcaaaacttagatctgggtcgctcccaggcccagaggcacacggctcctccgaaaactgagactccgaccgacaagtagaatcgttttattgttaggctacacaagcccacaaaagcattctgccatcggggtgtgacaagtccagctgccacgatcgatgctcatgtaggatcgcaggcagtgaagaaaagttcgattggacaatggataggctacctacctatagagtaacttgatttgtaaattgcagaggtaatcgtgtcttcgccatgatgattcatatgtcaagttttgtagcgacaccgacgaccaacctggtttgtactattatctccaattacacaataccctgaatactctggaacaaaaagccaaatggcgcttgcaaataatctgtcggtctgtgtggtactctgatatgtaca

SEQ ID NO: 81354 - DNA, 518 bp, Zea Mays
gagaaaatagaacggggagaccggagcggcggcgggggaggaggagacggaaggaggggatcgagaggggcgcgcgcgaacagaagagagaaagaggaggtggcaggtttggttccgcgcgcgccgacgtgagattccgggcccccgtgccagcaggttcaaataatggattaaaaacttaagctgacacttatggcggatgctcaattcaacccagtgaatccgaagctgacccatgaagaactaaaataagctttatgcttcagtgtcttctgaaatcatcctgaggtattgataagtcagcaacctagagcagaaaatgtcagctccggaattcaggacttcttaccagcaagtatcatcatcacagccccctgagaatgtcggtcaactcaaggtctgccgatgtgggtcgggagactctaactttcagatcactaataaatctgatgctggtgaaaattcaccgacaacttgtccaagctgtcagacatacgggttgctgatgtcaatattgc

SEQ ID NO: 81355 - DNA, 3054 bp, Zea Mays
gagaaaatagaacggggagaccggagcggcggcgggggaggaggagacggaaggaggggatcgagaggggcgcgcgcgaacagaagagagaaagaggaggtggcaggtttggttccgcgcgcgccgacgtgagattccgggcccccgtgccagcaggttcaaataatggattaaaaacttaagctgacacttatggcggatgctcaattcaacccagtgaatccgaagctgacccatgaagaactaaaataagctttatgcttcagtgtcttctgaaatcatcctgaggtattgataagtcagcaacctagagcagaaaatgtcagctccggaattcaggacttcttaccagcaagtatcatcatcacagccccctgagaatgtcggtcaactcaaggtctgccgatgtgggtcgggagactctaactttcagatcactaataaatctgatgctggtgaaaattcaccgacaacttgtccaagctgtcaggttcttaagagtggaaatttattgctctcatctaaagggattggatggacagtatggaaaaaacggtggtttattcttacaaggacatcattagtgttcttcaggagcgatcctagtgtcccccctcccagaggaagtgaaccaattgttacacttggtggaattgacttgaataacagtgcaagtatgatagtcaaagaagaaaggaaagttataacagtcatctttcctgatggccgtgatggacgcacttttacccttaaggcagaaactatagaggacctaaatgaatggagaagtgcattggagaatgctctggctcaggcacccagtgttgcgaatacagcggggcaacatctggcagtcagcactgatataacagaacctgttgaagctgctgttgaacaattggaggataagtctgtaattggcagaccagcagaatttgcacttgtcgatgctgatggcactacagcattcctggagaaggccttaaagttcatcgaagactatggtgtcaaggttgaaggaattctccgtcagtctgctgatgttgaagaagtcaaacgcagggttcaggattacgaaaaggggaagaatgagttctccccagaagaggatgcacatgttatcggtgactgtattaagtgcattcttcgagagatgccatcttccccaattccggcaccatgttgcactgccctggttagagcttaccgaactgacaagacaagaagacttgatgctatgaatagagtgatatatgaagtattcccagaaccaaatcgtcaattgttacagaggattctcaaaatgatgcagattgttggatcacacaaagctgaaaataggatgtctccgtctgctttggcagcttgcatggcaccgcttcttcttcgtcctcttcttcttggtgaatgtgaaattgatagtgaattcaatatggctggggatggttcattccagttgcttcaagctgctgctgctgccaaccatgctcaagctattgttattattatgcttgaggaatatgatcagatatttgatgatattgaagacggttcgtactcttcagatgcttatactgagtctgacattgacaaggaatattcgacagacaatgacatccctgaagacgatggttcctatggttgtggtgaagatgttgaagaagatttaaatgatgatactgaacactcttctggcattaggattgataatgcagatgataagtttacagagaaaactggcggctcaacttatgaaagcaaaaggaactcatgggggcgtacttcagcaagaaaaggcttgtcaacagaggaggctggctgttgcagtgataatgacgaggctcatattgcgaagcttgaaaacaagaagacccatctccaatctaaacttacggaggaggtaaaagaaaacacagtcctccaggcaaatttagaaaggcgaaaagcagcactacatgagcgtcgtgtagcacttgaaaaagaagtggaaaatttacgagaccagctgcagaaggagagaaatttgagggcttcattggagtctgggttaatgaatatgcgaagaggacaagtgtccttcccatcaacgatagacaccaagactaaagctgatcttgaggaagttgctgctgctgaagctgatattatgaacttgaagcaaaaggtttctgatcttcgggggcaactcaactaccaagtccagttgagttccacctcgttatgtgaatcatgcaacaagcgggcaataaatgcagacaagcttgtcgaaggtgaacaaaatgctggcctttctccacagattggctcctcagtcgaagcaccaccaattcaagggtctaattctgtagttcctgacatgttatgggctacaaaccaaatggttcagaagatgttgtattcaaagggtgagattgcaaaggacggccaagatggatcacttacatcaaaatggaactttgcacagagaccacactcaaatagtccagttatgagcagggttcaaggttccaatgcctattcaagtactaaaaacgaggaatctggagccgcaccgtcctctgcattagccaagctgactactcgactcaactttttgaaagaaagaagggccttgctcgccagtgagatgcaaaacttagatctgggtcgctcccaggcccagaggcacacggctcctccgaaaactgagactccgaccgacaagtagaatcgttttattgttaggctacacaagcccacaaaagcattctgccatcggggtgtgacaagtccagctgccacgatcgatgctcatgtaggatcgcaggcagtgaagaaaagttcgattggacaatggataggctacctacctatagagtaacttgatttgtaaattgcagaggtaatcgtgtcttcgccatgatgattcatatgtcaagttttgtagcgacaccgacgaccaacctggtttgtactattatctccaattacacaataccctgaatactctggaacaaaaagccaaatggcgcttgcaaataatctgtcggtctgtgtggtactctgatatgtaca

SEQ ID NO: 81356 - DNA, 3037 bp, Zea Mays
gagaaaatagaacggggagaccggagcggcggcgggggaggaggagacggaaggaggggatcgagaggggcgcgcgcgaacagaagagagaaagaggaggtggcaggtttggttccgcgcgcgccgacgtgagattccgggcccccgtgccagcaggttcaaataatggattaaaaacttaagctgacacttatggcggatgctcaattcaacccagtgaatccgaagctgacccatgaagaactaaaataagctttatgcttcagtgtcttctgaaatcatcctgaggtattgataagtcagcaacctagagcagaaaatgtcagctccggaattcaggacttcttaccagcaagtatcatcatcacagccccctgagaatgtcggtcaactcaaggtctgccgatgtgggtcgggagactctaactttcagatcactaataaatctgatgctggtgaaaattcaccgacaacttgtccaagctgtcaggttcttaagagtggaaatttattgctctcatctaaagggattggatggacagtatggaaaaaacggtggtttattcttacaaggacatcattagtgttcttcaggagcgatcctagtgtcccccctcccagaggaagtgaaccaattgttacacttggtggaattgacttgaataacagtgcaagtatgatagtcaaagaagaaaggaaagttataacagtcatctttcctgatggccgtgatggacgcacttttacccttaaggcagaaactatagaggacctaaatgaatggagaagtgcattggagaatgctctggctcaggcacccagtgttgcgaatacagcggggcaacatctggcagtcagcactgatataacagaacctgttgaagctgctgttgaacaattgcattcttcgagagatgccatcttccccaattccggcaccatgttgcactgccctggttagagcttaccgaactgacaagacaagaagacttgatgctatgaatagagtgatatatgaagtattcccagaaccaaatcgtcaattgttacagaggattctcaaaatgatgcagattgttggatcacacaaagctgaaaataggatgtctccgtctgctttggcagcttgcatggcaccgcttcttcttcgtcctcttcttcttggtgaatgtgaaattgatagtgaattcaatatggctggggatggttcattccagttgcttcaagctgctgctgctgccaaccatgctcaagctattgttattattatgcttgaggaatatgatcagatatttgatgatattgaagacggttcgtactcttcagatgcttatactgagtctgacattgacaaggaatattcgacagacaatgacatccctgaagacgatggttcctatggttgtggtgaagatgttgaagaagatttaaatgatgatactgaacactcttctggcattaggattgataatgcagatgataaggttaataacaataaatcaagcactacatgtgatgacaatgataaagttgttcagcctcctgctgcaagggccatgagaatagaacatggtgtgcccatggatgacagtaatcaaatttcttctctttcaaaagtggatgatacctctaaaatgcagagcaacagttcattcacagatcatatacaaaaaccaaatgctgattcatcatatttgagtgcaaagtttacagagaaaactggcggctcaacttatgaaagcaaaaggaactcatgggggcgtacttcagcaagaaaaggcttgtcaacagaggaggctggctgttgcagtgataatgacgaggctcatattgcgaagcttgaaaacaagaagacccatctccaatctaaacttacggaggaggtaaaagaaaacacagtcctccaggcaaatttagaaaggcgaaaagcagcactacatgagcgtcgtgtagcacttgaaaaagaagtggaaaatttacgagaccagctgcagaaggagagaaatttgagggcttcattggagtctgggttaatgaatatgcgaagaggacaagtgtccttcccatcaacgatagacaccaagactaaagctgatcttgaggaagttgctgctgctgaagctgatattatgaacttgaagcaaaaggtttctgatcttcgggggcaactcaactaccaagtccagttgagttccacctcgttatgtgaatcatgcaacaagcgggcaataaatgcagacaagcttgtcgaaggtgaacaaaatgctggcctttctccacagattggctcctcagtcgaagcaccaccaattcaagggtctaattctgtagttcctgacatgttatgggctacaaaccaaatggttcagaagatgttgtattcaaagggtgagattgcaaaggacggccaagatggatcacttacatcaaaatggaactttgcacagagaccacactcaaatagtccagttatgagcagggttcaaggttccaatgcctattcaagtactaaaaacgaggaatctggagccgcaccgtcctctgcattagccaagctgactactcgactcaactttttgaaagaaagaagggccttgctcgccagtgagatgcaaaacttagatctgggtcgctcccaggcccagaggcacacggctcctccgaaaactgagactccgaccgacaagtagaatcgttttattgttaggctacacaagcccacaaaagcattctgccatcggggtgtgacaagtccagctgccacgatcgatgctcatgtaggatcgcaggcagtgaagaaaagttcgattggacaatggataggctacctacctatagagtaacttgatttgtaaattgcagaggtaatcgtgtcttcgccatgatgattcatatgtcaagttttgtagcgacaccgacgaccaacctggtttgtactattatctccaattacacaataccctgaatactctggaacaaaaagccaaatggcgcttgcaaataatctgtcggtctgtgtggtactctgatatgtaca

SEQ ID NO: 81357 - DNA, 3272 bp, Zea Mays
gagaaaatagaacggggagaccggagcggcggcgggggaggaggagacggaaggaggggatcgagaggggcgcgcgcgaacagaagagagaaagaggaggtggcaggtttggttccgcgcgcgccgacgtgagattccgggcccccgtgccagcaggttcaaataatggattaaaaacttaagctgacacttatggcggatgctcaattcaacccagtgaatccgaagctgacccatgaagaactaaaataagctttatgcttcagtgtcttctgaaatcatcctgaggtattgataagtcagcaacctagagcagaaaatgtcagctccggaattcaggacttcttaccagcaagtatcatcatcacagccccctgagaatgtcggtcaactcaaggtctgccgatgtgggtcgggagactctaactttcagatcactaataaatctgatgctggtgaaaattcaccgacaacttgtccaagctgtcaggttcttaagagtggaaatttattgctctcatctaaagggattggatggacagtatggaaaaaacggtggtttattcttacaaggacatcattagtgttcttcaggagcgatcctagtgtcccccctcccagaggaagtgaaccaattgttacacttggtggaattgacttgaataacagtgcaagtatgatagtcaaagaagaaaggaaagttataacagtcatctttcctgatggccgtgatggacgcacttttacccttaaggcagaaactatagaggacctaaatgaatggagaagtgcattggagaatgctctggctcaggcacccagtgttgcgaatacagcggggcaacatctggcagtcagcactgatataacagaacctgttgaagctgctgttgaacaatgtaagctattggaggataagtctgtaattggcagaccagcagaatttgcacttgtcgatgctgatggcactacagcattcctggagaaggccttaaagttcatcgaagactatggtgtcaaggttgaaggaattctccgtcagtctgctgatgttgaagaagtcaaacgcagggttcaggattacgaaaaggggaagaatgagttctccccagaagaggatgcacatgttatcggtgactgtattaagtgcattcttcgagagatgccatcttccccaattccggcaccatgttgcactgccctggaactgacaagacaagaagacttgatgctatgaatagagtgatatatgaagtattcccagaaccaaatcgtcaattgttacagaggattctcaaaatgatgcagattgttggatcacacaaagctgaaaataggatgtctccgtctgctttggcagcttgcatggcaccgcttcttcttcgtcctcttcttcttggtgaatgtgaaattgatagtgaattcaatatggctggggatggttcattccagttgcttcaagctgctgctgctgccaaccatgctcaagctattgttattattatgcttgaggaatatgatcagatatttgatgatattgaagacggttcgtactcttcagatgcttatactgagtctgacattgacaaggaatattcgacagacaatgacatccctgaagacgatggttcctatggttgtggtgaagatgttgaagaagatttaaatgatgatactgaacactcttctggcattaggattgataatgcagatgataaggttaataacaataaatcaagcactacatgtgatgacaatgataaagttgttcagcctcctgctgcaagggccatgagaatagaacatggtgtgcccatggatgacagtaatcaaatttcttctctttcaaaagtggatgatacctctaaaatgcagagcaacagttcattcacagatcatatacaaaaaccaaatgctgattcatcatatttgagtgcaaagtttacagagaaaactggcggctcaacttatgaaagcaaaaggaactcatgggggcgtacttcagcaagaaaaggcttgtcaacagaggaggctggctgttgcagtgataatgacgaggctcatattgcgaagcttgaaaacaagaagacccatctccaatctaaacttacggaggaggtaaaagaaaacacagtcctccaggcaaatttagaaaggcgaaaagcagcactacatgagcgtcgtgtagcacttgaaaaagaagtggaaaatttacgagaccagctgcagaaggagagaaatttgagggcttcattggagtctgggttaatgaatatgcgaagaggacaagtgtccttcccatcaacgatagacaccaagactaaagctgatcttgaggaagttgctgctgctgaagctgatattatgaacttgaagcaaaaggtttctgatcttcgggggcaactcaactaccaagtccagttgagttccacctcgttatgtgaatcatgcaacaagcgggcaataaatgcagacaagcttgtcgaaggtgaacaaaatgctggcctttctccacagattggctcctcagtcgaagcaccaccaattcaagggtctaattctgtagttcctgacatgttatgggctacaaaccaaatggttcagaagatgttgtattcaaagggtgagattgcaaaggacggccaagatggatcacttacatcaaaatggaactttgcacagagaccacactcaaatagtccagttatgagcagggttcaaggttccaatgcctattcaagtactaaaaacgaggaatctggagccgcaccgtcctctgcattagccaagctgactactcgactcaactttttgaaagaaagaagggccttgctcgccagtgagatgcaaaacttagatctgggtcgctcccaggcccagaggcacacggctcctccgaaaactgagactccgaccgacaagtagaatcgttttattgttaggctacacaagcccacaaaagcattctgccatcggggtgtgacaagtccagctgccacgatcgatgctcatgtaggatcgcaggcagtgaagaaaagttcgattggacaatggataggctacctacctatagagtaacttgatttgtaaattgcagaggtaatcgtgtcttcgccatgatgattcatatgtcaagttttgtagcgacaccgacgaccaacctggtttgtactattatctccaattacacaataccctgaatactctggaacaaaaagccaaatggcgcttgcaaataatctgtcggtctgtgtggtactctgatatgtaca

SEQ ID NO: 81358 - DNA, 2138 bp, Zea Mays
cacaatcttgattttcagtttcagcatcctgcacaatcttgattttcgttgcttagctgcttttcatggggaactgacaagacaagaagacttgatgctatgaatagagtgatatatgaagtattcccagaaccaaatcgtcaattgttacagaggattctcaaaatgatgcagattgttggatcacacaaagctgaaaataggatgtctccgtctgctttggcagcttgcatggcaccgcttcttcttcgtcctcttcttcttggtgaatgtgaaattgatagtgaattcaatatggctggggatggttcattccagttgcttcaagctgctgctgctgccaaccatgctcaagctattgttattattatgcttgaggaatatgatcagatatttgatgatattgaagacggttcgtactcttcagatgcttatactgagtctgacattgacaaggaatattcgacagacaatgacatccctgaagacgatggttcctatggttgtggtgaagatgttgaagaagatttaaatgatgatactgaacactcttctggcattaggattgataatgcagatgataaggttaataacaataaatcaagcactacatgtgatgacaatgataaagttgttcagcctcctgctgcaagggccatgagaatagaacatggtgtgcccatggatgacagtaatcaaatttcttctctttcaaaagtggatgatacctctaaaatgcagagcaacagttcattcacagatcatatacaaaaaccaaatgctgattcatcatatttgagtgcaaagtttacagagaaaactggcggctcaacttatgaaagcaaaaggaactcatgggggcgtacttcagcaagaaaaggcttgtcaacagaggaggctggctgttgcagtgataatgacgaggctcatattgcgaagcttgaaaacaagaagacccatctccaatctaaacttacggaggaggtaaaagaaaacacagtcctccaggcaaatttagaaaggcgaaaagcagcactacatgagcgtcgtgtagcacttgaaaaagaagtggaaaatttacgagaccagctgcagaaggagagaaatttgagggcttcattggagtctgggttaatgaatatgcgaagaggacaagtgtccttcccatcaacgatagacaccaagactaaagctgatcttgaggaagttgctgctgctgaagctgatattatgaacttgaagcaaaaggtttctgatcttcgggggcaactcaactaccaagtccagttgagttccacctcgttatgtgaatcatgcaacaagcgggcaataaatgcagacaagcttgtcgaaggtgaacaaaatgctggcctttctccacagattggctcctcagtcgaagcaccaccaattcaagggtctaattctgtagttcctgacatgttatgggctacaaaccaaatggttcagaagatgttgtattcaaagggtgagattgcaaaggacggccaagatggatcacttacatcaaaatggaactttgcacagagaccacactcaaatagtccagttatgagcagggttcaaggttccaatgcctattcaagtactaaaaacgaggaatctggagccgcaccgtcctctgcattagccaagctgactactcgactcaactttttgaaagaaagaagggccttgctcgccagtgagatgcaaaacttagatctgggtcgctcccaggcccagaggcacacggctcctccgaaaactgagactccgaccgacaagtagaatcgttttattgttaggctacacaagcccacaaaagcattctgccatcggggtgtgacaagtccagctgccacgatcgatgctcatgtaggatcgcaggcagtgaagaaaagttcgattggacaatggataggctacctacctatagagtaacttgatttgtaaattgcagaggtaatcgtgtcttcgccatgatgattcatatgtcaagttttgtagcgacaccgacgaccaacctggtttgtactattatctccaattacacaataccctgaatactctggaacaaaaagccaaatggcgcttgcaaataatctgtcggtctgtgtggtactctgatatgtaca

SEQ ID NO: 81359 - DNA, 2484 bp, Zea Mays
gccccacaccgcttcactcgtttccttccgatccatacacaccgcgcacgtacgcgtactccatcgtcccggtgcaggcgggttcacgtcacgacctcgggcgagacgagatggcgacgccgaacgggcttgctcggatcgagacgaacggggcgaccaagcccgacaacggcgtgtgccacgacgacagctcggcgccggtgcgcgcgcagaccatcgacgagctgcactcgctgcagcggaagcggtcggcgccaaccacgcccatcaaggacggcgccgcctcgaccttcgccgccgcgctctccgaggaggagcgccacaggcagcagctgcagtccatcagcgcgtcgttggcgtctctgacacgtgaaaccgggccgaaagtggtcaagggcgacccggcccggaggggcgaggcccccgcgacgggtgcaccgccgacgccgcaggcgcaccaccagcaccaccaccccgccgcccccaccatcgccgtcagcgacagctccctcaagttcacccatgtcctctacaacctctcgcctgctgagctgtacgagcaggccatcaagtacgagaaggggtcgttcatcacgtccaccggcgcgctggcgacgctgtccggcgccaagaccgggcggtcgcccagggacaagcgcgtcgtcaaggacgaggtcgcggcgcgggacctgtggtggggcaagggctcgcccaacatcgagatggacgagcacacgttcctgaccaacagggagagggccgtggactacctcaactccctggacaaggtgttcgtgaacgaccagtttctcaactgggaccccgagaaccggatcaaggtccgcatcatctccgccagggcgtaccactccctcttcatgcacaacatgtgcatccggcccacggacgaggagctggagagcttcggcacgccggacttcaccatctacaacgccggccagttcccctgtaaccgctacacgcactacatgacgtcgtccaccagcgtagacatcaacctcgccaggagggagatggtgatcctgggcacgcagtacgccggcgagatgaagaaggggctgttcggcgtcatgcactacctcatgcccaagcgcggcatcctctcgctgcactccggctgcaatatgggcaaggacggcgacgtcgccctcttctttggcctctcaggtaccgggaagacgacgctgtcgacggatcacaacaggcttctgatcggcgacgacgagcactgctggagcgagaatggcgtgtccaacatcgagggcggctgctatgccaagtgcatagacctatcgcaggagaaagagcctgatatctggaacgccatcaagttcggagccgtgctggagaacgttgtcttcgatgagcatactcgtgaagttgactacaccgacaaatctgtcaccggcatcacacaccgaaaaaaaaaaccattcttgcatcgtagagaacactcgggctgcctacccgatcgagtacatccccaacgccaagataccatgcgtcggtccacaccccaagaacgtgatcctgctggcgtgcgacgccttcggcgtgctcccgccggtgagcaagctggacctggcgcagaccatgtaccacttcatcagcggatacaccgccctggtcgccggcacggaggacggcatcaaggagccacaggccaccttctccgcctgcttcggcgcggccttcatcatgctccacccgaccaagtacgccgccatgctcgccgagaagatgcagaagtacggcgccacagggtggctcgtcaacaccggctggtctggcggcaggtacggtgtgggcaagaggatccggcttccctacaccaggaagatcatcgacgccatccactccggcgagcttctcaccgccaactaccagaagaccgaggtctttggcctggagatcccgactgagatcaagggcgtgccgtcggaaatcctcgacccaatcaacacctggacggacaaggccgcgtacaaggagacgctcctgaggcttgccgggctcttcaagaagaacttcgaggtgttcgccagctacaagatcggggacgacagcaacctgaccgacgagatcctcgccgcaggccccaacttctgaactaaagcagtgggtccggatgaataaaacggtggtatgcgtgtgaagaagaagatgatgacgacgaaaatagtgtgttggatcgatgggccagcacagtgtagactagcttttgtatattatctcgggttggaaatctggtgttgttacctaaaatgttggtctgttctatcggcttgttgaaaacagtttgcgcgtgcttgcatcttggcccccctgtattctctgtggtttcagaatttgaacacgaaacagcttggtctcgggatcatgttggtttcatatgtcattgcagtatcgcaccgacacgacacataccaattgattttgcctggaactgccatattttgtggc

SEQ ID NO: 81360 - DNA, 1804 bp, Zea Mays
gccccacaccgcttcactcgtttccttccgatccatacacaccgcgcacgtacgcgtactccatcgtcccggtgcaggcgggttcacgtcacgacctcgggcgagacgagatggcgacgccgaacgggcttgctcggatcgagacgaacggggcgaccaagcccgacaacggcgtgtgccacgacgacagctcggcgccggtgcgcgcgcagaccatcgacgagctgcactcgctgcagcggaagcggtcggcgccaaccacgcccatcaaggacggcgccgcctcgaccttcgccgccgcgctctccgaggaggagcgccacaggcagcagctgcagtccatcagcgcgtcgttggcgtctctgacacgtgaaaccgggccgaaagtggtcaagggcgacccggcccggaggggcgaggcccccgcgacgggtgcaccgccgacgccgcaggcgcaccaccagcaccaccaccccgccgcccccaccatcgccgtcagcgacagctccctcaagttcacccatgtcctctacaacctctcgcctgctggtaccgggaagacgacgctgtcgacggatcacaacaggcttctgatcggcgacgacgagcactgctggagcgagaatggcgtgtccaacatcgagggcggctgctatgccaagtgcatagacctatcgcaggagaaagagcctgatatctggaacgccatcaagttcggagccgtgctggagaacgttgtcttcgatgagcatactcgtgaagttgactacaccgacaaatctgtcaccggaacactcgggctgcctacccgatcgagtacatccccaacgccaagataccatgcgtcggtccacaccccaagaacgtgatcctgctggcgtgcgacgccttcggcgtgctcccgccggtgagcaagctggacctggcgcagaccatgtaccacttcatcagcggatacaccgccctggtcgccggcacggaggacggcatcaaggagccacaggccaccttctccgcctgcttcggcgcggccttcatcatgctccacccgaccaagtacgccgccatgctcgccgagaagatgcagaagtacggcgccacagggtggctcgtcaacaccggctggtctggcggcaggtacggtgtgggcaagaggatccggcttccctacaccaggaagatcatcgacgccatccactccggcgagcttctcaccgccaactaccagaagaccgaggtctttggcctggagatcccgactgagatcaagggcgtgccgtcggaaatcctcgacccaatcaacacctggacggacaaggccgcgtacaaggagacgctcctgaggcttgccgggctcttcaagaagaacttcgaggtgttcgccagctacaagatcggggacgacagcaacctgaccgacgagatcctcgccgcaggccccaacttctgaactaaagcagtgggtccggatgaataaaacggtggtatgcgtgtgaagaagaagatgatgacgacgaaaatagtgtgttggatcgatgggccagcacagtgtagactagcttttgtatattatctcgggttggaaatctggtgttgttacctaaaatgttggtctgttctatcggcttgttgaaaacagtttgcgcgtgcttgcatcttggcccccctgtattctctgtggtttcagaatttgaacacgaaacagcttggtctcgggatcatgttggtttcatatgtcattgcagtatcgcaccgacacgacacataccaattgattttgcctggaactgccatattttgtggc

SEQ ID NO: 81361 - DNA, 2538 bp, Zea Mays
gccccacaccgcttcactcgtttccttccgatccatacacaccgcgcacgtacgcgtactccatcgtcccgcgggttcacgtcacgacctcgggcgagacgagatggcgacgccgaacgggcttgctcggatcgagacgaacggggcgaccaagcccgacaacggcgtgtgccacgacgacagctcggcgccggtgcgcgcgcagaccatcgacgagctgcactcgctgcagcggaagcggtcggcgccaaccacgcccatcaaggacggcgccgcctcgaccttcgccgccgcgctctccgaggaggagcgccacaggcagcagctgcagtccatcagcgcgtcgttggcgtctctgacacgtgaaaccgggccgaaagtggtcaagggcgacccggcccggaggggcgaggcccccgcgacgggtgcaccgccgacgccgcaggcgcaccaccagcaccaccaccccgccgcccccaccatcgccgtcagcgacagctccctcaagttcacccatgtcctctacaacctctcgcctgctgagctgtacgagcaggccatcaagtacgagaaggggtcgttcatcacgtccaccggcgcgctggcgacgctgtccggcgccaagaccgggcggtcgcccagggacaagcgcgtcgtcaaggacgaggtcgcggcgcgggacctgtggtggggcaagggctcgcccaacatcgagatggacgagcacacgttcctgaccaacagggagagggccgtggactacctcaactccctggacaaggtgttcgtgaacgaccagtttctcaactgggaccccgagaaccggatcaaggtccgcatcatctccgccagggcgtaccactccctcttcatgcacaacatgtgcatccggcccacggacgaggagctggagagcttcggcacgccggacttcaccatctacaacgccggccagttcccctgtaaccgctacacgcactacatgacgtcgtccaccagcgtagacatcaacctcgccaggagggagatggtgatcctgggcacgcagtacgccggcgagatgaagaaggggctgttcggcgtcatgcactacctcatgcccaagcgcggcatcctctcgctgcactccggctgcaatatgggcaaggacggcgacgtcgccctcttctttggcctctcaggtaccgggaagacgacgctgtcgacggatcacaacaggcttctgatcggcgacgacgagcactgctggagcgagaatggcgtgtccaacatcgagggcggctgctatgccaagtgcatagacctatcgcaggagaaagagcctgatatctggaacgccatcaagttcggagccgtgctggagaacgttgtcttcgatgagcatactcgtgaagttgactacaccgacaaatctgtcaccggtaagtaataaatgtcatggtctccgtacacaacagactcaaattttcgagtcacacacaggcatcacacaccgaaaaaaaaaaccattcttgcatcgtagagaacactcgggctgcctacccgatcgagtacatccccaacgccaagataccatgcgtcggtccacaccccaagaacgtgatcctgctggcgtgcgacgccttcggcgtgctcccgccggtgagcaagctggacctggcgcagaccatgtaccacttcatcagcggatacaccgccctggtcgccggcacggaggacggcatcaaggagccacaggccaccttctccgcctgcttcggcgcggccttcatcatgctccacccgaccaagtacgccgccatgctcgccgagaagatgcagaagtacggcgccacagggtggctcgtcaacaccggctggtctggcggcaggtacggtgtgggcaagaggatccggcttccctacaccaggaagatcatcgacgccatccactccggcgagcttctcaccgccaactaccagaagaccgaggtctttggcctggagatcccgactgagatcaagggcgtgccgtcggaaatcctcgacccaatcaacacctggacggacaaggccgcgtacaaggagacgctcctgaggcttgccgggctcttcaagaagaacttcgaggtgttcgccagctacaagatcggggacgacagcaacctgaccgacgagatcctcgccgcaggccccaacttctgaactaaagcagtgggtccggatgaataaaacggtggtatgcgtgtgaagaagaagatgatgacgacgaaaatagtgtgttggatcgatgggccagcacagtgtagactagcttttgtatattatctcgggttggaaatctggtgttgttacctaaaatgttggtctgttctatcggcttgttgaaaacagtttgcgcgtgcttgcatcttggcccccctgtattctctgtggtttcagaatttgaacacgaaacagcttggtctcgggatcatgttggtttcatatgtcattgcagtatcgcaccgacacgacacataccaattgattttgcctggaactgccatattttgtggc

SEQ ID NO: 81362 - DNA, 1805 bp, Zea Mays
gccccacaccgcttcactcgtttccttccgatccatacacaccgcgcacgtacgcgtactccatcgtcccggtgcaggcgggttcacgtcacgacctcgggcgagacgagatggcgacgccgaacgggcttgctcggatcgagacgaacggggcgaccaagcccgacaacggcgtgtgccacgacgacagctcggcgccggtgcgcgcgcagaccatcgacgagctgcactcgctgcagcggaagcggtcggcgccaaccacgcccatcaaggacggcgccgcctcgaccttcgccgccgcgctctccgaggaggagcgccacaggcagcagctgcagtccatcagcgcgtcgttggcgtctctgacacgtgaaaccgggccgaaagtggtcaagggcgacccggcccggaggggcgaggcccccgcgacgggtgcaccgccgacgccgcaggcgcaccaccagcaccaccaccccgccgcccccaccatcgccgtcagcgacagctccctcaagttcacccatgtcctctacaacctctcgcctgctggtaccgggaagacgacgctgtcgacggatcacaacaggcttctgatcggcgacgacgagcactgctggagcgagaatggcgtgtccaacatcgagggcggctgctatgccaagtgcatagacctatcgcaggagaaagagcctgatatctggaacgccatcaagttcggagccgtgctggagaacgttgtcttcgatgagcatactcgtgaagttgactacaccgacaaatctgtcaccgagaacactcgggctgcctacccgatcgagtacatccccaacgccaagataccatgcgtcggtccacaccccaagaacgtgatcctgctggcgtgcgacgccttcggcgtgctcccgccggtgagcaagctggacctggcgcagaccatgtaccacttcatcagcggatacaccgccctggtcgccggcacggaggacggcatcaaggagccacaggccaccttctccgcctgcttcggcgcggccttcatcatgctccacccgaccaagtacgccgccatgctcgccgagaagatgcagaagtacggcgccacagggtggctcgtcaacaccggctggtctggcggcaggtacggtgtgggcaagaggatccggcttccctacaccaggaagatcatcgacgccatccactccggcgagcttctcaccgccaactaccagaagaccgaggtctttggcctggagatcccgactgagatcaagggcgtgccgtcggaaatcctcgacccaatcaacacctggacggacaaggccgcgtacaaggagacgctcctgaggcttgccgggctcttcaagaagaacttcgaggtgttcgccagctacaagatcggggacgacagcaacctgaccgacgagatcctcgccgcaggccccaacttctgaactaaagcagtgggtccggatgaataaaacggtggtatgcgtgtgaagaagaagatgatgacgacgaaaatagtgtgttggatcgatgggccagcacagtgtagactagcttttgtatattatctcgggttggaaatctggtgttgttacctaaaatgttggtctgttctatcggcttgttgaaaacagtttgcgcgtgcttgcatcttggcccccctgtattctctgtggtttcagaatttgaacacgaaacagcttggtctcgggatcatgttggtttcatatgtcattgcagtatcgcaccgacacgacacataccaattgattttgcctggaactgccatattttgtggc

SEQ ID NO: 81363 - DNA, 2188 bp, Zea Mays
gtcgaggctgtgttcatacagatagataccagtgtcctcccggtctcgcgcagcactttgcggtttggtgctgataatcgggagcgtagccgcgtcgttggcgtctctgacacgtgaaaccgggccgaaagtggtcaagggcgacccggcccggaggggcgaggcccccgcgacgggtgcaccgccgacgccgcaggcgcaccaccagcaccaccaccccgccgcccccaccatcgccgtcagcgacagctccctcaagttcacccatgtcctctacaacctctcgcctgctgagctgtacgagcaggccatcaagtacgagaaggggtcgttcatcacgtccaccggcgcgctggcgacgctgtccggcgccaagaccgggcggtcgcccagggacaagcgcgtcgtcaaggacgaggtcgcggcgcgggacctgtggtggggcaagggctcgcccaacatcgagatggacgagcacacgttcctgaccaacagggagagggccgtggactacctcaactccctggacaaggtgttcgtgaacgaccagtttctcaactgggaccccgagaaccggatcaaggtccgcatcatctccgccagggcgtaccactccctcttcatgcacaacatgtgcatccggcccacggacgaggagctggagagcttcggcacgccggacttcaccatctacaacgccggccagttcccctgtaaccgctacacgcactacatgacgtcgtccaccagcgtagacatcaacctcgccaggagggagatggtgatcctgggcacgcagtacgccggcgagatgaagaaggggctgttcggcgtcatgcactacctcatgcccaagcgcggcatcctctcgctgcactccggctgcaatatgggcaaggacggcgacgtcgccctcttctttggcctctcaggtaccgggaagacgacgctgtcgacggatcacaacaggcttctgatcggcgacgacgagcactgctggagcgagaatggcgtgtccaacatcgagggcggctgctatgccaagtgcatagacctatcgcaggagaaagagcctgatatctggaacgccatcaagttcggagccgtgctggagaacgttgtcttcgatgagcatactcgtgaagttgactacaccgacaaatctgtcaccgagaacactcgggctgcctacccgatcgagtacatccccaacgccaagataccatgcgtcggtccacaccccaagaacgtgatcctgctggcgtgcgacgccttcggcgtgctcccgccggtgagcaagctggacctggcgcagaccatgtaccacttcatcagcggatacaccgccctggtcgccggcacggaggacggcatcaaggagccacaggccaccttctccgcctgcttcggcgcggccttcatcatgctccacccgaccaagtacgccgccatgctcgccgagaagatgcagaagtacggcgccacagggtggctcgtcaacaccggctggtctggcggcaggtacggtgtgggcaagaggatccggcttccctacaccaggaagatcatcgacgccatccactccggcgagcttctcaccgccaactaccagaagaccgaggtctttggcctggagatcccgactgagatcaagggcgtgccgtcggaaatcctcgacccaatcaacacctggacggacaaggccgcgtacaaggagacgctcctgaggcttgccgggctcttcaagaagaacttcgaggtgttcgccagctacaagatcggggacgacagcaacctgaccgacgagatcctcgccgcaggccccaacttctgaactaaagcagtgggtccggatgaataaaacggtggtatgcgtgtgaagaagaagatgatgacgacgaaaatagtgtgttggatcgatgggccagcacagtgtagactagcttttgtatattatctcgggttggaaatctggtgttgttacctaaaatgttggtctgttctatcggcttgttgaaaacagtttgcgcgtgcttgcatcttggcccccctgtattctctgtggtttcagaatttgaacacgaaacagcttggtctcgggatcatgttggtttcatatgtcattgcagtatcgcaccgacacgacacataccaattgattttgcctggaactgccatattttgtggc

SEQ ID NO: 81364 - DNA, 1284 bp, Zea Mays
ccccactgctgcccattcctctcatcccagcgaacgaccctccagcacgccatccgcttagccgccccggagcattgccatcgtcgccatcgtcgccgccaccttctatcccggtgtggagcgggagagaacccgtctgcactcagaagctggtttaatccgttaattcaagggtatcaagtgcacccttggggcttgtttcttcgttgaatttcaacaggggatgcaagggaaagaacaaaatattcaatgtggatagacacaccaagtatagtacttctttctgttatgcgccaagaaatgccagaatcacaccactagcaactgcatcatttggggatatggctgattcttcaactcctatctttccccgaatccatgtaaaagatccatatcagcgtctcggaatcagcagggaagcatcagaagaagaaattcgagctgctaggaactatctgataagcaagtatgcaggccacaagccaagtgttgatgcaattgagtctgcccatgacaggattatcatgcagagtttctttgataggaaaaaaccaaaaatgaatctcaagaaaaaatttagggaacttagtcagtcacgtgcagtgaaggctattcaaggcagatttcaaacaccacgtagcaaagtcatttggcagacagctattgcttttgtcttgcttggagtgcttacccttgctttccctaccgaagaagggccaaccctccaggtggccatctcttgtgcagcaaatatctatttcatttatcagagggtcaaaagtggatggcgagcattcttttatgggtttggttctttctttgcttcctggttccttggcaccttcttgatggtatctgtaattccccctatactccccggtccaagaaacttggaagtgagcaccgcgtgtgttacttatgtgctccttttcatatcgtcgaccttcttgaagtaagagatctttgtgtttccatgttagcgcaaagtcttgcaggagttataaacatggtatcatgcttcaaatagcttgtacaatccatcggctttttctttgcttgtttcacgtttatggagctggaaatgctagttctttagtgagttgatagtagttttcaggttgcaatgtgagatgtagaacgtttttttgcctaggcccgtgatatcttgagcagggtctaacacctcttgtgggtattttcagttgatgtattaaatacagttgtgttcgaatagatcatatgagataatatctcatcagtcttcttttggatggacatcacgtc

SEQ ID NO: 81365 - DNA, 1260 bp, Zea Mays
cagcgaacgaccctccagcacgccatccgcttagccgccccggagcattgccatcgtcgccatcgtcgccgccaccttctatcccggtgtggagcgggagagaacccgtctgcactcagaagctggtttaatccggtgttaattcaagggtatcaagtgcacccttggggcttgtttcttcgttgaatttcaacaggggatgcaagggaaagaacaaaatattcaatgtggatagacacaccaagtatagtacttctttctgttatgcgccaagaaatgccagaatcacaccactagcaactgcatcatttggggatatggctgattcttcaactcctatctttccccgaatccatgtaaaagatccatatcagcgtctcggaatcagcagggaagcatcagaagaagaaattcgagctgctaggaactatctgataagcaagtatgcaggccacaagccaagtgttgatgcaattgagtctgcccatgacaggattatcatgcagagtttctttgataggaaaaaaccaaaaatgaatctcaagaaaaaatttagggaacttagtcagtcacgtgcagtgaaggctattcaaggcagatttcaaacaccacgtagcaaagtcatttggcagacagctattgcttttgtcttgcttggagtgcttacccttgctttccctaccgaagaagggccaaccctccaggtggccatctcttgtgcagcaaatatctatttcatttatcagagggtcaaaagtggatggcgagcattcttttatgggtttggttctttctttgcttcctggttccttggcaccttcttgatggtatctgtaattccccctatactccccggtccaagaaacttggaagtgagcaccgcgtgtgttacttatgtgctccttttcatatcgtcgaccttcttgaagtaagagatctttgtgtttccatgttagcgcaaagtcttgcaggagttataaacatggtatcatgcttcaaatagcttgtacaatccatcggctttttctttgcttgtttcacgtttatggagctggaaatgctagttctttagtgagttgatagtagttttcaggttgcaatgtgagatgtagaacgtttttttgcctaggcccgtgatatcttgagcagggtctaacacctcttgtgggtattttcagttgatgtattaaatacagttgtgttcgaatagatcatatgagataatatctcatcagtcttcttttggatggacatcacgtc

SEQ ID NO: 81366 - DNA, 1670 bp, Zea Mays
atctttgacaccaaaccaaaccctgcggccctgagttcactgaaacctgctccacacaatacaccaatagtgttacagagcaaatggtgaatgaacctggaatcccgtggtcgcacctggagctcagagttggaagagaacaccgcccataccaccgccatcggggaacagcgtcgacttcttctccagtatggcaaggctgctcatccctccgcctcacctgctgccatcgtgcttgcgctgatggcagtgcgctgccaggcccaggggtcaggggaggtcatcctattaaaaaaatgctctgattttttatgtggctgcagcaacacaattggccaaaagcccaaaagtgttctatacacaatctcacccctataagatgcaggaattttctgagtatgctgttctgctttatgaacaccgtgaccttagctgttaaatcaacacgtgcaatataatcacgctctacaagttcaagtagctgtgatttttgaacccacacaacaagttgcagagaaatagttacaaaattatttcacaagccagaatagcccacatataatgatacgaaggcacacaatcaccctgatacaacatcagttatcgcttcataatttactgatctctgatgtactgtgtaaacataatataaccgatgaaagagcatttgtgagtcagataatcaaatatataaatgactttcccaatggcctaggtaaatattcataaaggtatcactggttaaaattacaacatttttgttgcagattctcttggttgacacttattcaccgaggatttaaaataatcttgcaacatgccacttctatggtcctatttccatatttttacaggaacattaaaatatttttggtgatttacgtggcactaataaagagcatatcataacgatgatcatccatttttatctcgctgcaacatcaacggtaaaaaaacacaaattgccaagaaagtttcaatgggacttcggaaaatcccagaaggaaccagcgagagatcaaggacatcacaatacattcaacatgtttaaaccaaaggagtccaggacaatagttttaaccaaacattgaaaactgcagccatgattaactgcaaatggatcaaaagtggcatgtcaatataaacagggcaaatattgcctaacatgtcaaagctcattaaaaaaagaaagcaatcagcaacaagcaatagcaggacatgtccactgatgatctagcgcctttacgtgcaacagagagctgtaaaaatcaccatctctaaacaataaaattagcaaggtacatcttgttgtaacacagctacagccaaaatttccctttcctgatctcaccaattatctcaaaaaagtgcattaccaagaaagagatggagaagccagacaaattttaacagactgccagaacaatatcatgttgcataattatataaaaaaaggtagacctagtgctagaggctaccacatgagtggggtctgagaaaggaataaaccaagccaaaccgtccccccacaaatgcaagagagggcgagaggctgcttcaaagttcgaacccaagattcggtgacccaacgagacagctcactgcaccaggcctgcccttcaataaatgaaaatagtcatccatttcccatgcacagatgatgagctcag

SEQ ID NO: 81367 - DNA, 3167 bp, Zea Mays
aaaatacagggggaaaagcaagacgcgtgagcacttccttatcgtctcttcctttcaccccctcgaccccgatcgaatcgctcgaacaattccctgtgcatcgatcgatctaggcttgcgcgaggatccaattccatccggctctcctttgagctcgtgatcctcggagttggaggagttcttcgcgagtctctttttgccccgatttctttttggcttatttgtgcgagctttctcaggagcagaagggaagaggcagtttgcaattccgatgcacccaggcctcaagattcaactctgaggccttatccgaggcatccgcatcgatctccgcaagaggatgggtaacgtgggaagcaacggtggaggcgccgccactggtcaccgccgtcggagctccggccacggccatcaccagcaggcgccgccgcctccccagccgcaggagactgcgcccaaccgctacgtgttcgcggccgccacgccgtacccgccccagtaccctaaccccaatccgccgcagtactacccgcagtacgggaactactacccgccgccaccatcatccgtgccggtgccccttccggcgccgtacgaccaccaccacaggccacccaccgccgcccctggcgagttcccgcccccaccccccgtccacccccacaactaccccggctgggccgggcggtatccctcctacggaccgcatctgtctatgccgacgccttacgttgagcaccagaaggccgtcactatccgcaacgacatcaaccttaagaaggagacgcttcggatcgagcctgatgaagaacgccctggccgcttcctcgtcgccttcacctttgacgccacggtcgctggcagcatgactgtttacttctttgcaaaggaagagctcaactgcaatctaacaacagtgaaagaagacctaattaagcccattactgttagcttcaaagagggtcttggtcaaaaattcaggcaaccttcaggaacaggaattgacttttcagtgtttgaagaatcagatttattaaagcagggggacatggatgtatatccacttgcagttaaagctgaaacaacattgtctgttgatcacccaccagaaggggatgaccaaaagatgataactcctaactcacagatcacccaggccgtttttgaaaagaaagaaaatggggattatcaagtaagagttgtttgccagatcctctgggtcaatggaactaggtatgaactgcaagaaatatatggcatagggaactccatggaaggtgatgctgatgcaaatgatccagggaaagaatgtgttatttgcctctcagaaccaagggatactactgtcctgccatgtaggcatatgtgcatgtgcagtgagtgcgccaaggtcctgaggtaccaaaccactcggtgccccatctgcaggcagcctgtggagcgtctcctggagatcaaagtgaacaacaaatctgaagatcagcagcagacgccccaatcgccaccgcgcccagacctggctccgcagcaggaaggggtgtagccgtgatcaaagtcagttctgaggtattatatggctcgaatctgcggaccttcctgaagaggtgaaggcatctggaaacacgtttggaaactactttcaggttgcaacctatggtgaatctcatgggggtggtgttggttgtgttatcagtggttgtccacctagaattccactcactgaggcagacctacaagttgaactcgatcgaagacggcccggacagagcagaataacctccacaaggaaggagactgatacatgcaaaattctgtcagggacacatgaaggggtgactactggaacgccaattcttgttattgtcccaaacacagatcaaataggcagtgatcaccgtgaaatagccaatgtgtaccgaccttctcatgcagacgcaacttatgacttcaagtacggtgttagagctgtacagggaggtgggaggtcgtcgggcagagaaaccgttggaagggtggctgcaggggccctcgccaagaaaattcttaagctcaaatgtggattagagatcttgtcgtttgtttccaaagtgcatcaggttgtgctcccagaagacgcggttgattatgggtctgtaactttggaacagatagagagcaacatcgttagatgtcctgatccagagtacgcagagaagatgatagacgcaatcgacagagtacgagttcgaggggattcggtcggtggagtgatcacatgcgtcgctagaaacgttcctcgcgggctcggttctcctgtgttcgacaagctcgaatccgaactggcaaaagctatgctttctattcctgcgagcaacgggttcgagattggcagcggattcgccgggaccgacttgacaggaagtgagcataatgatgagttttatatggataaggctggaagtgtcaggacacggactaatcgctcgggtggtgtgcagggagggatatcgaatggtgagattgtgcacttcaaagttgcttttaagccgacaccatctatcggggtgaaacagaacaccgtgtcaagggagcgtcagaacgttgagcttctagcaagagggcgccatgacccatgcgtcgcccctcgagctgttcctgtggtggaatccatggccgcgttggtcctcatggaccagctgatggcgcacgtggctcagtgcgagatgttcgcgctcaatactgcacttcaagaaccagttggctctttctagcagaggcagagcacacctgatgagctcgcgccaaattttatcatttatcatagtaataagtagctcaagcgtggcttggtttgcttgtctcttgcaccgtagttttgttttttttttcccgcaagtgtgatgcgatgaagtgaataaggcacttggtttcctgtgcatttgtacacgtttcatataatgtaatctacttcgaagatgatgcatttttatagatgtggcttgtgaaagactgcccttatcttgctctgtatatgccagcccgaagagcccgtcagtaatttcatcttgcgtgtgaatgtgaaaaataataataatccaaaattcagttgcaacagcgagactggacggtggtgagaaatctgcgtggaagaacatgcgaggtagcgattgttcaaaaaaaaaagaaca

SEQ ID NO: 81368 - DNA, 1785 bp, Zea Mays
taggcacatgcatgtgcacttaacacgggcgacccgcgccgggcataaataaaaacgccctctctcgagtctcgactctgcttccacggttcctcagcttcgtctctctcgccggcgcggcaggcaactatcatcacttcattagctcatccaatctattccgatgacgaccgtgcccaagccacagcaggtggcgcactcacgggcacggctcgcaccccgcgcgatcggcgccttgctggagtttgccccagcctcctcctccctccgcttcgccgtgcaccgctgccgcactgctcgcctagaggtgaaggcatctggaaacacgtttggaaactactttcaggttgcaacctatggtgaatctcatgggggtggtgttggttgtgttatcagtggttgtccacctagaattccactcactgaggcagacctacaagttgaactcgatcgaagacggcccggacagagcagaataacctccacaaggaaggagactgatacatgcaaaattctgtcagggacacatgaaggggtgactactggaacgccaattcttgttattgtcccaaacacagatcaaataggcagtgatcaccgtgaaatagccaatgtgtaccgaccttctcatgcagacgcaacttatgacttcaagtacggtgttagagctgtacagggaggtgggaggtcgtcgggcagagaaaccgttggaagggtggctgcaggggccctcgccaagaaaattcttaagctcaaatgtggattagagatcttgtcgtttgtttccaaagtgcatcaggttgtgctcccagaagacgcggttgattatgggtctgtaactttggaacagatagagagcaacatcgttagatgtcctgatccagagtacgcagagaagatgatagacgcaatcgacagagtacgagttcgaggggattcggtcggtggagtgatcacatgcgtcgctagaaacgttcctcgcgggctcggttctcctgtgttcgacaagctcgaatccgaactggcaaaagctatgctttctattcctgcgagcaacgggttcgagattggcagcggattcgccgggaccgacttgacaggaagtgagcataatgatgagttttatatggataaggctggaagtgtcaggacacggactaatcgctcgggtggtgtgcagggagggatatcgaatggtgagattgtgcacttcaaagttgcttttaagccgacaccatctatcgggctgttcctgtggtggaatccatggccgcgttggtcctcatggaccagctgatggcgcacgtggctcagtgcgagatgttcgcgctcaatactgcacttcaagaaccagttggctctttctagcagaggcagagcacacctgatgagctcgcgccaaattttatcatttatcatagtaataagtagctcaagcgtggcttggtttgcttgtctcttgcaccgtagttttgttttttttttcccgcaagtgtgatgcgatgaagtgaataaggcacttggtttcctgtgcatttgtacacgtttcatataatgtaatctacttcgaagatgatgcatttttatagatgtggcttgtgaaagactgcccttatcttgctctgtatatgccagcccgaagagcccgtcagtaatttcatcttgcgtgtgaatgtgaaaaataataataatccaaaattcagttgcaacagcgagactggacggtggtgagaaatctgcgtggaagaacatgcgaggtagcgattgttcaaaaaaaaaagaaca

SEQ ID NO: 81369 - DNA, 4181 bp, Zea Mays
atcacaggcaataactagataagcagattgataagtcagcgcacatatcagactgtctcatatcctagcagtataaattatcgctcaactcggtgtcctaacagtttctactcctcaacctggttcggtggtgtgattatctccctctaccaggcggttccgtagtaaacaactcggcccggcagtcgttcccagggcgagatcggatcgatcgagagcttcctagacctggacctgcgctagacctcaaagactcgatcgcaccgcatcttctctctctgctcctcgttcgcttcgtcgccggcgaccccgccgccagcttccccttccgctggccgccctttgcctcgcccctgaggcgtcggtttccactgcataggagtggggcggcgatccgactggacctagggttgcgagaccccatagggtgaccctaggagcatccgcctccacgtgggtgaggcggaggagggaggatgtcgtcgctcagccgggagctggtcttcctcattctgcagttcctcgatgaggagaaattcaaagagaccgtccacaagcttgagcaggagtccggattctatttcaacatgaagtactttgaggacgaggtcgtcaatgggaattgggatgaggtggagcgctaccttggtggattcacaaaggtcgacgataaccgctactccatgaagatattctttgagatccgcaaacagaagtatctcgaggctcttgataagcatgatcggtcaaaggctgttgaaatcttggtcaaggaccttaaggtatttgcatcctttaatgaggagttgtttaaggagatcacacagcttctgaccttggagaactttagggaaaatgagcagctttctaagtatggcgatacaaaatctgcaagagcaataatgtttgttgagctgaagaagctgattgaagctaaccccttgttccgtgataagctacaatttcctagcctgaagaattctaggctgcggacacttattaaccagagcttaaactggcagcaccagctttgcaaaaatcccaggcctaatcctgacatcaagactctatttgttgatcattcatgtggacaaccaaatggtgcacgtgctccatcaccagcaaacaatccattactcggatctatgcccaaacctggaggtttccctccattgggtgcccatggaccttttcaaccttcaccaacacctgttccacctctggctgggtggatgtcaaaccctccagcagtaacacatcctgctgtgtctggtggtgccattggatttggcactcctacaaatcctgccgctttgttgaagcatcctagaacacccacaactgctaatcctggtatggattatccatcaggagattctgatcacatctccaagagaactagaccagttggcatgtctgaggaggtgaatcttccggtgaatatgctgcctgtgacttatccgcagagccataattaccaacaagatgatttccataaaactgttgcacggaccttgagccaaggatcaacaccgatgagcatggattttcatccacttcaacaaactcttcttcttgttggtaccaatgttggcgacattggattgtgggatgttggtaccaaagacagactcgttgtaaggaacttcaaagtctgggacctcagtaaatgtacaatgattctccaggcatcactggttaaggatccagctgtgtcagttaatcgcataatatggagtcctgatggaaccttgtttggtgttgcttattcaaggcatattgtacaaatttattcctataatggtggcgacgatattagacaacacttggagattgatgcacatattggtggtgtaaatgacattgcatttgctcatccaaataagcagttatgtataattacatgtggagatgataagacaattaaggtatgggaggccaccagtggagctaagcaatttacatttgaaggacatgaagctcctgtttattcagtttgtccacattacaaggaaaatattcagttcatcttctcgactgctttagatgggaagatcaaggcatggctatatgataatatgggatctagagttgactatgatgcaccaggtcattggtgcactacaatggcatatagcgcagatggttcaaggttattttcatgtgggactagcaaggatggtgaatcacatctagtagaatggaatgaaagtgaaggagcagtgaagagaacatatcagggatttcgtaagcgatccatgggtgtcgtgcaattcgataccacacggaacaggtttttggccgctggggatgaattcatgattaagatatgggacatggacagcacgggtcttctaactaccattgatgcagatggtggcttaattgcaagtccacggatacgcttcaacaaggaaggaactcttttggctgtctctaccgttgacaatggcatcaagatcttagcaaatgctgatggacttcggttgctgcgcacgctggaaaatcgttcttttgatgcttctcgtaatgcatctgaggctgtaacaaagcctctaataaatcccttgactgctgcggcaaatgcagctgcagcaagcagttcaggagctggtgctccgtcagctgtaactgcaatgaatggggataccagaagtttggttgatgtaaaacctagaatagctgatgagtcactggacaagtcaaaggcgtggaagcttatggagataactgagtcaactcagtgcagatcaattaaactggcagacaacatgagaacgagcaagatctcgagattgatttacacaaattctggtcttgctatcttggctttaacttcaagtgctgttcatctactctggaaatggccacgcagtgatcggaattctggaaaggcaagcgcgagtgtgtctcccacactatggcaaccaccaagtggcattttgatgactaatgacacgactgacaacaatcctgaagaagctgttcactgctttgctttgtcgaagaatgattcatatgtcatgtccgcttctggaggaaaaatctctctgtttaacatgatgactttcaagacaatgacaacatttatgcctgcaccgccggcagcaacttttcttgcatttcacccccaagataacaacataattgcaattggaatggatgactcaaccatccaaatctataatgtccgaattgatgaggtcaaaagcaagctcaggggtcactctaagagaatcacgggtcttgccttttcaaatgtgctaaatgtcttagtctcttccggagctgatgctcagttatgtgtttggaacacggatggatgggaaaagcaaaagaacagatttttgcagataccgtcaggtcgccaatctaatatcttggacactcgtgttcagttccaccaagatcaaatgcactttcttgttgtgcatgaaacccagattgccatctatgaaactacaaaactagaaccagtgaagcagtcaactgatctatgcaagctttatggatgccactgttggcatatttaatgcatcgagtttgagacttcaatgtcggattcttccagcttcgtatctccccccaaatatcagtccgagtgttcatcctgttgtggttgcggcacacccttcggaagcgagtcagtttgctctagggctgactgatggtggtgtttttgtgttggaacctttggaatcagatagaaaatggggaaatcctccaccggtagaaaatgggtctgctagcaacttgtccgcaccgcctcctaatggagcttcaagttctgatcaacctgaaagatgattgagaagatggaactggtagatttttcgtggcatgagtctaaccaagatgggcttcaaaaggtggtgcaactaaccttggcagatcggttccaagggactcggacaatgggctcaataaaaacaagctcaacagcagtttatccgttgcttatatatatttctattgactgtatcgagtgaagaggatagttctagtatttcattttgctttgtttactgtgctgtgaaaaggagttcttatcagtagataagctgtagacaactatcagtttggctcctacattttatgacttagtgaaagtatcttgtttcatttgcctattggccccgatccgccgttttttatgaactgcctcaccatggtgatttttg

SEQ ID NO: 81370 - DNA, 3943 bp, Zea Mays
atcacaggcaataactagataagcagattgataagtcagcgcacatatcagactgtctcatatcctagcagtataaattatcgctcaactcggtgtcctaacagtttctactcctcaacctggttcggtggtgtgattatctccctctaccaggcggttccgtagtaaacaactcggcccggcagtcgttcccagggcgagatcggatcgatcgagagcttcctagacctggacctgcgctagacctcaaagactcgatcgcaccgcatcttctctctctgctcctcgttcgcttcgtcgccggcgaccccgccgccagcttccccttccgctggccgccctttgcctcgcccctgaggcgtcggtttccactgcataggagtggggcggcgatccgactggacctagggttgcgagaccccatagggtgaccctaggagcatccgcctccacgtgggtgaggcggaggagggaggatgtcgtcgctcagccgggagctggtcttcctcattctgcagttcctcgatgaggagaaattcaaagagaccgtccacaagcttgagcaggagtccggattctatttcaacatgaagtactttgaggacgaggtcgtcaatgggaattgggatgaggtggagcgctaccttggtggattcacaaaggtcgacgataaccgctactccatgaagatattctttgagatccgcaaacagaagtatctcgaggctcttgataagcatgatcggtcaaaggctgttgaaatcttggtcaaggaccttaaggtatttgcatcctttaatgaggagttgtttaaggagatcacacagcttctgaccttggagaactttagggaaaatgagcagctttctaagtatggcgatacaaaatctgcaagagcaataatgtttgttgagctgaagaagctgattgaagctaaccccttgttccgtgataagctacaatttcctagcctgaagaattctaggctgcggacacttattaaccagagcttaaactggcagcaccagctttgcaaaaatcccaggcctaatcctgacatcaagactctatttgttgatcattcatgtggacaaccaaatggtgcacgtgctccatcaccagcaaacaatccattactcggatctatgcccaaacctggaggtttccctccattgggtgcccatggaccttttcaaccttcaccaacacctgttccacctctggctgggtggatgtcaaaccctccagcagtaacacatcctgctgtgtctggtggtgccattggatttggcactcctacaaatcctgccgctttgttgaagcatcctagaacacccacaactgctaatcctggtatggattatccatcaggagattctgatcacatctccaagagaactagaccagttggcatgtctgaggaggtgaatcttccggtgaatatgctgcctgtgacttatccgcagagccataattaccaacaagatgatttccataaaactgttgcacggaccttgagccaaggatcaacaccgatgagcatggattttcatccacttcaacaaactcttcttcttgttggtaccaatgttggcgacattggattgtgggatgttggtaccaaagacagactcgttgtaaggaacttcaaagtctgggacctcagtaaatgtacaatgattctccaggcatcactggttaaggatccagctgtgtcagttaatcgcataatatggagtcctgatggaaccttgtttggtgttgcttattcaaggcatattgtacaaatttattcctataatggtggcgacgatattagacaacacttggagattgatgcacatattggtggtgtaaatgacattgcatttgctcatccaaataagcagttatgtataattacatgtggagatgataagacaattaaggtatgggaggccaccagtggagctaagcaatttacatttgaaggacatgaagctcctgtttattcagtttgtccacattacaaggaaaatattcagttcatcttctcgactgctttagatgggaagatcaaggcatggctatatgataatatgggatctagagttgactatgatgcaccaggtcattggtgcactacaatggcatatagcgcagatggttcaaggttattttcatgtgggactagcaaggatggtgaatcacatctagtagaatggaatgaaagtgaaggagcagtgaagagaacatatcagggatttcgtaagcgatccatgggtgtcgtgcaattcgataccacacggaacaggtttttggccgctggggatgaattcatgattaagatatgggacatggacagcacgggtcttctaactaccattgatgcagatggtggcttaattgcaagtccacggatacgcttcaacaaggaaggaactcttttggctgtctctaccgttgacaatggcatcaagatcttagcaaatgctgatggacttcggttgctgcgcacgctggaaaatcgttcttttgatgcttctcgtaatgcatctgaggctgtaacaaagcctctaataaatcccttgactgctgcggcaaatgcagctgcagcaagcagttcaggagctggtgctccgtcagctgtaactgcaatgaatggggataccagaagtttggttgatgtaaaacctagaatagctgatgagtcactggacaagtcaaaggcgtggaagcttatggagataactgagtcaactcagtgcagatcaattaaactggcagacaacatgagaacgagcaagatctcgagattgatttacacaaattctggtcttgctatcttggctttaacttcaagtgctgttcatctactctggaaatggccacgcagtgatcggaattctggaaaggcaagcgcgagtgtgtctcccacactatggcaaccaccaagtggcattttgatgactaatgacacgactgacaacaatcctgaagaagctgttcactgctttgctttgtcgaagaatgattcatatgtcatgtccgcttctggaggaaaaatctctctgtttaacatgatgactttcaagacaatgacaacatttatgcctgcaccgccggcagcaacttttcttgcatttcacccccaagataacaacataattgcaattggaatggatgactcaaccatccaaatctataatgtccgaattgatgaggtcaaaagcaagctcaggggtcactctaagagaatcacgggtcttgccttttcaaatgtgctaaatgtcttagtctcttccggagctgatgctcagttatgtgtttggaacacggatggatgggaaaagcaaaagaacagatttttgcagataccgtcaggtcgccaatctaatatcttggacactcgtgttcagttccaccaagatcaaatgcactttcttgttgtgcatgaaacccagattgccatctatgaaactacaaaactagaaccagtgaagcagtggcctgttcgagagaattcacctccaatcacacatgctgcattctcgtgtgacagtcaactgatctatgcaagctttatggatgccactgttggcatatttaatgcatcgagtttgagacttcaatgtcggattcttccagcttcgtatctccccccaaatatcagtccgagtgttcatcctgttgtggttgcggcacacccttcggaagcgagtcagtttgctctagggctgactgatggtggtgtttttgtgttggaacctttggaatcagatagaaaatggggaaatcctccaccggtagaaaatgggtctgctagcaacttgtccgcaccgcctcctaatggagcttcaagttctgatcaacctgaaagatgattgagaagatggaactggtagatttttcgtggcatgagtctaaccaagtttttctatcaaggtgttgaaattgtcagaag

SEQ ID NO: 81371 - DNA, 3878 bp, Zea Mays
gataagtcagcgcacatatcagactgtctcatatcctagcagtataaattatcgctcaactcggtgtcctaacagtttctactcctcaacctggttcggtggtgtgattatctccctctaccaggcggttccgtagtaaacaactcggcccggcagtcgttcccagggcgagatcggatcgatcgagagcttcctaggcttgagcaggagtccggattctatttcaacatgaagtactttgaggacgaggtcgtcaatgggaattgggatgaggtggagcgctaccttggtggattcacaaaggtcgacgataaccgctactccatgaagatattctttgagatccgcaaacagaagtatctcgaggctcttgataagcatgatcggtcaaaggctgttgaaatcttggtcaaggaccttaaggtatttgcatcctttaatgaggagttgtttaaggagatcacacagcttctgaccttggagaactttagggaaaatgagcagctttctaagtatggcgatacaaaatctgcaagagcaataatgtttgttgagctgaagaagctgattgaagctaaccccttgttccgtgataagctacaatttcctagcctgaagaattctaggctgcggacacttattaaccagagcttaaactggcagcaccagctttgcaaaaatcccaggcctaatcctgacatcaagactctatttgttgatcattcatgtggacaaccaaatggtgcacgtgctccatcaccagcaaacaatccattactcggatctatgcccaaacctggaggtttccctccattgggtgcccatggaccttttcaaccttcaccaacacctgttccacctctggctgggtggatgtcaaaccctccagcagtaacacatcctgctgtgtctggtggtgccattggatttggcactcctacaaatcctgccgctttgttgaagcatcctagaacacccacaactgctaatcctggtatggattatccatcaggagattctgatcacatctccaagagaactagaccagttggcatgtctgaggaggtgaatcttccggtgaatatgctgcctgtgacttatccgcagagccataattaccaacaagatgatttccataaaactgttgcacggaccttgagccaaggatcaacaccgatgagcatggattttcatccacttcaacaaactcttcttcttgttggtaccaatgttggcgacattggattgtgggatgttggtaccaaagacagactcgttgtaaggaacttcaaagtctgggacctcagtaaatgtacaatgattctccaggcatcactggttaaggatccagctgtgtcagttaatcgcataatatggagtcctgatggaaccttgtttggtgttgcttattcaaggcatattgtacaaatttattcctataatggtggcgacgatattagacaacacttggagattgatgcacatattggtggtgtaaatgacattgcatttgctcatccaaataagcagttatgtataattacatgtggagatgataagacaattaaggtatgggaggccaccagtggagctaagcaatttacatttgaaggacatgaagctcctgtttattcagtttgtccacattacaaggaaaatattcagttcatcttctcgactgctttagatgggaagatcaaggcatggctatatgataatatgggatctagagttgactatgatgcaccaggtcattggtgcactacaatggcatatagcgcagatggttcaaggttattttcatgtgggactagcaaggatggtgaatcacatctagtagaatggaatgaaagtgaaggagcagtgaagagaacatatcagggatttcgtaagcgatccatgggtgtcgtgcaattcgataccacacggaacaggtttttggccgctggggatgaattcatgattaagatatgggacatggacagcacgggtcttctaactaccattgatgcagatggtggcttaattgcaagtccacggatacgcttcaacaaggaaggaactcttttggctgtctctaccgttgacaatggcatcaagatcttagcaaatgctgatggacttcggttgctgcgcacgctggaaaatcgttcttttgatgcttctcgtaatgcatctgaggctgtaacaaagcctctaataaatcccttgactgctgcggcaaatgcagctgcagcaagcagttcaggagctggtgctccgtcagctgtaactgcaatgaatggggataccagaagtttggttgatgtaaaacctagaatagctgatgagtcactggacaagtcaaaggcgtggaagcttatggagataactgagtcaactcagtgcagatcaattaaactggcagacaacatgagaacgagcaagatctcgagattgatttacacaaattctggtcttgctatcttggctttaacttcaagtgctgttcatctactctggaaatggccacgcagtgatcggaattctggaaaggcaagcgcgagtgtgtctcccacactatggcaaccaccaagtggcattttgatgactaatgacacgactgacaacaatcctgaagaagctgttcactgctttgctttgtcgaagaatgattcatatgtcatgtccgcttctggaggaaaaatctctctgtttaacatgatgactttcaagacaatgacaacatttatgcctgcaccgccggcagcaacttttcttgcatttcacccccaagataacaacataattgcaattggaatggatgactcaaccatccaaatctataatgtccgaattgatgaggtcaaaagcaagctcaggggtcactctaagagaatcacgggtcttgccttttcaaatgtgctaaatgtcttagtctcttccggagctgatgctcagttatgtgtttggaacacggatggatgggaaaagcaaaagaacagatttttgcagataccgtcaggtcgccaatctaatatcttggacactcgtgttcagttccaccaagatcaaatgcactttcttgttgtgcatgaaacccagattgccatctatgaaactacaaaactagaaccagtgaagcagtggcctgttcgagagaattcacctccaatcacacatgctgcattctcgtgtgacagtcaactgatctatgcaagctttatggatgccactgttggcatatttaatgcatcgagtttgagacttcaatgtcggattcttccagcttcgtatctccccccaaatatcagtccgagtgttcatcctgttgtggttgcggcacacccttcggaagcgagtcagtttgctctagggctgactgatggtggtgtttttgtgttggaacctttggaatcagatagaaaatggggaaatcctccaccggtagaaaatgggtctgctagcaacttgtccgcaccgcctcctaatggagcttcaagttctgatcaacctgaaagatgattgagaagatggaactggtagatttttcgtggcatgagtctaaccaagatgggcttcaaaaggtggtgcaactaaccttggcagatcggttccaagggactcggacaatgggctcaataaaaacaagctcaacagcagtttatccgttgcttatatatatttctattgactgtatcgagtgaagaggatagttctagtatttcattttgctttgtttactgtgctgtgaaaaggagttcttatcagtagataagctgtagacaactatcagtttggctcctacattttatgacttagtgaaagtatcttgtttcatttgcctattggccccgatccgccgttttttatgaactgcctcaccatggtgatttttg

SEQ ID NO: 81372 - DNA, 3929 bp, Zea Mays
cctcaacctggttcggtggtgtgattatctccctctaccaggcggttccgtagtaaacaactcggcccggcagtcgttcccagggcgagatcggatcgatcgagagcttcctaggcagacctggacctgcgctagacctcaaagactcgatcgcaccgcatcttctctctctgctcctcgttcgcttcgtcgccggcgaccccgccgccagcttccccttccgctggccgccctttgcctcgcccctgaggcgtcggtttccactgcataggagtggggcggcgatccgactggacctagggttgcgagaccccatagggtgaccctaggagcatccgcctccacgtgggtgaggcggaggagggaggatgtcgtcgctcagccgggagctggtcttcctcattctgcagttcctcgatgaggagaaattcaaagagaccgtccacaagcttgagcaggagtccggattctatttcaacatgaagtactttgaggacgaggtcgtcaatgggaattgggatgaggtggagcgctaccttggtggattcacaaaggtcgacgataaccgctactccatgaagatattctttgagatccgcaaacagaagtatctcgaggctcttgataagcatgatcggtcaaaggctgttgaaatcttggtcaaggaccttaaggtatttgcatcctttaatgaggagttgtttaaggagatcacacagcttctgaccttggagaactttagggaaaatgagcagctttctaagtatggcgatacaaaatctgcaagagcaataatgtttgttgagctgaagaagctgattgaagctaaccccttgttccgtgataagctacaatttcctagcctgaagaattctaggctgcggacacttattaaccagagcttaaactggcagcaccagctttgcaaaaatcccaggcctaatcctgacatcaagactctatttgttgatcattcatgtggacaaccaaatggtgcacgtgctccatcaccagcaaacaatccattactcggatctatgcccaaacctggaggtttccctccattgggtgcccatggaccttttcaaccttcaccaacacctgttccacctctggctgggtggatgtcaaaccctccagcagtaacacatcctgctgtgtctggtggtgccattggatttggcactcctacaaatcctgccgctttgttgaagcatcctagaacacccacaactgctaatcctggtatggattatccatcaggagattctgatcacatctccaagagaactagaccagttggcatgtctgaggaggtgaatcttccggtgaatatgctgcctgtgacttatccgcagagccataattaccaacaagatgatttccataaaactgttgcacggaccttgagccaaggatcaacaccgatgagcatggattttcatccacttcaacaaactcttcttcttgttggtaccaatgttggcgacattggattgtgggatgttggtaccaaagacagactcgttgtaaggaacttcaaagtctgggacctcagtaaatgtacaatgattctccaggcatcactggttaaggatccagctgtgtcagttaatcgcataatatggagtcctgatggaaccttgtttggtgttgcttattcaaggcatattgtacaaatttattcctataatggtggcgacgatattagacaacacttggagattgatgcacatattggtggtgtaaatgacattgcatttgctcatccaaataagcagttatgtataattacatgtggagatgataagacaattaaggtatgggaggccaccagtggagctaagcaatttacatttgaaggacatgaagctcctgtttattcagtttgtccacattacaaggaaaatattcagttcatcttctcgactgctttagatgggaagatcaaggcatggctatatgataatatgggatctagagttgactatgatgcaccaggtcattggtgcactacaatggcatatagcgcagatggttcaaggttattttcatgtgggactagcaaggatggtgaatcacatctagtagaatggaatgaaagtgaaggagcagtgaagagaacatatcagggatttcgtaagcgatccatgggtgtcgtgcaattcgataccacacggaacaggtttttggccgctggggatgaattcatgattaagatatgggacatggacagcacgggtcttctaactaccattgatgcagatggtggcttaattgcaagtccacggatacgcttcaacaaggaaggaactcttttggctgtctctaccgttgacaatggcatcaagatcttagcaaatgctgatggacttcggttgctgcgcacgctggaaaatcgttcttttgatgcttctcgtaatgcatctgaggctgtaacaaagcctctaataaatcccttgactgctgcggcaaatgcagctgcagcaagcagttcaggagctggtgctccgtcagctgtaactgcaatgaatggggataccagaagtttggttgatgtaaaacctagaatagctgatgagtcactggacaagtcaaaggcgtggaagcttatggagataactgagtcaactcagtgcagatcaattaaactggcagacaacatgagaacgagcaagatctcgagattgatttacacaaattctggtcttgctatcttggctttaacttcaagtgctgttcatctactctggaaatggccacgcagtgatcggaattctggaaaggcaagcgcgagtgtgtctcccacactatggcaaccaccaagtggcattttgatgactaatgacacgactgacaacaatcctgaagaagctgttcactgctttgctttgtcgaagaatgattcatatgtcatgtccgcttctggaggaaaaatctctctgtttaacatgatgactttcaagacaatgacaacatttatgcctgcaccgccggcagcaacttttcttgcatttcacccccaagataacaacataattgcaattggaatggatgactcaaccatccaaatctataatgtccgaattgatgaggtcaaaagcaagctcaggggtcactctaagagaatcacgggtcttgccttttcaaatgtgctaaatgtcttagtctcttccggagctgatgctcagttatgtgtttggaacacggatggatgggaaaagcaaaagaacagatttttgcagataccgtcaggtcgccaatctaatatcttggacactcgtgttcagttccaccaagatcaaatgcactttcttgttgtgcatgaaacccagattgccatctatgaaactacaaaactagaaccagtgaagcagtggcctgttcgagagaattcacctccaatcacacatgctgcattctcgtgtgacagtcaactgatctatgcaagctttatggatgccactgttggcatatttaatgcatcgagtttgagacttcaatgtcggattcttccagcttcgtatctccccccaaatatcagtccgagtgttcatcctgttgtggttgcggcacacccttcggaagcgagtcagtttgctctagggctgactgatggtggtgtttttgtgttggaacctttggaatcagatagaaaatggggaaatcctccaccggtagaaaatgggtctgctagcaacttgtccgcaccgcctcctaatggagcttcaagttctgatcaacctgaaagatgattgagaagatggaactggtagatttttcgtggcatgagtctaaccaagggtaatacttcttttaggacttgtttgggaatacttcttttaggacttgtttgggagcaagtgaattggaaagggattgagcggactaaaatccttcccaaacacgcccttactgctgaacaaaag

SEQ ID NO: 81373 - DNA, 4129 bp, Zea Mays
cctcaacctggttcggtggtgtgattatctccctctaccaggcggttccgtagtaaacaactcggcccggcagtcgttcccagggcgagatcggatcgatcgagagcttcctaggcagacctggacctgcgctagacctcaaagactcgatcgcaccgcatcttctctctctgctcctcgttcgcttcgtcgccggcgaccccgccgccagcttccccttccgctggccgccctttgcctcgcccctgaggcgtcggtttccactgcataggagtggggcggcgatccgactggacctagggttgcgagaccccatagggtgaccctaggagcatccgcctccacgtgggtgaggcggaggagggaggatgtcgtcgctcagccgggagctggtcttcctcattctgcagttcctcgatgaggagaaattcaaagagaccgtccacaagcttgagcaggagtccggattctatttcaacatgaagtactttgaggacgaggtcgtcaatgggaattgggatgaggtggagcgctaccttggtggattcacaaaggtcgacgataaccgctactccatgaagatattctttgagatccgcaaacagaagtatctcgaggctcttgataagcatgatcggtcaaaggctgttgaaatcttggtcaaggaccttaaggtatttgcatcctttaatgaggagttgtttaaggagatcacacagcttctgaccttggagaactttagggaaaatgagcagctttctaagtatggcgatacaaaatctgcaagagcaataatgtttgttgagctgaagaagctgattgaagctaaccccttgttccgtgataagctacaatttcctagcctgaagaattctaggctgcggacacttattaaccagagcttaaactggcagcaccagctttgcaaaaatcccaggcctaatcctgacatcaagactctatttgttgatcattcatgtggacaaccaaatggtgcacgtgctccatcaccagcaaacaatccattactcggatctatgcccaaacctggaggtttccctccattgggtgcccatggaccttttcaaccttcaccaacacctgttccacctctggctgggtggatgtcaaaccctccagcagtaacacatcctgctgtgtctggtggtgccattggatttggcactcctacaaatcctgccgctttgttgaagcatcctagaacacccacaactgctaatcctggtatggattatccatcaggagattctgatcacatctccaagagaactagaccagttggcatgtctgaggaggtgaatcttccggtgaatatgctgcctgtgacttatccgcagagccataattaccaacaagatgatttccataaaactgttgcacggaccttgagccaaggatcaacaccgatgagcatggattttcatccacttcaacaaactcttcttcttgttggtaccaatgttggcgacattggattgtgggatgttggtaccaaagacagactcgttgtaaggaacttcaaagtctgggacctcagtaaatgtacaatgattctccaggcatcactggttaaggatccagctgtgtcagttaatcgcataatatggagtcctgatggaaccttgtttggtgttgcttattcaaggcatattgtacaaatttattcctataatggtggcgacgatattagacaacacttggagattgatgcacatattggtggtgtaaatgacattgcatttgctcatccaaataagcagttatgtataattacatgtggagatgataagacaattaaggtatgggaggccaccagtggagctaagcaatttacatttgaaggacatgaagctcctgtttattcagtttgtccacattacaaggaaaatattcagttcatcttctcgactgctttagatgggaagatcaaggcatggctatatgataatatgggatctagagttgactatgatgcaccaggtcattggtgcactacaatggcatatagcgcagatggttcaaggttattttcatgtgggactagcaaggatggtgaatcacatctagtagaatggaatgaaagtgaaggagcagtgaagagaacatatcagggatttcgtaagcgatccatgggtgtcgtgcaattcgataccacacggaacaggtttttggccgctggggatgaattcatgattaagatatgggacatggacagcacgggtcttctaactaccattgatgcagatggtggcttaattgcaagtccacggatacgcttcaacaaggaaggaactcttttggctgtctctaccgttgacaatggcatcaagatcttagcaaatgctgatggacttcggttgctgcgcacgctggaaaatcgttcttttgatgcttctcgtaatgcatctgaggctgtaacaaagcctctaataaatcccttgactgctgcggcaaatgcagctgcagcaagcagttcaggagctggtgctccgtcagctgtaactgcaatgaatggggataccagaagtttggttgatgtaaaacctagaatagctgatgagtcactggacaagtcaaaggcgtggaagcttatggagataactgagtcaactcagtgcagatcaattaaactggcagacaacatgagaacgagcaagatctcgagattgatttacacaaattctggtcttgctatcttggctttaacttcaagtgctgttcatctactctggaaatggccacgcagtgatcggaattctggaaaggcaagcgcgagtgtgtctcccacactatggcaaccaccaagtggcattttgatgactaatgacacgactgacaacaatcctgaagaagctgttcactgctttgctttgtcgaagaatgattcatatgtcatgtccgcttctggaggaaaaatctctctgtttaacatgatgactttcaagacaatgacaacatttatgcctgcaccgccggcagcaacttttcttgcatttcacccccaagataacaacataattgcaattggaatggatgactcaaccatccaaatctataatgtccgaattgatgaggtcaaaagcaagctcaggggtcactctaagagaatcacgggtcttgccttttcaaatgtgctaaatgtcttagtctcttccggagctgatgctcagttatgtgtttggaacacggatggatgggaaaagcaaaagaacagatttttgcagataccgtcaggtcgccaatctaatatcttggacactcgtgttcagttccaccaagatcaaatgcactttcttgttgtgcatgaaacccagattgccatctatgaaactacaaaactagaaccagtgaagcagtggcctgttcgagagaattcacctccaatcacacatgctgcattctcgtgtgacagtcaactgatctatgcaagctttatggatgccactgttggcatatttaatgcatcgagtttgagacttcaatgtcggattcttccagcttcgtatctccccccaaatatcagtccgagtgttcatcctgttgtggttgcggcacacccttcggaagcgagtcagtttgctctagggctgactgatggtggtgtttttgtgttggaacctttggaatcagatagaaaatggggaaatcctccaccggtagaaaatgggtctgctagcaacttgtccgcaccgcctcctaatggagcttcaagttctgatcaacctgaaagatgattgagaagatggaactggtagatttttcgtggcatgagtctaaccaagatgggcttcaaaaggtggtgcaactaaccttggcagatcggttccaagggactcggacaatgggctcaataaaaacaagctcaacagcagtttatccgttgcttatatatatttctattgactgtatcgagtgaagaggatagttctagtatttcattttgctttgtttactgtgctgtgaaaaggagttcttatcagtagataagctgtagacaactatcagtttggctcctacattttatgacttagtgaaagtatcttgtttcatttgcctattggccccgatccgccgttttttatgaactgcctcaccatggtgatttttg

SEQ ID NO: 81374 - DNA, 1953 bp, Zea Mays
ctcaacctggttcggtggtgtgattatctccctctaccaggcggttccgtagtaaacaactcggcccggcagtcgttcccagggcgagatcggatcgatcgagagcttcctaggcagacctggacctgcgctagacctcaaagactcgatcgcaccgcatcttctctctctgctcctcgttcgcttcgtcgccggcgaccccgccgccagcttccccttccgctggccgccctttgcctcgcccctgaggcgtcggtttccactgcataggagtggggcggcgatccgactggacctagggttgcgagaccccatagggtgaccctaggagcatccgcctccacgtgggtgaggcggaggagggaggatgtcgtcgctcagccgggagctggtcttcctcattctgcagttcctcgatgaggagaaattcaaagagaccgtccacaagcttgagcaggagtccggattctatttcaacatgaagtactttgaggacgaggtcgtcaatgggaattgggatgaggtggagcgctaccttggtggattcacaaaggtcgacgataaccgctactccatgaagatattctttgagatccgcaaacagaagtatctcgaggctcttgataagcatgatcggtcaaaggctgttgaaatcttggtcaaggaccttaaggtatttgcatcctttaatgaggagttgtttaaggagatcacacagcttctgaccttggagaactttagggaaaatgagcagctttctaagtatggcgatacaaaatctgcaagagcaataatgtttgttgagctgaagaagctgattgaagctaaccccttgttccgtgataagctacaatttcctagcctgaagaattctaggctgcggacacttattaaccagagcttaaactggcagcaccagctttgcaaaaatcccaggcctaatcctgacatcaagactctatttgttgatcattcatgtggacaaccaaatggtgcacgtgctccatcaccagcaaacaatccattactcggatctatgcccaaacctggaggtttccctccattgggtgcccatggaccttttcaaccttcaccaacacctgttccacctctggctgggtggatgtcaaaccctccagcagtaacacatcctgctgtgtctggtggtgccattggatttggcactcctacaaatcctgccgctttgttgaagcatcctagaacacccacaactgctaatcctggtatggattatccatcaggagattctgatcacatctccaagagaactagaccagttggcatgtctgaggaggtgaatcttccggtgaatatgctgcctgtgacttatccgcagagccataattaccaacaagatgatttccataaaactgttgcacggaccttgagccaaggatcaacaccgatgagcatggattttcatccacttcaacaaactcttcttcttgttggtaccaatgttggcgacattggattgtgggatgttggtaccaaagacagactcgttgtaaggaacttcaaagtctgggacctcagtaaatgtacaatgattctccaggcatcactggttaaggatccagctgtgtcagttaatcgcataatatggagtcctgatggaaccttgtttggtgttgcttattcaaggcatattgtacaaatttattcctataatggtggcgacgatattagacaacacttggagattgatgcacatattggtggtgtaaatgacattgcatttgctcatccaaataagcagttatgtataattacatgtggagatgataagacaattaaggtatgggaggccaccagtggagctaagcaatttacatttgaaggacatgaagctcctgtttattcagtttgtccacattacaaggaaaatattcaggtttcatcttctcgactgctttagatgggaagatcaag

SEQ ID NO: 81375 - DNA, 3856 bp, Zea Mays
gtgtgattatctccctctaccaggcggttccgtagtaaacaactcggcccggcagtcgttcccagggcgagatcggatcgatcgagagcttcctagacctggacctgcgctagacctcaaagactcgatcgcaccgcatcttctctctctgctcctcgttcgcttcgtcgccggcgaccccgccgccagcttccccttccgctggccgccctttgcctcgcccctgaggcgtcggtttccactgcataggagtggggcggcgatccgactggacctagggttgcgagaccccatagggtgaccctaggagcatccgcctccacgtgggtgaggcggaggagggaggatgtcgtcgctcagccgggagctggtcttcctcattctgcagttcctcgatgaggagaaattcaaagagaccgtccacaagcttgagcaggagtccggattctatttcaacatgaagtactttgaggacgaggtcgtcaatgggaattgggatgaggtggagcgctaccttggtggattcacaaaggtcgacgataaccgctactccatgaagatattctttgagatccgcaaacagaagtatctcgaggctcttgataagcatgatcggtcaaaggctgttgaaatcttggtcaaggaccttaaggtatttgcatcctttaatgaggagttgtttaaggagatcacacagcttctgaccttggagaactttagggaaaatgagcagctttctaagtatggcgatacaaaatctgcaagagcaataatgtttgttgagctgaagaagctgattgaagctaaccccttgttccgtgataagctacaatttcctagcctgaagaattctaggctgcggacacttattaaccagagcttaaactggcagcaccagctttgcaaaaatcccaggcctaatcctgacatcaagactctatttgttgatcattcatgtggacaaccaaatggtgcacgtgctccatcaccagcaaacaatccattactcggatctatgcccaaacctggaggtttccctccattgggtgcccatggaccttttcaaccttcaccaacacctgttccacctctggctgggtggatgtcaaaccctccagcagtaacacatcctgctgtgtctggtggtgccattggatttggcactcctacaaatcctgccgctttgttgaagcatcctagaacacccacaactgctaatcctggtatggattatccatcaggagattctgatcacatctccaagagaactagaccagttggcatgtctgaggagcaggtgaatcttccggtgaatatgctgcctgtgacttatccgcagagccataattaccaacaagatgatttccataaaactgttgcacggaccttgagccaaggatcaacaccgatgagcatggattttcatccacttcaacaaactcttcttcttgttggtaccaatgttggcgacattggattgtgggatgttggtaccaaagacagactcgttgtaaggaacttcaaagtctgggacctcagtaaatgtacaatgattctccaggcatcactggttaaggatccagctgtgtcagttaatcgcataatatggagtcctgatggaaccttgtttggtgttgcttattcaaggcatattgtacaaatttattcctataatggtggcgacgatattagacaacacttggagattgatgcacatattggtggtgtaaatgacattgcatttgctcatccaaataagcagttatgtataattacatgtggagatgataagacaattaaggtatgggaggccaccagtggagctaagcaatttacatttgaaggacatgaagctcctgtttattcagtttgtccacattacaaggaaaatattcagttcatcttctcgactgctttagatgggaagatcaaggcatggctatatgataatatgggatctagagttgactatgatgcaccaggtcattggtgcactacaatggcatatagcgcagatggttcaaggttattttcatgtgggactagcaaggatggtgaatcacatctagtagaatggaatgaaagtgaaggagcagtgaagagaacatatcagggatttcgtaagcgatccatgggtgtcgtgcaattcgataccacacggaacaggtttttggccgctggggatgaattcatgattaagatatgggacatggacagcacgggtcttctaactaccattgatgcagatggtggcttaattgcaagtccacggatacgcttcaacaaggaaggaactcttttggctgtctctaccgttgacaatggcatcaagatcttagcaaatgctgatggacttcggttgctgcgcacgctggaaaatcgttcttttgatgcttctcgtaatgcatctgaggctgtaacaaagcctctaataaatcccttgactgctgcggcaaatgcagctgcagcaagcagttcaggagctggtgctccgtcagctgtaactgcaatgaatggggataccagaagtttggttgatgtaaaacctagaatagctgatgagtcactggacaagtcaaaggcgtggaagcttatggagataactgagtcaactcagtgcagatcaattaaactggcagacaacatgagaacgagcaagatctcgagattgatttacacaaattctggtcttgctatcttggctttaacttcaagtgctgttcatctactctggaaatggccacgcagtgatcggaattctggaaaggcaagcgcgagtgtgtctcccacactatggcaaccaccaagtggcattttgatgactaatgacacgactgacaacaatcctgaagaagctgttcactgctttgctttgtcgaagaatgattcatatgtcatgtccgcttctggaggaaaaatctctctgtttaacatgatgactttcaagacaatgacaacatttatgcctgcaccgccggcagcaacttttcttgcatttcacccccaagataacaacataattgcaattggaatggatgactcaaccatccaaatctataatgtccgaattgatgaggtcaaaagcaagctcaggggtcactctaagagaatcacgggtcttgccttttcaaatgtgctaaatgtcttagtctcttccggagctgatgctcagataccgtcaggtcgccaatctaatatcttggacactcgtgttcagttccaccaagatcaaatgcactttcttgttgtgcatgaaacccagattgccatctatgaaactacaaaactagaaccagtgaagcagtggcctgttcgagagaattcacctccaatcacacatgctgcattctcgtgtgacagtcaactgatctatgcaagctttatggatgccactgttggcatatttaatgcatcgagtttgagacttcaatgtcggattcttccagcttcgtatctccccccaaatatcagtccgagtgttcatcctgttgtggttgcggcacacccttcggaagcgagtcagtttgctctagggctgactgatggtggtgtttttgtgttggaacctttggaatcagatagaaaatggggaaatcctccaccggtagaaaatgggtctgctagcaacttgtccgcaccgcctcctaatggagcttcaagttctgatcaacctgaaagatgattgagaagatggaactggtagatttttcgtggcatgagtctaaccaagggtaatacttcttttaggacttgtttgggaatacttcttttaggacttgtttgggagcaagtgaattggaaagggattgagcggactaaaatccttcccaaacacgcccttactgctgaacaaaag

SEQ ID NO: 81376 - DNA, 1382 bp, Zea Mays
tgattatctccctctaccaggcggttccgtagtaaacaactcggcccggcagtcgttcccagggcgagatcggatcgatcgagagcttcctagacctggacctgcgctagacctcaaagactcgatcgcaccgcatcttctctctctgctcctcgttcgcttcgtcgccggcgaccccgccgccagcttccccttccgctggccgccctttgcctcgcccctgaggcgtcggtttccactgcataggagtggggcggcgatccgactggacctagggttgcgagaccccatagggtgaccctaggagcatccgcctccacgtgggtgaggcggaggagggaggatgtcgtcgctcagccgggagctggtcttcctcattctgcagttcctcgatgaggagaaattcaaagagaccgtccacaagcttgagcaggagtccggattctatttcaacatgaagtactttgaggacgaggtcgtcaatgggaattgggatgaggtggagcgctaccttggtggattcacaaaggtcgacgataaccgctactccatgaagatattctttgagatccgcaaacagaagtatctcgaggctcttgataagcatgatcggtcaaaggctgttgaaatcttggtcaaggaccttaaggtatttgcatcctttaatgaggagttgtttaaggagatcacacagcttctgaccttggagaactttagggaaaatgagcagctttctaagtatggcgatacaaaatctgcaagagcaataatgtttgttgagctgaagaagctgattgaagctaaccccttgttccgtgataagctacaatttcctagcctgaagaattctaggctgcggacacttattaaccagagcttaaactggcagcaccagctttgcaaaaatcccaggcctaatcctgacatcaagactctatttgttgatcattcatgtggacaaccaaatggtgcacgtgctccatcaccagcaaacaatccattactcggatctatgcccaaacctggaggtttccctccattgggtgcccatggaccttttcaaccttcaccaacacctgttccacctctggctgggtggatgtcaaaccctccagcagtaacacatcctgctgtgtctggtggtgccattggatttggcactcctacaaatcctggagattctgatcacatctccaagagaactagaccagttggcatgtctgaggaggtgaatcttccggtgaatatgctgcctgtgacttatccgcagagccataattaccaacaagatgatttccataaaactgttgcacggaccttgagccaaggatcaacaccgatgagcatggattttcatccacttcaacaaactcttcttcttg

SEQ ID NO: 81377 - DNA, 1455 bp, Zea Mays
tgattatctccctctaccaggcggttccgtagtaaacaactcggcccggcagtcgttcccagggcgagatcggatcgatcgagagcttcctagacctggacctgcgctagacctcaaagactcgatcgcaccgcatcttctctctctgctcctcgttcgcttcgtcgccggcgaccccgccgccagcttccccttccgctggccgccctttgcctcgcccctgaggcgtcggtttccactgcataggagtggggcggcgatccgactggacctagggttgcgagaccccatagggtgaccctaggagcatccgcctccacgtgggtgaggcggaggagggaggatgtcgtcgctcagccgggagctggtcttcctcattctgcagttcctcgatgaggagaaattcaaagagaccgtccacaagcttgagcaggagtccggattctatttcaacatgaagtactttgaggacgaggtcgtcaatgggaattgggatgaggtggagcgctaccttggtggattcacaaaggtcgacgataaccgctactccatgaagatattctttgagatccgcaaacagaagtatctcgaggctcttgataagcatgatcggtcaaaggctgttgaaatcttggtcaaggaccttaaggtatttgcatcctttaatgaggagttgtttaaggagatcacacagcttctgaccttggagaactttagggaaaatgagcagctttctaagtatggcgatacaaaatctgcaagagcaataatgtttgttgagctgaagaagctgattgaagctaaccccttgttccgtgataagctacaatttcctagcctgaagaattctaggctgcggacacttattaaccagaggtagtcccatcttaaactggcagcaccagctttgcaaaaatcccaggcctaatcctgacatcaagactctatttgttgatcattcatgtggacaaccaaatggtgcacgtgctccatcaccagcaaacaatccattactcggatctatgcccaaacctggaggtttccctccattgggtgcccatggaccttttcaaccttcaccaacacctgttccacctctggctgggtggatgtcaaaccctccagcagtaacacatcctgctgtgtctggtggtgccattggatttggcactcctacaaatcctgccgctttgttgaagcatcctagaacacccacaactgctaatcctggtatggattatccatcaggagattctgatcacatctccaagagaactagaccagttggcatgtctgaggaggtgaatcttccggtgaatatgctgcctgtgacttatccgcagagccataattaccaacaagatgatttccataaaactgttgcacggaccttgagccaaggatcaacaccgatgagcatggattttcatccacttcaacaaactcttcttcttg

SEQ ID NO: 81378 - DNA, 543 bp, Zea Mays
cataaatagcatgcattggatagcagcacagcacagcaactgagtaaactacaacttcagtcacattactttgacaatgtcaaaccgggtttcgtgaactcttcaaaacatccctagttgtacaacagcgtagaataataaaacctagagtctatgcatttcctctctctctctctctctacacaaacaaggatatctctggtggttggacaaaggagaagatggcttccccgaagacctcgtacagagaccccaagagatgaccggtgtcctggtcctccttccaggcttgcctaagcactgcagaaactctctgcgcgagatcactgccctgatccctccggaccgcagctgatgggatgctctccaccgtctgcccagaggacgaggcctgcatcatgccagggttgcctaactggttgggaaagccatccatggcaccttgcatgtttcctcccatggaagctgaggccatggagttggctgttgcgtccgttgccatcttcttcagaggtggctgagttgcagagagatctgtgctag

SEQ ID NO: 81379 - DNA, 1642 bp, Zea Mays
atcagccacacctttgcttcgattagtatacaatgtttgaaaacttcacgttgaagggcacgcttggcaagttcctccaatgtcgccagccaaaccttctctatccagttccaaccctccctccctccctccctcctcctacaagcaacagcagcagcacaccaccctccaacctccaagaagaggaacgaagagggaggaaggtggggagttgcctccgaaagcaagccatcactggctaccaaatgcaggcatgcatgcatgcatatagcgaacaggacaagaagaagcagatgatgaggaggaagaataagtaggagcagagctgaaggacaccaataagaaacggttgctcgctgccaccaccatgtcctatgatcagatgctctcgccgcttttcggtgccggcgggcgatcggcgtggagagcggcccagcacggcggcggcgacgcggtggcgaggcagatactcaagtgcacgaggtggcagctcgaggagaccaccgacttcgtcacctgcccctaccactactactgcgacagctcctacccgggcgactaccccgccgccgtcggcgccctcgtcgccgccttcgccgcctactgctttctctccactctcgcgttcaccgtcctcgacctcgtgcggggcaacggtagcagcgcctcgtcgtcggcggtggccggcgtcaggggcatcaagaggaagtacctgctcccctcaggcccgttcctgctccccctggtgctgctcgcgctcgccagggggcagcgggtcaacgccgtgttcccgctcgcgcagctcggcccggcattgctcctgctgctccaggcctcggcgctggcgttccggaacgaggccgacggcgacgtccggtacgcggtgctggaggcgtccacggtgtccggcgtgctgcacgccagcctgtacctggacgccgtcgtgctgccgtactacacggggatggaggcgctccggtggtcccgcttctccggggagtgcgcgtcgtgcctgtgccggatggagcccctggtcgtgggcggcacggcggtgcagtaccggggcctgtccaagacggctctggcgatcatcttcgcgctatgctcgcggatggtgtgccgcatctacggcgaggagcggctcagcgcctggacgcgggccgcgctggaagccgtgggctgggtgttcgtggccgccgacgcggtgtacctcgtcggctgggtcgccgcggagggcggcggcgtcggcgtggcggcctacagcctggttgccggcctggtgttcctcagcgtcttcggcaaggtctaccggttcttggcgtgggtggaggcgaggcaatcgcagtggaaatccagcctctgccatagcgccgtttgattcatgaaagctaattctctcagaaaatctgtataaagaaagaaaggaatcgttgctttagttcatctccttcttggtgtacaatctacacggtggtaaagaaaagctatgcgacggttcaggaaaagtggatggatgggacaagccaacatcaataatgtggtggttcaggattgattctcacagaaaatctgtaaaaaaagaaggaaattgctgcttagctctcaacgaattctattgtgaaatagagggagtacttttttc

SEQ ID NO: 81380 - DNA, 1960 bp, Zea Mays
ccgaagtcagccgaccccgatccccgactcacacggtacgcgcttctcctcctcgcttgccgccgccgccgccgccgcgatggaaaaggagaagctctcgttctccatatcctcctcgaagcagcggccccccaagcctcccgcacgacctgcggccgccgcagacgacgatgacctccgctccgcgcccgctccgggccagcagtacgtcaccgagttcgatccgtcccaaaccctagccgccgcctgcgcggcgcgcgccgtcatcgcgccgctccccaactccggcaacttcctcacccaccgcccacgcaaaccgtcctcgctccccacccctgaggaggaggccgccctcgccgcggaatccggcggctggggccccgccttcgtcctcgacacctcgaccgctcccgaagacccatcatccaaaatcggctacggcctcactcgccgcaacggcgccatcgacgctgctgctgccaaggaaccggagaaggcgccgccaccgtcaccgtcaccgcctcgggccactgatgctgcctccgctgccggcaacctcatgctgcagcggtacaaggaggacatggaaggccttccggagcaccgtggaatggacgagttcaatgagatacccgtggagggatttggcgcggctctccttgctggatacggctggacagaaggtaagggcattggtaggaacaataagatgggggataccaaagttcttgaataccaccgccgtgctggcacacaggggttagggtacaacccctctgaagcagaccctaggaagactcgttctggcgactggattgttggcaagaaggtgtcagagggcgggagtgcgaagagagatcgaggcagtagagataggatggaagagagcgattctagtgcccagaagaagagatataatgaggaaaggtctgagaaggagggccgtgaaaaggtgaggaatggccgtggtagccgagaaggcacaagtaatgcaagcggtactcatagcaatgtactgtggttgcagagccatatcagggttcggattgttagtcagaaactaagcaagaggctatacttgatgaagggtaaggttgtcgatgtggtggggcctacaaaatgtgacatcatgatggatgatggatcagagttggtgcagggggtggagcaagatatgcttgaaactgtacttccacggacgaatgggcgggtgcttgtgctttatgggaagcacaagggtttatatgggcacctggtagagaagaattccaaagaagagatcggattggtggaggatgcagatacaaaagatattgtacgtgttagatatgatcagatggcagaatacactggagatccagagttgcttggctactgattaagtttttttgggggaggatatgcttaccgggagccttctgctatgcttggtctcctgttcgtcagctgaagatcatacttgctgtggagcttttgatcccttcagagggaccaaggattggagagcacattttcggttacacgctggagcatcttgttgatctccatggactttgagcctttggttgtactattgggaccctaacatattgtattgtagcttgcttttgacgacagccagctagaatgccgagtagctgtgaaacataatcgttctgtgtaacatatggatagaccgaattttcttgaaccttgtatgaaacctatgctacgattctactctggtatatgtaaatgtgttagcagttatgtttttttccccttgcatttcatattgcttgtgacagcaggtaaaagcaacgacgttgtctgcgtgtcgaaataggtatggtgcaggaaacatctcgctatttaaaattgaatagcaaggaaatttcttacacatggatcatctcgtgatctctggtcactaaatcagccctaagtttttcgtgcgcctcctgttctggtaagacaaaag

SEQ ID NO: 81381 - DNA, 793 bp, Zea Mays
agctctcaccgagtcaggtcatgggtttgaagcggtctatcgttatttgtggaggaaagcttgtcttggtgtatcctctctttagacctccctcaagtgagtcctgcggcattgagtatgcccttattattattaaggttgagtacatatctctaacaacttttaattattagactgtaagcttaaagaagtgtctattggaccctaaatgtgtggtttctcatcactcactcaccatataaccttaatgtttgatagctatttacaacttagtgacaccttctatcatcctaacatgcttgatttgtgctccctggactaagcagatcaacttttatgtcactctatgccttctttatccagtttgtcttattgttgagcaacggatgcatgtcacaaactgtatatcattccccacaaagtaagaatatgaccaacatttcacatgaacaatggaagcatccactatgttcacttgtcacttatggcattatcttgagtaaaatatatttactgtccttaaacttgtcgtcatgtgacaagttttgtgcgtgtagaagaaaactgaacaacactaatctaatatatatcccgaacgaattaatagaaacaacaccgggtgagtagtatacattttttgtgtgaatcaacaaggtgtgttatctgtgtacattatcaagtaagcaaatttaaagtgtcaggctcgagacaaaggtataaagccctacgttggtccaaaaggcgaaggggatgcgctatcggtgaagacgacattctgggtcgagaagaaaag

SEQ ID NO: 81382 - DNA, 2817 bp, Zea Mays
cgggaaagtcgggtctccgttgcagccgcttgctcgacgatgtgggccatccgggtttgcaccaacctggtcttacgtcttctccgcttcgttgattgtctttccccaggcccacgaaagaacgaccttacgatttattgggcctttgggcctttcgtgaggtcttttatctctttagtggacccgggggatatctatcccccacacatgtgtatccttcagaatctctagcgtggtgttcctcctccccacacttttgacagaagaacctccttcctggatttgattccccaaacctcgagagcacaatatgaggattagggttacatgggaattctgaagcagcagaggacgacgaaccaggagctccccattcaagaaccctacccgcaggagggaatcgacaaacccttttgtggagcaggccatacaattctccgtagcagctgctaaagcgaccattattgataaggagaggaaggatgtggtagataagttactgctgcaagattgaagcacgtggtctccctcttactccggaggtactgctttcattgcctccattctcttcaattacatttaactcagaggttgctaatggaacaatgactggagagaaatgtaaacctgaagtagccaaaactggacttgggtcatcagctgccatgaccacatcagttgttgcagctcttcttcactatcttggtgctgttaacctctcatgttcaggacaatcttctggcgacaatgcaagtggacgagaacttgacttggttcacgctattgcccaaagtgcacattgtttagcacaagggaaaattggcagtggttttgatgttagtgctgctgtctatgggagtcaacgctatgtaaggttttctccagaaatactctcctcggctcaggctataggtgggactgtcttgccagatgtagtatcagatgttctaacacaaaggtgggatcatgagaataaacagttttcattacctcctctgatgacccttctccttggggaacctgggaccggaggatcatctactccatcaatggttggatctgtgaaacggtggctgaagtctgaccctgagaaatccagagatacatggagtaaactggccattgccaattcaacgctggagaaccaactgaggatcttaaaaggactttctgaaaatcaccatgaagcatatgagtccatggtgaggtcctgtagtcgtctcacatatgggaagtgggcagaggtggctactaaccaacatcaagaattaattataagatcattgttggctgcaagggatgcttgccttgagataaggcttcacatgcgagagatgggcatagcagctggtgttccaattgagccagattcacaaacacggctactagatgccactatgaatatggagggtgttttactggctggagttccgggagctggtggcttcgatgcagtgttctcagttgttttgggggatgcaagtaatgctgtagcacatgcttggagctctgttggcgttctgccacttcctgttcgagaagactgccgtggtgtttcattggaagacgctgacccgagaacaagggaggtgtcagcagctgtatggtccatccaaattaactgattctactgttaatagttctgtttatgcatggtgtaccaatatcatttattaacgatgttcgcattgctgcagttacaattcatagagacaacatagtataaatagtagaagccgttacggattaaagccaaactagcaggctctatcttttataagtacaaaattgtgccgaatgctctatcttttataagtacaaaattgtgccgaatgctaggaagagttcgaggtatgtggttaaataagtgctgcacttgcagcaagatagcacatgagcaaattagtgcagaaaataaggaattctatggatttccatggaattagtgcttctagttgtagctgtggaatatacgtgagcaaatgtcaaggtatcaacaaacttattttgcaccgtgtgttcaggtgacggaggaaccagatgagccttctcttttacataggtaagctggagtaaggcaatgatggaggaaattgagtctatcactcacctcattgacctttcgcccaattatcgagcgatagaggtaaaatgactgttcaagatgaagagggacgagcatgggccgttgactaaacacaagttgaggctcatagtaggtctacgtgcaatgacacgacatccgactacgacaaggtgttcatgtcagtggttagaacagactcggtgcgcctgaccattgcaatcgcggcacacgagggatgacattgcaatcgtggcacatgagggatgataggtgcaccacatggacgccgagtcaatcatttttggacggcgacttgcgagaggagctctacgtgaagcagcagccggttttggcatcaccaccaaggagcacaatgtgctcacgcagtcacgctgcgaaagacgttgtacatactacatcaaacaccacgcgcctggaaggaaaaaagggtggacgacattctgatgtcgttcggcttcaggaggagcctatcgaagcacgccatctacatcaggtgaaacgatgatttgcagatgacaatatccaccaaccagtataaaagaactctgatcttatacgactgcgaaggatgatgctagctagctgcaatatattgaaaattctgggaacaaacccaggcctcccgatattaccttctgaagcacttgtttttgagcgtgtgctcatcttcttattcagtgaacgatgatatgcgatacacaaaatcttac

SEQ ID NO: 81383 - DNA, 2961 bp, Zea Mays
cgggaaagtcgggtctccgttgcagccgcttgctcgacgatgtgggccatccgggtttgcaccaacctggtcttacgtcttctccgcttcgttgattgtctttccccaggcccacgaaagaacgaccttacgatttattgggcctttgggcctttcgtgaggtcttttatctctttagtggacccgggggatatctatcccccacacatgtgtatccttcagaatctctagcgtggtgttcctcctccccacacttttgacagaagaacctccttcctggatttgattccccaaacctcgagagcacaatatgaggattagggttacatgggaattctgaagcagcagaggacgacgaaccaggagctccccattcaagaaccctacccgcaggaggtgctcatcgcgggaggatacctcgtgctggagcgccccaacgccggcctagttctcagcaccaccgcccgcttctacgccgtcgtccgccccctccgcgacagcctcccagccgactcctggacctgggcatggacggacgtcaaagtgacttcccctcaactctcgcgggtggccacatataaattgtccctaaataaaacgacgctgcaattgacgtcttcaaggcaagttgctcatcgttcttaatgactgcaaatttgcaatctcgtggcgagggaatcgacaaacccttttgtggagcaggccatacaattctccgtagcagctgctaaagcgaccattattgataaggagaggaaggatgtggtagataagttactgctgcaaggtctgaacattacaattattggtcacaatgatttctattcttatagaaagcagattgaagcacgtggtctccctcttactccggaggacaatcttctggcgacaatgcaagtggacgagaacttgacttggttcacgctattgcccaaagtgcacattgtttagcacaagggaaaattggcagtggttttgatgttagtgctgctgtctatgggagtcaacgctatgtaaggttttctccagaaatactctcctcggctcaggctataggtgggactgtcttgccagatgtagtatcagatgttctaacacaaaggtgggatcatgagaataaacagttttcattacctcctctgatgacccttctccttggggaacctgggaccggaggatcatctactccatcaatggttggatctgtgaaacggtggctgaagtctgaccctgagaaatccagagatacatggagtaaactggccattgccaattcaacgctggagaaccaactgaggatcttaaaaggactttctgaaaatcaccatgaagcatatgagtccatggtgaggtcctgtagtcgtctcacatatgggaagtgggcagaggtggctactaaccaacatcaagaattaattataagatcattgttggctgcaagggatgcttgccttgagataaggcttcacatgcgagagatgggcatagcagctggtgttccaattgagccagattcacaaacacggctactagatgccactatgaatatggagggtgttttactggctggagttccgggagctggtggcttcgatgcagtgttctcagttgttttgggggatgcaagtaatgctgtagcacatgcttggagctctgttggcgttctgccacttcctgttcgagaagactgccgtggtgtttcattggaagacgctgacccgagaacaagggaggtgtcagcagctgtatggtccatccaaattaactgattctactgttaatagttctgtttatgcatggtgtaccaatatcatttattaacgatgttcgcattgctgcagttacaattcatagagacaacatagtataaatagtagaagccgttacggattaaagccaaactagcaggctctatcttttataagtacaaaattgtgccgaatgctctatcttttataagtacaaaattgtgccgaatgctaggaagagttcgaggtatgtggttaaataagtgctgcacttgcagcaagatagcacatgagcaaattagtgcagaaaataaggaattctatggatttccatggaattagtgcttctagttgtagctgtggaatatacgtgagcaaatgtcaaggtatcaacaaacttattttgcaccgtgtgttcaggtgacggaggaaccagatgagccttctcttttacataggtaagctggagtaaggcaatgatggaggaaattgagtctatcactcacctcattgacctttcgcccaattatcgagcgatagaggtaaaatgactgttcaagatgaagagggacgagcatgggccgttgactaaacacaagttgaggctcatagtaggtctacgtgcaatgacacgacatccgactacgacaaggtgttcatgtcagtggttagaacagactcggtgcgcctgaccattgcaatcgcggcacacgagggatgacattgcaatcgtggcacatgagggatgataggtgcaccacatggacgccgagtcaatcatttttggacggcgacttgcgagaggagctctacgtgaagcagcagccggttttggcatcaccaccaaggagcacaatgtgctcacgcagtcacgctgcgaaagacgttgtacatactacatcaaacaccacgcgcctggaaggaaaaaagggtggacgacattctgatgtcgttcggcttcaggaggagcctatcgaagcacgccatctacatcaggtgaaacgatgatttgcagatgacaatatccaccaaccagtataaaagaactctgatcttatacgactgcgaaggatgatgctagctagctgcaatatattgaaaattctgggaacaaacccaggcctcccgatattaccttctgaagcacttgtttttgagcgtgtgctcatcttcttattcagtgaacgatgatatgcgatacacaaaatcttac

SEQ ID NO: 81384 - DNA, 2446 bp, Zea Mays
gttcctcctccccacacttttgacagaagaacctccttcctggatttgattccccaaacctcgagagcacaatatgaggattagggttacatgggaattctgaagcagcagaggacgacgaaccaggagctccccattcaagaaccctacccgcaggagggaatcgacaaacccttttgtggagcaggccatacaattctccgtagcagctgctaaagcgaccattattgataaggagaggaaggatgtggtagataagttactgctgcaaggtctgaacattacaattattggtcacaatgatttctattcttatagaaagcagattgaagcacgtggtctccctcttactccggaggacaatcttctggcgacaatgcaagtggacgagaacttgacttggttcacgctattgcccaaagtgcacattgtttagcacaagggaaaattggcagtggttttgatgttagtgctgctgtctatgggagtcaacgctatgtaaggttttctccagaaatactctcctcggctcaggctataggtgggactgtcttgccagatgtagtatcagatgttctaacacaaaggtgggatcatgagaataaacagttttcattacctcctctgatgacccttctccttggggaacctgggaccggaggatcatctactccatcaatggttggatctgtgaaacggtggctgaagtctgaccctgagaaatccagagatacatggagtaaactggccattgccaattcaacgctggagaaccaactgaggatcttaaaaggactttctgaaaatcaccatgaagcatatgagtccatggtgaggtcctgtagtcgtctcacatatgggaagtgggcagaggtggctactaaccaacatcaagaattaattataagatcattgttggctgcaagggatgcttgccttgagataaggcttcacatgcgagagatgggcatagcagctggtgttccaattgagccagattcacaaacacggctactagatgccactatgaatatggagggtgttttactggctggagttccgggagctggtggcttcgatgcagtgttctcagttgttttgggggatgcaagtaatgctgtagcacatgcttggagctctgttggcgttctgccacttcctgttcgagaagactgccgtggtgtttcattggaagacgctgacccgagaacaagggaggtgtcagcagctgtatggtccatccaaattaactgattctactgttaatagttctgtttatgcatggtgtaccaatatcatttattaacgatgttcgcattgctgcagttacaattcatagagacaacatagtataaatagtagaagccgttacggattaaagccaaactagcaggctctatcttttataagtacaaaattgtgccgaatgctctatcttttataagtacaaaattgtgccgaatgctaggaagagttcgaggtatgtggttaaataagtgctgcacttgcagcaagatagcacatgagcaaattagtgcagaaaataaggaattctatggatttccatggaattagtgcttctagttgtagctgtggaatatacgtgagcaaatgtcaaggtatcaacaaacttattttgcaccgtgtgttcaggtgacggaggaaccagatgagccttctcttttacataggtaagctggagtaaggcaatgatggaggaaattgagtctatcactcacctcattgacctttcgcccaattatcgagcgatagaggtaaaatgactgttcaagatgaagagggacgagcatgggccgttgactaaacacaagttgaggctcatagtaggtctacgtgcaatgacacgacatccgactacgacaaggtgttcatgtcagtggttagaacagactcggtgcgcctgaccattgcaatcgcggcacacgagggatgacattgcaatcgtggcacatgagggatgataggtgcaccacatggacgccgagtcaatcatttttggacggcgacttgcgagaggagctctacgtgaagcagcagccggttttggcatcaccaccaaggagcacaatgtgctcacgcagtcacgctgcgaaagacgttgtacatactacatcaaacaccacgcgcctggaaggaaaaaagggtggacgacattctgatgtcgttcggcttcaggaggagcctatcgaagcacgccatctacatcaggtgaaacgatgatttgcagatgacaatatccaccaaccagtataaaagaactctgatcttatacgactgcgaaggatgatgctagctagctgcaatatattgaaaattctgggaacaaacccaggcctcccgatattaccttctgaagcacttgtttttgagcgtgtgctcatcttcttattcagtgaacgatgatatgcgatacacaaaatcttac

SEQ ID NO: 81385 - DNA, 2731 bp, Zea Mays
gttcctcctccccacacttttgacagaagaacctccttcctggatttgattccccaaacctcgagagcacaatatgaggattagggttacatgggaattctgaagcagcagaggacgacgaaccaggagctccccattcaagaaccctacccgcaggaggcatggacggacgtcaaagtgacttcccctcaactctcgcgggtggccacatataaattgtccctaaataaaacgacgctgcaattgacgtcttcaagggaatcgacaaacccttttgtggagcaggccatacaattctccgtagcagctgctaaagcgaccattattgataaggagaggaaggatgtggtagataagttactgctgcaaggtctgaacattacaattattggtcacaatgatttctattcttatagaaagcagattgaagcacgtggtctccctcttactccggaggtactgctttcattgcctccattctcttcaattacatttaactcagaggttgctaatggaacaatgactggagagaaatgtaaacctgaagtagccaaaactggacttgggtcatcagctgccatgaccacatcagttgttgcagctcttcttcactatcttggtgctgttaacctctcatgttcaggacaatcttctggcgacaatgcaagtggacgagaacttgacttggttcacgctattgcccaaagtgcacattgtttagcacaagggaaaattggcagtggttttgatgttagtgctgctgtctatgggagtcaacgctatgtaaggttttctccagaaatactctcctcggctcaggctataggtgggactgtcttgccagatgtagtatcagatgttctaacacaaaggtgggatcatgagaataaacagttttcattacctcctctgatgacccttctccttggggaacctgggaccggaggatcatctactccatcaatggttggatctgtgaaacggtggctgaagtctgaccctgagaaatccagagatacatggagtaaactggccattgccaattcaacgctggagaaccaactgaggatcttaaaaggactttctgaaaatcaccatgaagcatatgagtccatggtgaggtcctgtagtcgtctcacatatgggaagtgggcagaggtggctactaaccaacatcaagaattaattataagatcattgttggctgcaagggatgcttgccttgagataaggcttcacatgcgagagatgggcatagcagctggtgttccaattgagccagattcacaaacacggctactagatgccactatgaatatggagggtgttttactggctggagttccgggagctggtggcttcgatgcagtgttctcagttgttttgggggatgcaagtaatgctgtagcacatgcttggagctctgttggcgttctgccacttcctgttcgagaagactgccgtggtgtttcattggaagacgctgacccgagaacaagggaggtgtcagcagctgtatggtccatccaaattaactgattctactgttaatagttctgtttatgcatggtgtaccaatatcatttattaacgatgttcgcattgctgcagttacaattcatagagacaacatagtataaatagtagaagccgttacggattaaagccaaactagcaggctctatcttttataagtacaaaattgtgccgaatgctctatcttttataagtacaaaattgtgccgaatgctaggaagagttcgaggtatgtggttaaataagtgctgcacttgcagcaagatagcacatgagcaaattagtgcagaaaataaggaattctatggatttccatggaattagtgcttctagttgtagctgtggaatatacgtgagcaaatgtcaaggtatcaacaaacttattttgcaccgtgtgttcaggtgacggaggaaccagatgagccttctcttttacataggtaagctggagtaaggcaatgatggaggaaattgagtctatcactcacctcattgacctttcgcccaattatcgagcgatagaggtaaaatgactgttcaagatgaagagggacgagcatgggccgttgactaaacacaagttgaggctcatagtaggtctacgtgcaatgacacgacatccgactacgacaaggtgttcatgtcagtggttagaacagactcggtgcgcctgaccattgcaatcgcggcacacgagggatgacattgcaatcgtggcacatgagggatgataggtgcaccacatggacgccgagtcaatcatttttggacggcgacttgcgagaggagctctacgtgaagcagcagccggttttggcatcaccaccaaggagcacaatgtgctcacgcagtcacgctgcgaaagacgttgtacatactacatcaaacaccacgcgcctggaaggaaaaaagggtggacgacattctgatgtcgttcggcttcaggaggagcctatcgaagcacgccatctacatcaggtgaaacgatgatttgcagatgacaatatccaccaaccagtataaaagaactctgatcttatacgactgcgaaggatgatgctagctagctgcaatatattgaaaattctgggaacaaacccaggcctcccgatattaccttctgaagcacttgtttttgagcgtgtgctcatcttcttattcagtgaacgatgatatgcgatacacaaaatcttac

SEQ ID NO: 81386 - DNA, 2751 bp, Zea Mays
gttcctcctccccacacttttgacagaagaacctccttcctggatttgattccccaaacctcgagagcacaatatgaggattagggttacatgggaattctgaagcagcagaggacgacgaaccaggagctccccattcaagaaccctacccgcaggagggtggcgtcggcgccggggaaggtgctcatcgcgggaggatacctcgtgctggagcgccccaacgccggcctagttctcagcaccaccgcccgcttctacgccgtcgtccgccccctccgcgacagcctcccagccgactcctggacctgggcatggacggacgtcaaagtgacttcccctcaactctcgcgggtggccacatataaattgtccctaaataaaacgacgctgcaattgacgtcttcaaggcaagttgctcatcgttcttaatgactgcaaatttgcaatctcgtggcgagggaatcgacaaacccttttgtggagcaggccatacaattctccgtagcagctgctaaagcgaccattattgataaggagaggaaggatgtggtagataagttactgctgcaaggtctgaacattacaattattggtcacaatgatttctattcttatagaaagcagattgaagcacgtggtctccctcttactccggaggacaatcttctggcgacaatgcaagtggacgagaacttgacttggttcacgctattgcccaaagtgcacattgtttagcacaagggaaaattggcagtggttttgatgttagtgctgctgtctatgggagtcaacgctatgtaaggttttctccagaaatactctcctcggctcaggctataggtgggactgtcttgccagatgtagtatcagatgttctaacacaaaggtgggatcatgagaataaacagttttcattacctcctctgatgacccttctccttggggaacctgggaccggaggatcatctactccatcaatggttggatctgtgaaacggtggctgaagtctgaccctgagaaatccagagatacatggagtaaactggccattgccaattcaacgctggagaaccaactgaggatcttaaaaggactttctgaaaatcaccatgaagcatatgagtccatggtgaggtcctgtagtcgtctcacatatgggaagtgggcagaggtggctactaaccaacatcaagaattaattataagatcattgttggctgcaagggatgcttgccttgagataaggcttcacatgcgagagatgggcatagcagctggtgttccagtaagattgagccagattcacaaacacggctactagatgccactatgaatatggagggtgttttactggctggagttccgggagctggtggcttcgatgcagtgttctcagttgttttgggggatgcaagtaatgctgtagcacatgcttggagctctgttggcgttctgccacttcctgttcgagaagactgccgtggtgtttcattggaagacgctgacccgagaacaagggaggtgtcagcagctgtatggtccatccaaattaactgattctactgttaatagttctgtttatgcatggtgtaccaatatcatttattaacgatgttcgcattgctgcagttacaattcatagagacaacatagtataaatagtagaagccgttacggattaaagccaaactagcaggctctatcttttataagtacaaaattgtgccgaatgctctatcttttataagtacaaaattgtgccgaatgctaggaagagttcgaggtatgtggttaaataagtgctgcacttgcagcaagatagcacatgagcaaattagtgcagaaaataaggaattctatggatttccatggaattagtgcttctagttgtagctgtggaatatacgtgagcaaatgtcaaggtatcaacaaacttattttgcaccgtgtgttcaggtgacggaggaaccagatgagccttctcttttacataggtaagctggagtaaggcaatgatggaggaaattgagtctatcactcacctcattgacctttcgcccaattatcgagcgatagaggtaaaatgactgttcaagatgaagagggacgagcatgggccgttgactaaacacaagttgaggctcatagtaggtctacgtgcaatgacacgacatccgactacgacaaggtgttcatgtcagtggttagaacagactcggtgcgcctgaccattgcaatcgcggcacacgagggatgacattgcaatcgtggcacatgagggatgataggtgcaccacatggacgccgagtcaatcatttttggacggcgacttgcgagaggagctctacgtgaagcagcagccggttttggcatcaccaccaaggagcacaatgtgctcacgcagtcacgctgcgaaagacgttgtacatactacatcaaacaccacgcgcctggaaggaaaaaagggtggacgacattctgatgtcgttcggcttcaggaggagcctatcgaagcacgccatctacatcaggtgaaacgatgatttgcagatgacaatatccaccaaccagtataaaagaactctgatcttatacgactgcgaaggatgatgctagctagctgcaatatattgaaaattctgggaacaaacccaggcctcccgatattaccttctgaagcacttgtttttgagcgtgtgctcatcttcttattcagtgaacgatgatatgcgatacacaaaatcttac

SEQ ID NO: 81387 - DNA, 2609 bp, Zea Mays
gttcctcctccccacacttttgacagaagaacctccttcctggatttgattccccaaacctcgagagcacaatatgaggattagggttacatgggaattctgaagcagcagaggacgacgaaccaggagctccccattcaagaaccctacccgcaggagggtggcgtcggcgccggggaaggtgctcatcgcgggaggatacctcgtgctggagcgccccaacgccggcctagttctcagcaccaccgcccgcttctacgccgtcgtccgccccctccgcgacagcctcccagccgactcctggacctgggcatggacggacgtcaaagtgacttcccctcaactctcgcgggtggccacatataaattgtccctaaataaaacgacgctgcaattgacgtcttcaagggaatcgacaaacccttttgtggagcaggccatacaattctccgtagcagctgctaaagcgaccattattgataaggagaggaaggatgtggtagataagttactgctgcaagattgaagcacgtggtctccctcttactccggaggacaatcttctggcgacaatgcaagtggacgagaacttgacttggttcacgctattgcccaaagtgcacattgtttagcacaagggaaaattggcagtggttttgatgttagtgctgctgtctatgggagtcaacgctatgtaaggttttctccagaaatactctcctcggctcaggctataggtgggactgtcttgccagatgtagtatcagatgttctaacacaaaggtgggatcatgagaataaacagttttcattacctcctctgatgacccttctccttggggaacctgggaccggaggatcatctactccatcaatggttggatctgtgaaacggtggctgaagtctgaccctgagaaatccagagatacatggagtaaactggccattgccaattcaacgctggagaaccaactgaggatcttaaaaggactttctgaaaatcaccatgaagcatatgagtccatgtgggcagaggtggctactaaccaacatcaagaattaattataagatcattgttggctgcaagggatgcttgccttgagataaggcttcacatgcgagagatgggcatagcagctggtgttccaattgagccagattcacaaacacggctactagatgccactatgaatatggagggtgttttactggctggagttccgggagctggtggcttcgatgcagtgttctcagttgttttgggggatgcaagtaatgctgtagcacatgcttggagctctgttggcgttctgccacttcctgttcgagaagactgccgtggtgtttcattggaagacgctgacccgagaacaagggaggtgtcagcagctgtatggtccatccaaattaactgattctactgttaatagttctgtttatgcatggtgtaccaatatcatttattaacgatgttcgcattgctgcagttacaattcatagagacaacatagtataaatagtagaagccgttacggattaaagccaaactagcaggctctatcttttataagtacaaaattgtgccgaatgctctatcttttataagtacaaaattgtgccgaatgctaggaagagttcgaggtatgtggttaaataagtgctgcacttgcagcaagatagcacatgagcaaattagtgcagaaaataaggaattctatggatttccatggaattagtgcttctagttgtagctgtggaatatacgtgagcaaatgtcaaggtatcaacaaacttattttgcaccgtgtgttcaggtgacggaggaaccagatgagccttctcttttacataggtaagctggagtaaggcaatgatggaggaaattgagtctatcactcacctcattgacctttcgcccaattatcgagcgatagaggtaaaatgactgttcaagatgaagagggacgagcatgggccgttgactaaacacaagttgaggctcatagtaggtctacgtgcaatgacacgacatccgactacgacaaggtgttcatgtcagtggttagaacagactcggtgcgcctgaccattgcaatcgcggcacacgagggatgacattgcaatcgtggcacatgagggatgataggtgcaccacatggacgccgagtcaatcatttttggacggcgacttgcgagaggagctctacgtgaagcagcagccggttttggcatcaccaccaaggagcacaatgtgctcacgcagtcacgctgcgaaagacgttgtacatactacatcaaacaccacgcgcctggaaggaaaaaagggtggacgacattctgatgtcgttcggcttcaggaggagcctatcgaagcacgccatctacatcaggtgaaacgatgatttgcagatgacaatatccaccaaccagtataaaagaactctgatcttatacgactgcgaaggatgatgctagctagctgcaatatattgaaaattctgggaacaaacccaggcctcccgatattaccttctgaagcacttgtttttgagcgtgtgctcatcttcttattcagtgaacgatgatatgcgatacacaaaatcttac

SEQ ID NO: 81388 - DNA, 2279 bp, Zea Mays
caaatttgcaatctcgtggcgagggaatcgacaaacccttttgtggagcaggccatacaattctccgtagcagctgctaaagcgaccattattgataaggagaggaaggatgtggtagataagttactgctgcaaggtctgaacattacaattattggtcacaatgatttctattcttatagaaagcagattgaagcacgtggtctccctcttactccggaggacaatcttctggcgacaatgcaagtggacgagaacttgacttggttcacgctattgcccaaagtgcacattgtttagcacaagggaaaattggcagtggttttgatgttagtgctgctgtctatgggagtcaacgctatgctataggtgggactgtcttgccagatgtagtatcagatgttctaacacaaaggtgggatcatgagaataaacagttttcattacctcctctgatgacccttctccttggggaacctgggaccggaggatcatctactccatcaatggttggatctgtgaaacggtggctgaagtctgaccctgagaaatccagagatacatggagtaaactggccattgccaattcaacgctggagaaccaactgaggatcttaaaaggactttctgaaaatcaccatgaagcatatgagtccatggtgaggtcctgtagtcgtctcacatatgggaagtgggcagaggtggctactaaccaacatcaagaattaattataagatcattgttggctgcaagggatgcttgccttgagataaggcttcacatgcgagagatgggcatagcagctggtgttccagtaagattgagccagattcacaaacacggctactagatgccactatgaatatggagggtgttttactggctggagttccgggagctggtggcttcgatgcagtgttctcagttgttttgggggatgcaagtaatgctgtagcacatgcttggagctctgttggcgttctgccacttcctgttcgagaagactgccgtggtgtttcattggaagacgctgacccgagaacaagggaggtgtcagcagctgtatggtccatccaaattaactgattctactgttaatagttctgtttatgcatggtgtaccaatatcatttattaacgatgttcgcattgctgcagttacaattcatagagacaacatagtataaatagtagaagccgttacggattaaagccaaactagcaggctctatcttttataagtacaaaattgtgccgaatgctctatcttttataagtacaaaattgtgccgaatgctaggaagagttcgaggtatgtggttaaataagtgctgcacttgcagcaagatagcacatgagcaaattagtgcagaaaataaggaattctatggatttccatggaattagtgcttctagttgtagctgtggaatatacgtgagcaaatgtcaaggtatcaacaaacttattttgcaccgtgtgttcaggtgacggaggaaccagatgagccttctcttttacataggtaagctggagtaaggcaatgatggaggaaattgagtctatcactcacctcattgacctttcgcccaattatcgagcgatagaggtaaaatgactgttcaagatgaagagggacgagcatgggccgttgactaaacacaagttgaggctcatagtaggtctacgtgcaatgacacgacatccgactacgacaaggtgttcatgtcagtggttagaacagactcggtgcgcctgaccattgcaatcgcggcacacgagggatgacattgcaatcgtggcacatgagggatgataggtgcaccacatggacgccgagtcaatcatttttggacggcgacttgcgagaggagctctacgtgaagcagcagccggttttggcatcaccaccaaggagcacaatgtgctcacgcagtcacgctgcgaaagacgttgtacatactacatcaaacaccacgcgcctggaaggaaaaaagggtggacgacattctgatgtcgttcggcttcaggaggagcctatcgaagcacgccatctacatcaggtgaaacgatgatttgcagatgacaatatccaccaaccagtataaaagaactctgatcttatacgactgcgaaggatgatgctagctagctgcaatatattgaaaattctgggaacaaacccaggcctcccgatattaccttctgaagcacttgtttttgagcgtgtgctcatcttcttattcagtgaacgatgatatgcgatacacaaaatcttac

SEQ ID NO: 81389 - DNA, 2353 bp, Zea Mays
atgttacatgcttgatggacaccactcgagtatatcatttttttgattgaagcacgtggtctccctcttactccggaggtactgctttcattgcctccattctcttcaattacatttaactcagaggttgctaatggaacaatgactggagagaaatgtaaacctgaagtagccaaaactggacttgggtcatcagctgccatgaccacatcagttgttgcagctcttcttcactatcttggtgctgttaacctctcatgttcaggacaatcttctggcgacaatgcaagtggacgagaacttgacttggttcacgctattgcccaaagtgcacattgtttagcacaagggaaaattggcagtggttttgatgttagtgctgctgtctatgggagtcaacgctatgtaaggttttctccagaaatactctcctcggctcaggctataggtgggactgtcttgccagatgtagtatcagatgttctaacacaaaggtgggatcatgagaataaacagttttcattacctcctctgatgacccttctccttggggaacctgggaccggaggatcatctactccatcaatggttggatctgtgaaacggtggctgaagtctgaccctgagaaatccagagatacatggagtaaactggccattgccaattcaacgctggagaaccaactgaggatcttaaaaggactttctgaaaatcaccatgaagcatatgagtccatggtgaggtcctgtagtcgtctcacatatgggaagtgggcagaggtggctactaaccaacatcaagaattaattataagatcattgttggctgcaagggatgcttgccttgagataaggcttcacatgcgagagatgggcatagcagctggtgttccaattgagccagattcacaaacacggctactagatgccactatgaatatggagggtgttttactggctggagttccgggagctggtggcttcgatgcagtgttctcagttgttttgggggatgcaagtaatgctgtagcacatgcttggagctctgttggcgttctgccacttcctgttcgagaagactgccgtggtgtttcattggaagacgctgacccgagaacaagggaggtgtcagcagctgtatggtccatccaaattaactgattctactgttaatagttctgtttatgcatggtgtaccaatatcatttattaacgatgttcgcattgctgcagttacaattcatagagacaacatagtataaatagtagaagccgttacggattaaagccaaactagcaggctctatcttttataagtacaaaattgtgccgaatgctctatcttttataagtacaaaattgtgccgaatgctaggaagagttcgaggtatgtggttaaataagtgctgcacttgcagcaagatagcacatgagcaaattagtgcagaaaataaggaattctatggatttccatggaattagtgcttctagttgtagctgtggaatatacgtgagcaaatgtcaaggtatcaacaaacttattttgcaccgtgtgttcaggtgacggaggaaccagatgagccttctcttttacataggtaagctggagtaaggcaatgatggaggaaattgagtctatcactcacctcattgacctttcgcccaattatcgagcgatagaggtaaaatgactgttcaagatgaagagggacgagcatgggccgttgactaaacacaagttgaggctcatagtaggtctacgtgcaatgacacgacatccgactacgacaaggtgttcatgtcagtggttagaacagactcggtgcgcctgaccattgcaatcgcggcacacgagggatgacattgcaatcgtggcacatgagggatgataggtgcaccacatggacgccgagtcaatcatttttggacggcgacttgcgagaggagctctacgtgaagcagcagccggttttggcatcaccaccaaggagcacaatgtgctcacgcagtcacgctgcgaaagacgttgtacatactacatcaaacaccacgcgcctggaaggaaaaaagggtggacgacattctgatgtcgttcggcttcaggaggagcctatcgaagcacgccatctacatcaggtgaaacgatgatttgcagatgacaatatccaccaaccagtataaaagaactctgatcttatacgactgcgaaggatgatgctagctagctgcaatatattgaaaattctgggaacaaacccaggcctcccgatattaccttctgaagcacttgtttttgagcgtgtgctcatcttcttattcagtgaacgatgatatgcgatacacaaaatcttac

SEQ ID NO: 81390 - DNA, 1846 bp, Zea Mays
acagaaaccctagctacagtgcggctacagtactagtgaaccctagcacaatgtacatgttagccaagactccttggggaacctgggaccggaggatcatctactccatcaatggttggatctgtgaaacggtggctgaagtctgaccctgagaaatccagagatacatggagtaaactggccattgccaattcaacgctggagaaccaactgaggatcttaaaaggactttctgaaaatcaccatgaagcatatgagtccatgtgggcagaggtggctactaaccaacatcaagaattaattataagatcattgttggctgcaagggatgcttgccttgagataaggcttcacatgcgagagatgggcatagcagctggtgttccaattgagccagattcacaaacacggctactagatgccactatgaatatggagggtgttttactggctggagttccgggagctggtggcttcgatgcagtgttctcagttgttttgggggatgcaagtaatgctgtagcacatgcttggagctctgttggcgttctgccacttcctgttcgagaagactgccgtggtgtttcattggaagacgctgacccgagaacaagggaggtgtcagcagctgtatggtccatccaaattaactgattctactgttaatagttctgtttatgcatggtgtaccaatatcatttattaacgatgttcgcattgctgcagttacaattcatagagacaacatagtataaatagtagaagccgttacggattaaagccaaactagcaggctctatcttttataagtacaaaattgtgccgaatgctctatcttttataagtacaaaattgtgccgaatgctaggaagagttcgaggtatgtggttaaataagtgctgcacttgcagcaagatagcacatgagcaaattagtgcagaaaataaggaattctatggatttccatggaattagtgcttctagttgtagctgtggaatatacgtgagcaaatgtcaaggtatcaacaaacttattttgcaccgtgtgttcaggtgacggaggaaccagatgagccttctcttttacataggtaagctggagtaaggcaatgatggaggaaattgagtctatcactcacctcattgacctttcgcccaattatcgagcgatagaggtaaaatgactgttcaagatgaagagggacgagcatgggccgttgactaaacacaagttgaggctcatagtaggtctacgtgcaatgacacgacatccgactacgacaaggtgttcatgtcagtggttagaacagactcggtgcgcctgaccattgcaatcgcggcacacgagggatgacattgcaatcgtggcacatgagggatgataggtgcaccacatggacgccgagtcaatcatttttggacggcgacttgcgagaggagctctacgtgaagcagcagccggttttggcatcaccaccaaggagcacaatgtgctcacgcagtcacgctgcgaaagacgttgtacatactacatcaaacaccacgcgcctggaaggaaaaaagggtggacgacattctgatgtcgttcggcttcaggaggagcctatcgaagcacgccatctacatcaggtgaaacgatgatttgcagatgacaatatccaccaaccagtataaaagaactctgatcttatacgactgcgaaggatgatgctagctagctgcaatatattgaaaattctgggaacaaacccaggcctcccgatattaccttctgaagcacttgtttttgagcgtgtgctcatcttcttattcagtgaacgatgatatgcgatacacaaaatcttac

SEQ ID NO: 81391 - DNA, 2467 bp, Zea Mays
accactggcacacgcccacactacacggacgcccagtctaacgaaacgaaagggacgagattcagcaaggccagaagccgcgccagccaaaggcgaccgccgcccgggcgccagcccactcaaaccctttggtctcctgtcctctcttcgtccaccgcgtcgtcgtctccctccctccgtccccgcacccaccgttatatacaacccccgtcgggactacactcaccaccgcgcctcgaatccatcgctcaactactcgaacccgactcaccggcgcctactcccgcctggctcccgggcccattcgtcgacccgtcgccgggcgaaagcgcgccactaaggtctccaacctccgcccgttgaagcgacggcgccgcatcggaggaactgtagctgttagtccgcctcttctcggcagcgcggggcggagatccgaccggacttgggatcgattccttcccttttctcgattcagggcgctaacagttcctgagggaagcttctggggacatggacatggcattgcccgttgtgaatgccacagcggcggtgctcgcccgtgtctcggctgccttcaatggcccccttgcccgcgcagtcgtctttggggtccatattgatggtcacttggtcgtggaagggcttcttattgcagtcatagtgttccagctctccaggaagagctacaaaccaccaaagaagccactcactgaaaaggagattgatgagctatgtgatgagtgggagccagagccactatgccctccaatcaaggagggggccaaaatagatgctccaacattggaaagtgccgctggaccacatacgattgttgatggtaaagaagttgtgaactttgcatcagcaaactacctcggtttaattggcaacgaaaagattattgattcttgcatcagttcattggagaaatatggtgttggttcttgtggtccacgtggcttttatggaacaattgatgtccatcttgactgtgagtcaaagatagctaaatttttggggactccagactccattctttattcatatgggatttctacaatattcagtgtgatacctgccttctgtaagaaaggagatatcatagtcgctgatgagggtgttcactgggcagtgcaaaatggtctccatctatcaagaagcactgtggtgtacttcaagcacaatgatatggcttcacttgcaagcactttggaaaaacttactcgtggaaataaacgtgctgaaaagattagacgctacattgttgtagaatccatctaccagaattctggccaaattgcccccttggatgagattgtcaggttgaaggagaaatatcgattccgtgttattctggaggagagtcattcttttggggtgcttggcaagtctgggcgtggccttgctgaacattatggagttcctattgaaaaaattgatatcatcactgctggaatgggaaatgcattagctactgatggtggcttttgtacaggaagtgtcagagttgttgatcatcagctctgggtatgttttctctgcatctctgccaccttatcttgccagtgctgctgtttctgccgttaactatcttgaggaaaatccctcagttcttgcaaacctaaggagcaatattgctcttttgcataaagaactatcagatactccagggcttgaaatttccagccatgttctgtcacctatcgtcttccttaagctgaagaagtcgactggttctcctaccactgatctagaccttcttgaaactattgctgacaaggccttgaaggaagactcagttttcgttgtgacatcaaagaaatcaaatctggataggtgcaaacttcccattggaatccgcctgtttgtatcagctggccatactgaattagacatctccaggctttcctcatccttgaagagggtttctgcatcggttctttcagattacttttgatccacatcggattcccttaagacgaaagccatccattttctacgcgctttgtactctaggccgtgtgtgtttggtaaatgtacataacctgtacatttctacatgttatgaattgaccttgttgcaaaataaaattttgtagaatggttatactccctccgttcttttttatttgttgcgttttagttcaaaaatcaactagcgagcaacaaatattcgagaacggaggtattatgttgaagtatagtgcgtttgtgctgtacatcttgctcttttccatgtagtgatgatttccctgaatccacatacgagcttgttctcttttttatcggaagatgaacggacttacttttaaacaaatacaacacccacctttgttgtgttgttagttgactcatttgaatccacaaacaagcatgttcatgcacatttcttattactatataaagcatcagttttcagtcttgctgtcacctttctcctttctgttttatacaaaaataagataaa

SEQ ID NO: 81392 - DNA, 2296 bp, Zea Mays
accactggcacacgcccacactacacggacgcccagtctaacgaaacgaaagggacgagattcagcaaggccagaagccgcgccagccaaaggcgaccgccgcccgggcgccagcccactcaaaccctttggtctcctgtcctctcttcgtccaccgcgtcgtcgtctccctccctccgtccccgcacccaccgttatatacaacccccgtcgggactacactcaccaccgcgcctcgaatccatcgctcaactactcgaacccgactcaccggcgcctactcccgcctggctcccgggcccattcgtcgacccgtcgccgggcgaaagcgcgccactaaggtctccaacctccgcccgttgaagcgacggcgccgcatcggaggaactgtagctgttagtccgcctcttctcggcagcgcggggcggagatccgaccggacttgggatcgattccttcccttttctcgattcagggcgctaacagttcctgagggaagcttctggggacatggacatggcattgcccgttgtgaatgccacagcggcggtgctcgcccgtgtctcggctgccttcaatggcccccttgcccgcgcagtcgtctttggggtccatattgatggtcacttggtcgtggaagggcttcttattgcagtcatagtgttccagctctccaggaagagctacaaaccaccaaagaagccactcactgaaaaggagattgatgagctatgtgatgagtgggagccagagccactatgccctccaatcaaggagggggccaaaatagatgctccaacattggaaagtgccgctggaccacatacgattgttgatggtaaagaagttgtgaactttgcatcagcaaactacctcggtttaattggcaacgaaaagattattgattcttgcatcagttcattggagaaatatggtgttggttcttgtggtccacgtggcttttatggaacaattgatgtccatcttgactgtgagtcaaagatagctaaatttttggggactccagactccattctttattcatatgggatttctacaatattcagtgtgatacctgccttctgtaagaaaggagatatcatagtcgctgatgagggtgttcactgggcagtgcaaaatggtctccatctatcaagaagcactgtggtgtacttcaagcacaatgatatggcttcacttgcaagcactttggaaaaacttactcgtggaaataaacgtgctgaaaagattagacgctacattgttgtagaatccatctaccagaattctggccaaattgcccccttggatgagattgtcaggttgaaggagaaatatcgattccgtgttattctggaggagagtcattcttttggggtgcttggcaagtctgggcgtggccttgctgaacattatggagttcctgtgagtgtttggcctcaacttttcttaatgtttcaccgtgttacaccattccagtgaactatcagatactccagggcttgaaatttccagccatgttctgtcacctatcgtcttccttaagctgaagaagtcgactggttctcctaccactgatctagaccttcttgaaactattgctgacaaggccttgaaggaagactcagttttcgttgtgacatcaaagaaatcaaatctggataggtgcaaacttcccattggaatccgcctgtttgtatcagctggccatactgaattagacatctccaggctttcctcatccttgaagagggtttctgcatcggttctttcagattacttttgatccacatcggattcccttaagacgaaagccatccattttctacgcgctttgtactctaggccgtgtgtgtttggtaaatgtacataacctgtacatttctacatgttatgaattgaccttgttgcaaaataaaattttgtagaatggttatactccctccgttcttttttatttgttgcgttttagttcaaaaatcaactagcgagcaacaaatattcgagaacggaggtattatgttgaagtatagtgcgtttgtgctgtacatcttgctcttttccatgtagtgatgatttccctgaatccacatacgagcttgttctcttttttatcggaagatgaacggacttacttttaaacaaatacaacacccacctttgttgtgttgttagttgactcatttgaatccacaaacaagcatgttcatgcacatttcttattactatataaagcatcagttttcagtcttgctgtcacctttctcctttctgttttatacaaaaataagataaa

SEQ ID NO: 81393 - DNA, 1087 bp, Zea Mays
ccgccttccacatggcctcaaaccaaacgaaccaaaccctacgtagcgagcacaccgcgggcggcggcataagcatggggagcgtcgcgcccgccgaactggtcctgaaggcggcgtgcgagcgctgcggtgcagcgtcgggactctacgcgacgtcgtgccggcacaccacgctctgctccgactgtggcatgaccttggcgctcgcccgcgggcgttgcaccgtgtgcagcgcccccgttaccaggctcatccgggagtacgatgtccgggtggatacctccgcggagaaggagaagacccactacatcggcaggttcaccaccggcttgccgcccttatcgaatgagaggagcgcagggaatagatggactcttcgcaaggatgtcccccatggacagcagcttactgggaatatgcgggacaagcactacagcaagatgccatggattctggaggatgagacgggggaacatcagtatcagggccaaactgaggatccacctgccacatactattcgcttacgcaaaaaggcaatgacatgattgctgttcaagttggttcctggtacaacttcagtaaaattgcacagtacaaacagctgaccttggaagaagctgaagagaaaatgaatagaaggagaagcagtgcatctgggtatgaacgatggatgatgaaggcagctacaaatggacctgatgcctttagttcagttgtgaagaggcttgatgatgtaaatagaggggcaacaaacggtgttcaccccaagaaaggagataggaatgagaatggaaatcaatctgacaaagttgatgacaaagaagaagagggagctgcaaggaaaaacaggcttgggcttactatgaaggacatgggcgaggattatgaggatagtggaaacgacatagaatttgatttggatgatgaaattgagaaaggtgatgattgggagcacgaggagatcttcactgatgatgatgaggttgtggatgttgatatagagcaaagacctgagttagctgatcctgaggctgctcctcctgaaattaaacaggatcaacaattcgccattcataagatgtgata

SEQ ID NO: 81394 - DNA, 1904 bp, Zea Mays
ctcaaaccaaacgaaccaaaccctacgtagcgagcacaccgcgggcggcggcataagcatggggagcgtcgcgcccgccgaactggtcctgaaggcggcgtgcgagcgctgcggtgcagcgtcgggactctacgcgacgtcgtgccggcacaccacgctctgctccgactgtggcatgaccttggcgctcgcccgcgggcgttgcaccgtgtgcagcgcccccgttaccaggctcatccgggagtacgatgtccgggtggatacctccgcggagaaggagaagacccactacatcggcaggttcaccaccggcttgccgcccttatcgaatgagaggagcgcagggaatagatggactcttcgcaaggatgtcccccatggacagcagcttactgggaatatgcgggacaagcactacagcaagatgccatggattctggaggatgagacgggggaacatcagtatcagggccaaactgaggatccacctgccacatactattcgcttacgcaaaaaggcaatgacatgattgctgttcaagttggttcctggtacaacttcagtaaaattgcacagtacaaacagctgaccttggaagaagctgaagagaaaatgaatagaaggagaagcagtgcatctgggtatgaacgatggatgatgaaggcagctacaaatggacctgatgcctttagttcagttgtgaagaggcttgatgatgtaaatagaggggcaacaaacggtgttcaccccaagaaaggagataggaatgagaatggaaatcaatctgacaaagttgatgacaaagaagaagagggagctgcaaggaaaaacaggcttgggcttactatgaaggacatgggcgaggattatgaggatagtggaaacgacatagaatttgatttggatgatgaaattgagaaaggtgatgattgggagcacgaggagatcttcactgatgatgatgaggttgtggatgttgatatagagcaaagacctgagttagctgatcctgaggctgctcctcctgaaattaaacaggatgacaacgaggatgaactaggctgcagtgacaacttgagcaagtccggccaggagctaaagaggctgctccgccgagctgctggggaaaatgagtctgatgttgacgacaaaagcacatatatgacctaccctcgccaaaacctgctccaaaacttgtacccaaaagtgaaccagatgatagcagccctgctaaaccaacaccatcagggcacgctcagagcgctacaccttcatccaaatccactcaaaagaggaaatcagggggtggtgatgcaaatatttctaatggtgcaccctcgaaaaagataaagatggaacatgaaaccggaacattggctgtcaaggatgaaaatccgtcttatttggaaccaacttcgaaagcatctctttcagcaagaagagaatcatcacccattacagaggaagaagtcaggacagtacttcgtgcaatttcacccacgacaagccaagatctggtgtcgaggttcaagactcgtctaataactcaagaggacaagaaagcatttttgggcattgtgacgaaaatatctcgcatacttaagcacaacggcggtaggtatatcgttcttcggcacgaacatatgtgaacagacaaattactctacctgtatagtgcaacagattctttaatgccacaaggcaacagcatgagtttttccccctagcttagagcttagggtttaggtattaggtatattgggtactggcaaccaagatgctcagcaagaggcctctgcagtttttctcccttataatgtacttcctgagagctgagaatgaaatgagaaaacgagaatggaatctatggtagattcttataatccaatcacaagattttgag

SEQ ID NO: 81395 - DNA, 1901 bp, Zea Mays
aacgaaccaaaccctacgtagcgagcacaccgcgggcggcggcataagcatggggagcgtcgcgcccgccgaactggtcctgaaggcggcgtgcgagcgctgcggtgcagcgtcgggactctacgcgacgtcgtgccggcacaccacgctctgctccgactgtggcatgaccttggcgctcgcccgcgggcgttgcaccgtgtgcagcgcccccgttaccaggctcatccgggagtacgatgtccgggtggatacctccgcggagaaggagaagacccactacatcggcaggttcaccaccggcttgccgcccttatcgaatgagaggagcgcagggaatagatggactcttcgcaaggatgtcccccatggacagcagcttactgggaatatgcgggacaagcactacagcaagatgccatggattctggaggatgagacgggggaacatcagtatcagggccaaactgaggatccacctgccacatactattcgcttacgcaaaaaggcaatgacatgattgctgttcaagttggttcctggtacaacttcagtaaaattgcacagtacaaacagctgaccttggaagaagctgaagagaaaatgaatagaaggagaagcagtgcatctgggtatgaacgatggatgatgaaggcagctacaaatggacctgatgcctttagttcagttgtgaagaggcttgatgatgtaaatagaggggcaacaaacggtgttcaccccaagaaaggagataggaatgagaatggaaatcaatctgacaaagttgatgacaaagaagaagagggagctgcaaggaaaaacaggcttgggcttactatgaaggacatgggcgaggattatgaggatagtggaaacgacatagaatttgatttggatgatgaaattgagaaaggtgatgattgggagcacgaggagatcttcactgatgatgatgaggttgtggatgttgatatagagcaaagacctgagttagctgatcctgaggctgctcctcctgaaattaaacaggatgacaacgaggatgaactaggctgcagtgacaacttgagcaagtccggccaggagctaaagaggctgctccgccgagctgctggggaaaatgagtctgatgttgacgacaaaagcacatatgaagatgacctaccctcgccaaaacctgctccaaaacttgtacccaaaagtgaaccagatgatagcagccctgctaaaccaacaccatcagggcacgctcagagcgctacaccttcatccaaatccactcaaaagaggaaatcagggggtggtgatgcaaatatttctaatggtgcaccctcgaaaaagataaagatggaacatgtacggcagtgtcttcattctgcacgctacacgtgaaatttgagttgcagacatattaagctgcacctgcaccagcaagaagagaatcatcacccattacagaggaagaagtcaggacagtacttcgtgcaatttcacccacgacaagccaagatctggtgtcgaggttcaagactcgtctaataactcaagaggacaagaaagcatttttgggcattgtgacgaaaatatctcgcatacttaagcacaacggcggtaggtatatcgttcttcggcacgaacatatgtgaacagacaaattactctacctgtatagtgcaacagattctttaatgccacaaggcaacagcatgagtttttccccctagcttagagcttagggtttaggtattaggtatattgggtactggcaaccaagatgctcagcaagaggcctctgcagtttttctcccttataatgtacttcctgagagctgagaatgaaatgagaaaacgagaatggaatctatggtagattcttataatccaatcacaagattttgag

SEQ ID NO: 81396 - DNA, 1741 bp, Zea Mays
agcatggggagcgtcgcgcccgccgaactggtcctgaaggcggcgtgcgagcgctgcggtgcagcgtcgggactctacgcgacgtcgtgccggcacaccacgctctgctccgactgtggcatgaccttggcgctcgcccgcgggcgttgcaccgtgtgcagcgcccccgttaccaggctcatccgggagtacgatgtccgggtggatacctccgcggagaaggagaagacccactacatcggcaggttcaccaccggcttgccgcccttatcgaatgagaggagcgcagggaatagatggactcttcgcaaggatgtcccccatggacagcagcttactgggaatatgcgggacaagcactacagcaagatgccatggattctggaggatgagacgggggaacatcagtatcagggccaaactgaggatccacctgccacatactattcgcttacgcaaaaagcagtgcatctgggtatgaacgatggatgatgaaggcagctacaaatggacctgatgcctttagttcagttgtgaagaggcttgatgatgtaaatagaggggcaacaaacggtgttcaccccaagaaaggagataggaatgagaatggaaatcaatctgacaaagttgatgacaaagaagaagagggagctgcaaggaaaaacaggcttgggcttactatgaaggacatgggcgaggattatgaggatagtggaaacgacatagaatttgatttggatgatgaaattgagaaaggtgatgattgggagcacgaggagatcttcactgatgatgatgaggttgtggatgttgatatagagcaaagacctgagttagctgatcctgaggctgctcctcctgaaattaaacaggatgacaacgaggatgaactaggctgcagtgacaacttgagcaagtccggccaggagctaaagaggctgctccgccgagctgctggggaaaatgagtctgatgttgacgacaaaagcacatatgaagatgacctaccctcgccaaaacctgctccaaaacttgtacccaaaagtgaaccagatgatagcagccctgctaaaccaacaccatcagggcacgctcagagcgctacaccttcatccaaatccactcaaaagaggaaatcagggggtggtgatgcaaatatttctaatggtgcaccctcgaaaaagataaagatggaacatgaaaccggaacattggctgtcaaggatgaaaatccgtcttatttggaaccaacttcgaaagcatctctttcagcaagaagagaatcatcacccattacagaggaagaagtcaggacagtacttcgtgcaatttcacccacgacaagccaagatctggtgtcgaggttcaagactcgtctaataactcaagaggacaagaaagcatttttgggcattgtgacgaaaatatctcgcatacttaagcacaacggcggtaggtatatcgttcttcggcacgaacatatgtgaacagacaaattactctacctgtatagtgcaacagattctttaatgccacaaggcaacagcatgagtttttccccctagcttagagcttagggtttaggtattaggtatattgggtactggcaaccaagatgctcagcaagaggcctctgcagtttttctcccttataatgtacttcctgagagctgagaatgaaatgagaaaacgagaatggaatctatggtagattcttataatccaatcacaagattttgag

SEQ ID NO: 81397 - DNA, 1887 bp, Zea Mays
agcatggggagcgtcgcgcccgccgaactggtcctgaaggcggcgtgcgagcgctgcggtgcagcgtcgggactctacgcgacgtcgtgccggcacaccacgctctgctccgactgtggcatgaccttggcgctcgcccgcgggcgttgcaccgtgtgcagcgcccccgttaccaggctcatccgggagtacgatgtccgggtggatacctccgcggagaaggagaagacccactacatcggcaggttcaccaccggcttgccgcccttatcgaatgagaggagcgcagggaatagatggactcttcgcaaggatgtcccccatggacagcagcttactgggaatatgcgggacaagcactacagcaagatgccatggattctggaggatgagacgggggaacatcagtatcagggccaaactgaggatccacctgccacatactattcgcttacgcaaaaaggcaatgacatgattgctgttcaagttggttcctggtacaacttcagtaaaattgcacagtacaaacagctgaccttggaagaagctgaagagaaaatgaatagaaggagaagcagtgcatctgggtatgaacgatggatgatgaaggcagctacaaatggacctgatgcctttagttcagttgtgaagaggcttgatgatgtaaatagaggggcaacaaacggtgttcaccccaagaaaggagataggaatgagaatggaaatcaatctgacaaagttgatgacaaagaagaagagggagctgcaaggaaaaacaggcttgggcttactatgaaggacatgggcgaggattatgaggatagtggaaacgacatagaatttgatttggatgatgaaattgagaaaggtgtatacatatcaaatactacccggaagaatgagtgatgattgggagcacgaggagatcttcactgatgatgatgaggttgtggatgttgatatagagcaaagacctgagttagctgatcctgaggctgctcctcctgaaattaaacaggatgacaacgaggatgaactaggctgcagtgacaacttgagcaagtccggccaggagctaaagaggctgctccgccgagctgctggggaaaatgagtctgatgttgacgacaaaagcacatatgaagatgacctaccctcgccaaaacctgctccaaaacttgtacccaaaagtgaaccagatgatagcagccctgctaaaccaacaccatcagggcacgctcagagcgctacaccttcatccaaatccactcaaaagaggaaatcagggggtggtgatgcaaatatttctaatggtgcaccctcgaaaaagataaagatggaacatgaaaccggaacattggctgtcaaggatgaaaatccgtcttatttggaaccaacttcgaaagcatctctttcagcaagaagagaatcatcacccattacagaggaagaagtcaggacagtacttcgtgcaatttcacccacgacaagccaagatctggtgtcgaggttcaagactcgtctaataactcaagaggacaagaaagcatttttgggcattgtgacgaaaatatctcgcatacttaagcacaacggcggtaggtatatcgttcttcggcacgaacatatgtgaacagacaaattactctacctgtatagtgcaacagattctttaatgccacaaggcaacagcatgagtttttccccctagcttagagcttagggtttaggtattaggtatattgggtactggcaaccaagatgctcagcaagaggcctctgcagtttttctcccttataatgtacttcctgagagctgagaatgaaatgagaaaacgagaatggaatctatggtagattcttataatccaatcacaagattttgag

SEQ ID NO: 81398 - DNA, 2558 bp, Zea Mays
atggatggcatccccacgaccccaccccacctgcctgcgatagagaggcggagacaagggtacattaataattggctaaaagaaatgtcgctcgctggtacacccatgcggccatgcgccatggttcagcttgaacaggggaggagagcagagcgagagggccactcgggttggttagaagaacccaatgcaagtgtgagtgagctgacggcacggcggacgcgctcgcctctcctctcctctcctctcctctcctcttcttccggctctccctctccgcatgccattccaacgcattaccggtatttttagccgccggaggagacgggtagctgcgtagccactagcgagagagagagggaggggagaaaccatagctcctggccgttctgcctgcccatccaccgcggcgccggccgtccgtctcccgtccacatccctcctcctctcctgcaaggttcctgtgcgtagcgcagaggggtcggagtcggagtcggagtcggagaagatgatgggcgggttcctctccagggtcctcctgtaagcgctcccttgctccgaatcttgtaacgtcggtgttctttgtagattgacactttgaggttggagccttatcagaggcaccagtgttccggttttaataaatctgttttttttttcaaatttggatttgtggggacccattcggagagttcagcagcctctctcttggtttaacttcactcattcgctcctccttaatatgttgctttcttcaaaacaaaacaaaacaaaacaaaaagaggaggagatgcgttcgttattgtcgatttgcccaccctggcctcttcgccggaaaatgaggctgagagcacgcaaccattcggaagtattttattcttctcgaggagcatatgggggcaagtttttaattcattgcacaacggtcaatggttctgttcgtttattcttccggtccgactcattctttttgaagatgatgttctaacaatcatatctcttcaaatggttaagatcggaggatactctcgtatgagttaagataggtcaaactgctatgctcttttttaaaaaaaaatctttggcctgcttcatcaagaactagatttgatcctgttcatctctgtgttgatgaattatctacagtttagctataaacgcgtctgaaatgttagtctattgaaggatactttgatactgaagccatgcagctttaaattgccagcttttcttttttgtggtttattacggatgaataaaaggggaaaaacaaaataaatagtcttttactgaaacatcaacttactatacgaggaaggacatgcttttgtcacgatatgcaatcgctaacatgccatttatcttgtggcatttgatgtgccgatttcctgtaggttggcttttggctatgcctatcctgcctacgaatgctacaagactgttgaactgaacaaaccagagattgcgcagctcatattttggtgtcagtattggattttagttgccctgttgacagttttggagagattcggagatttcacaatatcatggctaccgttctactcggaagcaaagctgatgttctttgtatacttgtggtaccctaagacaaagggaactacgtatgtttatggaactttctttaaaccatatatttctcagcatgagaatgaaatcgaccggaatctccttgagctgagagctcgagccaccgacacggttgtactttattttcagaaggctgcttcggcaggacaaagtactttctttgacgttttaaaatatgttgctgcccagtcaccttctcagaaatcaaggcaacgccttcatcaggattcacagcagccgccacaacaacaacaaccacaagtgcaggtgcagcaggcgcaaccacaaaaacaagcagcacctgttatgcgcagagcatcatctattgctgctcggcaagcagcaatggcacagcaatctcaggagactaaacccgtttcatcttcgcccaagatcaagcgtcaaacatcagcgagatctggttcagtggcatccacaaagcctccggtagctgcatccgcgctaaaacctggtggtagcccaaagaaaggcgaggtcaaacctgctgccgacccagttcaaactccaaccacaggtgccgattcaccgaaacccgagcctagcgccccatcactccctggagccgaaggggtggacaagatggccatcgacgaggccagtggtgacgccccagagggcgcagaagagcttgaccctgcgctcgaagaggagacgccgatggaggagacgatccgtgtgacgcgcgccaagctaaggaggcgcacggccaccgaagatcctgctgggaattagctgttagcggcacgagcaaagaacgcatgcaattgcaacattatacacttcaatctggtcactccctgagtatcttcgggatgtcacatccagccgcaattttcagccggcagggaaacaagaacagctgtttttctatcattctctgtgtacatgtatctgtttgagtccctggtacacgctgcagttagtctggc

SEQ ID NO: 81399 - DNA, 2563 bp, Zea Mays
atggatggcatccccacgaccccaccccacctgcctgcgatagagaggcggagacaagggtacattaataattggctaaaagaaatgtcgctcgctggtacacccatgcggccatgcgccatggttcagcttgaacaggggaggagagcagagcgagagggccactcgggttggttagaagaacccaatgcaagtgtgagtgagctgacggcacggcggacgcgctcgcctctcctctcctctcctctcctctcctcttcttccggctctccctctccgcatgccattccaacgcattaccggtatttttagccgccggaggagacgggtagctgcgtagccactagcgagagagagagggaggggagaaaccatagctcctggccgttctgcctgcccatccaccgcggcgccggccgtccgtctcccgtccacatccctcctcctctcctgcaaggttcctgtgcggtatgtagcgcagaggggtcggagtcggagtcggagtcggagaagatgatgggcgggttcctctccagggtcctcctgtaagcgctcccttgctccgaatcttgtaacgtcggtgttctttgtagattgacactttgaggttggagccttatcagaggcaccagtgttccggttttaataaatctgttttttttttcaaatttggatttgtggggacccattcggagagttcagcagcctctctcttggtttaacttcactcattcgctcctccttaatatgttgctttcttcaaaacaaaacaaaacaaaacaaaaagaggaggagatgcgttcgttattgtcgatttgcccaccctggcctcttcgccggaaaatgaggctgagagcacgcaaccattcggaagtattttattcttctcgaggagcatatgggggcaagtttttaattcattgcacaacggtcaatggttctgttcgtttattcttccggtccgactcattctttttgaagatgatgttctaacaatcatatctcttcaaatggttaagatcggaggatactctcgtatgagttaagataggtcaaactgctatgctcttttttaaaaaaaaatctttggcctgcttcatcaagaactagatttgatcctgttcatctctgtgttgatgaattatctacagtttagctataaacgcgtctgaaatgttagtctattgaaggatactttgatactgaagccatgcagctttaaattgccagcttttcttttttgtggtttattacggatgaataaaaggggaaaaacaaaataaatagtcttttactgaaacatcaacttactatacgaggaaggacatgcttttgtcacgatatgcaatcgctaacatgccatttatcttgtggcatttgatgtgccgatttcctgtaggttggcttttggctatgcctatcctgcctacgaatgctacaagactgttgaactgaacaaaccagagattgcgcagctcatattttggtgtcagtattggattttagttgccctgttgacagttttggagagattcggagatttcacaatatcatggctaccgttctactcggaagcaaagctgatgttctttgtatacttgtggtaccctaagacaaagggaactacgtatgtttatggaactttctttaaaccatatatttctcagcatgagaatgaaatcgaccggaatctccttgagctgagagctcgagccaccgacacggttgtactttattttcagaaggctgcttcggcaggacaaagtactttctttgacgttttaaaatatgttgctgcccagtcaccttctcagaaatcaaggcaacgccttcatcaggattcacagcagccgccacaacaacaacaaccacaagtgcaggtgcagcaggcgcaaccacaaaaacaagcagcacctgttatgcgcagagcatcatctattgctgctcggcaagcagcaatggcacagcaatctcaggagactaaacccgtttcatcttcgcccaagatcaagcgtcaaacatcagcgagatctggttcagtggcatccacaaagcctccggtagctgcatccgcgctaaaacctggtggtagcccaaagaaaggcgaggtcaaacctgctgccgacccagttcaaactccaaccacaggtgccgattcaccgaaacccgagcctagcgccccatcactccctggagccgaaggggtggacaagatggccatcgacgaggccagtggtgacgccccagagggcgcagaagagcttgaccctgcgctcgaagaggagacgccgatggaggagacgatccgtgtgacgcgcgccaagctaaggaggcgcacggccaccgaagatcctgctgggaattagctgttagcggcacgagcaaagaacgcatgcaattgcaacattatacacttcaatctggtcactccctgagtatcttcgggatgtcacatccagccgcaattttcagccggcagggaaacaagaacagctgtttttctatcattctctgtgtacatgtatctgtttgagtccctggtacacgctgcagttagtctggc

SEQ ID NO: 81400 - DNA, 798 bp, Zea Mays
gggaggggcaacatggtctaaagaaaaccttaacgactctcagtgaggcttaaagccgcgctatgccgtgctggagatcgtcacatgtcacaggtgtgcattttttggtagatgccatactagcaaaggcgcatcttcggggtgccaatattccaaatttctcgatcaaacatgctctattgccctgtatctatcctctatcgaagccggagaccccagaaagagtccgtaaacaactcccggccatggcgaccgcagaccgggtcgccgccaccttcctctcctctttccccactcaccatccccgccccttttcctccgtttccctcgtgacaaaccctgtcctacccgtctcccttcgggccgctgtcacaggtggcccacggctcgcctcccgtctccgggtccaccgcgtcggcgccgccgtcgcccagcttcccaccacgaatccggaggtagcttctggggagaagaagatcagatggtcatcaagggctgtgcggtcttttgcgatggcagagctggaggcccggaagatgaggtaccctaccacaggcaccgaggggctcctcatgggcattcttgttgaaggaactagtggcgcagcaaaacttttgcgtgctaatggaaccacacttctcaaagtgcgtgaggaggcagcgaatgttcttgggaaatcagaaatgttttactttagtcccatgcatccaccattgacagaagctgcacaacgagcccttgattgggctgtcaatgaaaaattgaaatcagccatgactacactaggtgaaccgacga

SEQ ID NO: 81401 - DNA, 1168 bp, Zea Mays
gggaggggcaacatggtctaaagaaaaccttaacgactctcagtgaggcttaaagccgcgctatgccgtgctggagatcgtcacatgtcacaggaatccggaggtagcttctggggagaagaagatcagatggtcatcaagggctgtgcggtcttttgcgatggcagagctggaggcccggaagatgaggtaccctaccacaggcaccgaggggctcctcatgggcattcttgttgaagtccattatttcaggaactagtggcgcagcaaaacttttgcgtgctaatggaaccacacttctcaaagtgcgtgaggaggcagcgaatgttcttgggaaatcagaaatgttttactttagtcccatgcatccaccattgacagaagctgcacaacgagcccttgattgggctgtcaatgaaaaattgaaatcaggtgaggatggagaagtaaccgccaatcatttgctactggggatatggtcagataaagagtcggctggtcataaaatcctgtattcgcttggatttgacgatgagaaagccagtttactggccaaaacggctggtgaagaggctgcaatgagtcttagagagcaaggagagcacctaatttattcgtcaacttaagttggtattgtgcactagcttttatgcacttcttggtgcctcgagacgttgacctggagaggctgcctctacaaactttagaacttattatggagatatgttaggtcagatacgatatttgtactctcacgattgccgatgcctgtgaaaacgttgcgctttgtttgtcacggtgaatgcttgtgttcctttatcagctggatttgggaactgctcgtagaaaacaagtcaacaacaacaaaacttgtagggtccagtgggcctgacgagtccttaaaaaaatttgttcacttgcagcctaaatcctgacagtcgagaatttcatctgaagtcactgatatccgcaaattctgaaggaagctattgggacacattcataggatgcaaatgacataccacatggaagtctttttttaggctagtttgggaacaccattttcccaagggattcttattttctcaagagagttatgtgccatttgtcagggaaaagaatatattactactgccttttctttatcaggctccaggcaggaaaagct

SEQ ID NO: 81402 - DNA, 1512 bp, Zea Mays
gggaggggcaacatggtctaaagaaaaccttaacgactctcagtgaggcttaaagccgcgctatgccgtgctggagatcgtcacatgtcacaggtgtgcattttttggtagatgccatactagcaaaggcgcatcttcggggtgccaatattccaaatttctcgatcaaacatgctctattgccctgtatctatcctctatcgaagccggagaccccagaaagagtccgtaaacaactcccggccatggcgaccgcagaccgggtcgccgccaccttcctctcctctttccccactcaccatccccgccccttttcctccgtttccctcgtgacaaaccctgtcctacccgtctcccttcgggccgctgtcacaggtggcccacggctcgcctcccgtctccgggtccaccgcgtcggcgccgccgtcgcccagcttcccaccacgaatccggaggtagcttctggggagaagaagatcaggttagatggtcatcaagggctgtgcggtcttttgcgatggcagagctggaggcccggaagatgaggtaccctaccacaggcaccgaggggctcctcatgggcattcttgttgaaggaactagtggcgcagcaaaacttttgcgtgctaatggaaccacacttctcaaagtgcgtgaggaggcagcgaatgttcttgggaaatcagaaatgttttactttagtcccatgcatccaccattgacagaagctgcacaacgagcccttgattgggctgtcaatgaaaaattgaaatcaggtgaggatggagaagtaaccgccaatcatttgctactggggatatggtcagataaagagtcggctggtcataaaatcctgtattcgcttggatttgacgatgagaaagccagtttactggccaaaacggctggtgaagaggctgcaatgagtcttagagagcaaggagagcacctaatttattcgtcaacttaagttggtattgtgcactagcttttatgcacttcttggtgcctcgagacgttgacctggagaggctgcctctacaaactttagaacttattatggagatatgttaggtcagatacgatatttgtactctcacgattgccgatgcctgtgaaaacgttgcgctttgtttgtcacggtgaatgcttgtgttcctttatcagctggatttgggaactgctcgtagaaaacaagtcaacaacaacaaaacttgtagggtccagtgggcctgacgagtccttaaaaaaatttgttcacttgcagcctaaatcctgacagtcgagaatttcatctgaagtcactgatatccgcaaattctgaaggaagctattgggacacattcataggatgcaaatgacataccacatggaagtctttttttaggctagtttgggaacaccattttcccaagggattcttattttctcaagagagttatgtgccatttgtcagggaaaagaatatattactactgccttttctttatcaggctccaggcaggaaaagct

SEQ ID NO: 81403 - DNA, 1471 bp, Zea Mays
gggaggggcaacatggtctaaagaaaaccttaacgactctcagtgaggcttaaagccgcgctatgccgtgctggagatcgtcacatgtcacaggtgtgcattttttggtagatgccatactagcaaaggcgcatcttcggggtgccaatattccaaatttctcgatcaaacatgctctattgccctgtatctatcctctatcgaagccggagaccccagaaagagtccgtaaacaactcccggccatggcgaccgcagaccgggtcgccgccaccttcctctcctctttccccactcaccatccccgccccttttcctccgtttccctcgtgacaaaccctgtcctacccgtctcccttcgggccgctgtcacaggtggcccacggctcgcctcccgtctccgggtccaccgcgtcggcgccgccgtcgcccagcttcccaccacatggtcatcaagggctgtgcggtcttttgcgatggcagagctggaggcccggaagatgaggtaccctaccacaggcaccgaggggctcctcatgggcattcttgttgaaggaactagtggcgcagcaaaacttttgcgtgctaatggaaccacacttctcaaagtgcgtgaggaggcagcgaatgttcttgggaaatcagaaatgttttactttagtcccatgcatccaccattgacagaagctgcacaacgagcccttgattgggctgtcaatgaaaaattgaaatcaggtgaggatggagaagtaaccgccaatcatttgctactggggatatggtcagataaagagtcggctggtcataaaatcctgtattcgcttggatttgacgatgagaaagccagtttactggccaaaacggctggtgaagaggctgcaatgagtcttagagagcaaggagagcacctaatttattcgtcaacttaagttggtattgtgcactagcttttatgcacttcttggtgcctcgagacgttgacctggagaggctgcctctacaaactttagaacttattatggagatatgttaggtcagatacgatatttgtactctcacgattgccgatgcctgtgaaaacgttgcgctttgtttgtcacggtgaatgcttgtgttcctttatcagctggatttgggaactgctcgtagaaaacaagtcaacaacaacaaaacttgtagggtccagtgggcctgacgagtccttaaaaaaatttgttcacttgcagcctaaatcctgacagtcgagaatttcatctgaagtcactgatatccgcaaattctgaaggaagctattgggacacattcataggatgcaaatgacataccacatggaagtctttttttaggctagtttgggaacaccattttcccaagggattcttattttctcaagagagttatgtgccatttgtcagggaaaagaatatattactactgccttttctttatcaggctccaggcaggaaaagct

SEQ ID NO: 81404 - DNA, 1165 bp, Zea Mays
gggaggggcaacatggtctaaagaaaaccttaacgactctcagtgaggcttaaagccgcgctatgccgtgctggagatcgtcacatgtcacaggaatccggaggtagcttctggggagaagaagatcagatggtcatcaagggctgtgcggtcttttgcgatggcagagctggaggcccggaagatgaggtaccctaccacaggcaccgaggggctcctcatgggcattcttgttgaaggtgaggcaaggaactagtggcgcagcaaaacttttgcgtgctaatggaaccacacttctcaaagtgcgtgaggaggcagcgaatgttcttgggaaatcagaaatgttttactttagtcccatgcatccaccattgacagaagctgcacaacgagcccttgattgggctgtcaatgaaaaattgaaatcaggtgaggatggagaagtaaccgccaatcatttgctactggggatatggtcagataaagagtcggctggtcataaaatcctgtattcgcttggatttgacgatgagaaagccagtttactggccaaaacggctggtgaagaggctgcaatgagtcttagagagcaaggagagcacctaatttattcgtcaacttaagttggtattgtgcactagcttttatgcacttcttggtgcctcgagacgttgacctggagaggctgcctctacaaactttagaacttattatggagatatgttaggtcagatacgatatttgtactctcacgattgccgatgcctgtgaaaacgttgcgctttgtttgtcacggtgaatgcttgtgttcctttatcagctggatttgggaactgctcgtagaaaacaagtcaacaacaacaaaacttgtagggtccagtgggcctgacgagtccttaaaaaaatttgttcacttgcagcctaaatcctgacagtcgagaatttcatctgaagtcactgatatccgcaaattctgaaggaagctattgggacacattcataggatgcaaatgacataccacatggaagtctttttttaggctagtttgggaacaccattttcccaagggattcttattttctcaagagagttatgtgccatttgtcagggaaaagaatatattactactgccttttctttatcaggctccaggcaggaaaagct

SEQ ID NO: 81405 - DNA, 1438 bp, Zea Mays
gggaggggcaacatggtctaaagaaaaccttaacgactctcagtgaggcttaaagccgcgctatgccgtgctggagatcgtcacatgtcacaggaatccggaggtagcttctggggagaagaagatcagatggtcatcaagggctgtgcggtcttttgcgatggcagagctggaggcccggaagatgaggtaccctaccacaggcaccgaggggctcctcatgggcattcttgttgaaggaactagtggcgcagcaaaacttttgcgtgctaatggaaccacacttctcaaagtgcgtgaggaggcagcgaatgttcttgggaaatcagaaatgttttactttagtcccatgcatccaccattgacagaagctgcacaacgagcccttgattgggctgtcaatgaaaaattgaaatcaggtgaggatggagaagtaaccgccaatcatttgctactggggatatggtcagataaagagtcggctggtcataaaatcctgtattcgcttggatttgacgatgagaaagccagtttactggccaaaacggctggtgaagaggctgcaatgagtcttagagagcaaggagagcacctaatttattcgtcaacttaagttggtattgtgcactagcttttatgcacttcttggtgcctcgagacgttgacctggagaggctgcctctacaaactttagaacttattatggagatatgttaggtcagatacgatatttgtactctcacgattgccgatgcctgtgaaaacgttgcgctttgtttgtcacggtgaatgcttgtgttcctttatcagctggatttgggaactgctcgtagaaaacaagtcaacaacaacaaaacttgtagggtccagtgggcctgacgagtccttaaaaaaatttgttcacttgcagcctaaatcctgacagtcgagaatttcatctgaagtcactgatatccgcaaattctgaaggaagctattgggacacattcataggatgcaaatgacataccacatggaagtctttttttaggctagtttgggaacaccattttcccaagggattcttattttctcaagagagttatgtgccatttgtcagggaaaagaatatattactactgccttttctttatcaggctccaggcaggaaaagctgcacgcactttacaccaaacctgcacgaggttgaattctgcttgtttgcccgggcactaataagctgatggagactatcaggcagttcttggacggcgaagcgtcacgctctgacacgaagcatgcacagactgaaagccgacgccacgccatgccggtggcctggcgcagtcctgcgcttaggtttcagctccggagtccccgtcaggtatcaagttcatctgccatcgaaagaacatctcctccttcctattgggtaggaactcggagagatggatggaac

SEQ ID NO: 81406 - DNA, 1548 bp, Zea Mays
actgggcccaaaagtgctgtgctaagttgaattacgaaagggcccgcattcggtggtctgttacctgctaccactgtgcatcaagcgaatttctcgcggtcgggcgtctaggagagagagctcacctgagcctttcccaagttgtttctcttctcttgctccgcaaaccagcgcaagcccttccctgacagcggcggcgacatggtgctcgaggcgacgatgatctgcatagacaactcggagtggatgcggaacggcgactacgccccgtcgcggttccaggcgcaggccgatgccgtcaacctcatatgcggtgccaagacccagtcgaacccggagaacacagtaggcgtgatgacgatggccgggaagggcgtccgcgtgcttgtcactcccaccagcgacctcgggaagattctcgcctgtatgcacgggttggaagttggtgctgaggcaaacttggctgcggcaatccaggttgctcagcttgcgctaaagcatcgccagaacaagaggcagcagcagaggattatagcattcatcggaagtcctgtgaagtacgacaagaaaattttggagacaatcgggaagaagctgaaaaagaacaatgttgctcttgacattgttgactttggtgaatctgatgatgaaaagcctgagaaactggaagcattgatcgctgctgttaacagcagtgatagcagtcacattgttcatgtccctcctggtgaaaatgctctctctgatgtcctcctaagcactcctatatttactggtgaagaaggtggaagtggttttgctgcttccgcagcagctgccgtagctactggagcatctggatttgaatttggtgtggacccaaatgtagatccagagttggcactcgccctgcggttgtctatggaagaagaacgagcaaggcaagaggctattgcaaaaaaggctgcagaagatacatctaataccgaaaatatcaatgcctcaagctcaaacagcgattctgttatggctgaagcagaacttgcctcaaatgctgctgctggtgacaagcaagaacagccaaaggatgatgacgatctactacagcaggcacttgcaatgtcaatggagggcggtgcttcaggatctgcagctgtgactgactccgctatggcagaagctggtgcagttgaccctgacttagcgttggcaagagaagaaggaagacaagtcagacaaaacagaagacgagaagaactgatgtagccatgttcatgcttccatgctcacaaagaaattgaacattggtctgcattggctgcgcttactctcttggctatgaaatttgcttatcctcatgtaacagtgctttgtttataacttaatgccgagggaatttgtattgtgactgcaacaatcttctcgtcataaatgttcaagtgatttcgtgtttcaagctctatttgcttgtgtttatttcaagctgtaaccaggccattcgatctcgtgtatgccgtatgcggcggatctgctcggttataagcgttgccctagaattttacagcgaca

SEQ ID NO: 81407 - DNA, 1178 bp, Zea Mays
ggtggagggtcgagggtgtccattccctcgctctctacacttgatcaggaggaggaagataacatctccacagaaatagatatagcttcttctccctttcttggttttcttccttctccctttttttctttcttttttcgatctaaactctcgccatggatcgatcctagcatccttgctgtttttcttcccaaggattttgttagccttcctattgcagatttcttcacttcaaactaatacgacttctcccaacgactttagctttgagttctcccttttagcacttcccttccattcagcaatcaatatcgatcgaaaacctccttcttgaacaaaatagataagaggtctttgtcctacagatcaacgaaaacaagatggaaaacgttctcctggatcgatcatctagaagcctcgagtacccgagaagggcgccccttggccgccgccggcggcgatggagaggtctacagcgcagaagaagaagaagccgctggagcgggcgacgcctctgccgcccgcgccagtggtgacggaggcactggacgacctcgagcaggaggtggccaggaacttcgtcgaggacctgctgcacgtgctggcgccgccgccaagcagcctgccgctgcccaggttctccgtcgtcgtgaaagcgtcccccgccaaggacgccagactggtggcgcgggcggccgcgccggcctgcaacgtggaggccgccaccgccgacagcatccgcggccttctccgtctgtaggacagcatgcaggagagagggcgtaatatatttccctccaatattatttctttggtaggggaaattaattaaatgcgtactaaaaaggtagaaaaatagtggaagaaaatatgtgacgctcgggctatggtcggtcgagttgtccacttgtccgtagtgtgactgtgatgttggcgttggaggcttggaggcggtgcaaacagcgagagggaagacgacgacgatgtcaccgacgtatagtttgtgtgagacgtcgtgtggtagatatctagggttttacataatgtctaccgtcgtattttccactatattatactgcaggtgataggtttttgaattaccttatatcaagagatagctgcatatatatacgatgtaataatgatgtatgcaagtgtgtgacttaattttccatata

SEQ ID NO: 81408 - DNA, 2101 bp, Zea Mays
ctccgtgtccgatgagttgtctcgcccccaccgccacgcctttcgccgcgacatctacgcgtcgttcgcccccttccttcctcccaaagtcttctcgtcttatcggcttgccggatccgctgccaccaccatctccgcacccacatctgtgccccaggtgtggttcggtttgagaaacggtaccagcctgccgacggccaacgggcagaagtctccgcgtccctgagcgccacagcaaccgtcgccttcaccacttggttctttccgtaataaaatcccacctctcccatttctgtttccccacttcccctcgctcgactcgatccgcagcaagctaagcgcaaccgaccagctacgcaaccatggctttcgcttcctcgaatgccaagcagagcctctacccggatgtggaccagtcccaccctgatctcaatacccctttcttctccgcacccaccacctccacctgcgccggcgccggcgccgccacgggcaactccctctaccccaccgtcgaccccaacgagctcgcacagaacctcttccccgagacggtcgaagaggacgcggcaccgccaccgcccaccacagaggagaccatcatcgctgtccctggggcgcagctccacctcatcgaccccgaccgcagcgtcgatctcggcgctggcacgctctccatcgtgcgcctccgccagggggaccactccgtcgccgtcctcgcgcgcctgatccacgagaagccccaccaccgccgcggcctcttccgcttgttcagcagcgggcggtctgacgctggcgccgagcaggagcccgtccagtggccgctggcccgcgatgtcgcggcggtcaagctcgaccccgcgcactacttcttctcgctccatgtcccacacacggaccacccggacgacaaggatgacgcggacggtgccgaagcggacgcggaggcggcgctgagctacggcctcacggtcgttgggaaggggcaggaggaagtattggcggagctggacagggtcctcgaggagtacaccaccttctcggtgaagcaggtggagacggcggcgaaggagaagtcagaggtcatggacgcgagggcagtggccgagatcacgccggaagaagctgtcggggataagaaggagtgatgaagaagagcgtgggtcccagcacgaagccgacccaggtgaagcccagcactctcagaaggatgaagagggctaggagggttacaaagatgtccaacagggtggcaaactcaatcctgtctggtgttctgaaagtcactggctttgtcacaagcaccgtgttgaactccaaaccagcacaaaagtttttcaagttaatgcctggcgaagttattcttgcttcacttgatggatttgggaaaatatgggatgctgtggaagtgtctggcaaaaatgtgatgcagacatcctcagttgtgaccacttctgttgtaacacacagatacggtgaacaagcaggtgaagccacacacaattacctccacgctacaggaaatgttctcggagctgcgtgggctgtattcaagattagaaaagccctcgaccctaagggtaatatgaagaagtcttttgtcagccaagcagcgcacgccgtagctaaagaatcagttgcgaggcaaaagaagaagtgaactggcctggtcggtggttccattgtacctgtaatttgatatgtttgatgttgcagtatgttagcaatataggaactaagttgctgtttggtttatatgtttgtaatgtaatagataacaaataacgtttgatcatgtttgtttaagtctaaccgtaatcggataccacactagaaattgttaccagcctattcaaatttgttaccgctggtaatcgaatgcaaatcattaccgttaccatttacgttacattttgggaaccaaacgacacctaggaagctaggtcttagtgagtttgtggtgtcgtcattagattttgatcttctttacttctttttttgggccgtgttcgtttttttaaacagtgatgttctacgtacgtgtaaaatccttacgtttggtctgttactaacaatttcttaattccacctgtgcattcca

SEQ ID NO: 81409 - DNA, 2817 bp, Zea Mays
caagaaaccaatgctccacagattttatgggcattctggtccactgttacccattcgtttgcctgatccataccaaatggtagtagcgttttgcaatcgattacccattcttttgcctgatgcatagtagccattccccattcccacataggagtattttccaatccataacccacgtcttgaaccatcaaaacgtttccctttcccgttccgactcccatccaaaatccattcaccgcctgccttttcttctcccgtccaccgtgtgcgggctgcggggagcgctctcctgccgctactaggcgaccgccgccgccgtcctacgtgctcgggtccttcctcggctatcaacacctaccagttatagggcgtacatgtgcacacgcatgtccttcaccgggtccgcccctgagtcttccgatcccaataagcaacctgcaaaaaagcagactcgacaatgggcagcgtggacacaccaagaggaggagaatttcttcaatgcactgcggcaagtagggaaaaacttcgacaagattacacaccgtgttcagagtaaaaacaaggatcaggtcaggcattactattatcgtcttgttcgacgcatgaagaagctattgggtcctaggttctcacttgatgcaaaaaactccaaggataccattgctgctatgcttcgctggtggtctctgcttgagaaatttagctgcagtgcatcaaagctgcacctgaagcctcggaggttcaaaacatttgtagaagcattgggaaaacaactgctgaaggacagaaataagtccaggaaaaagcattcacgagtggatatgtgcatatcttctccatctccagttatcagcaaggctcctggggatgagactcctcctgtaaagttcttgtcaatagattctcaaaatggtagcagagtagcatctcctaaagggacaattttcaagcggattgcagaaccaatttctaacaagtcaggaacaactaaaggggacctctctgccacaagaaccgtgaaacagaaaaggaaggcaggtggtgctgttgcatctgccgcatataaaaaatgggagagagcggccatggctggtgtttctttagttgctgatgcggctgaggagctcgagcgcaacacgattaacccaggcatgttatgtaatgttgatgcaagaacactgacttcatcatcagacagactttctactggtgatggcattagcacaaatcatatgaaggaaacagattcacaagcacctgtgaagctgaagctacagttatttccaataaacgaagctactcgaaaggcattggagaaggatgaccataatcctcatttagagctcacattaagctctaggaagaaaatatcatctgtgctagaacatctaaaccgaaaatggggtaactcaaacatcgcatctggagagcttattctttttccgtattgtgctaatcaagaggatttggctacatatcagagatggacaacaagagatactgttgcagtcgctgatgtgtttctttctgtgaatagcccttctgttttccgtttaaggtatggttggttttcccttgttgagcttggagcaggagtaagtgacatatctttaacacattttgaagattgcatgagaccggaagtcatccaagtcaaatcaccatcaggagataaggcttgtgtgcaaaaggatgtacaggcaagaactctgagcttccggatcagccggctaatgtgccccactctcggtttggcagccaaaagcaagtgcaggttcctgtaacccaagcttttgaggatgatcagggaatgaattgtgtggcaatatctgaagtagagtgggcagatacccttacagatatcagtgttgagcacttactgacagaagcatccaaagatttagattgcgtggggactagtgtaaaagatcctttgtttcttgagaatccatgcagctatgactcgtttgatgctgttgttgcccttcatgcttctcgttatcaagcatcagaacagccagcccatgctccccattcaaacatatggggagcagaagaaacatgtgatgagttcagttttaatttgtcagcctccaggaagcaagaagggtcaaacacttctagcagctctcctgatactgacaatgaagttcatccttcaaattcagaaggatttcgaggttttcttcaggacttgactggacgagagactgatgctgataatccttgtaatgatgacgccaaagacgaagaggagttttatgctaaatcaccacctcgaaatgacaaaactaatgagttgaaggatcaacctttagctgacatatattggcctgattcactcggaccactggacttggacataccggccgtgagatatcaaaccgatgacatactgataggggacagtcaaagtagttggaattggaaccgcctgatggcaaatagcctcgatgcatttcgaaacctgtcattcttctcggataagaatgactcgattccgtcgatcatgtagaactggggatgttacggtttctacgacttgctgtgttggttaggaaggaacctccaattctgcatttcgctgaagaatatccaacagatgcggatttgatgcatacgtgaggtgctcgtgctgttgtaagataacataacggatgtgctaaccactccatgtaattgtgttgtccttgtacataaagcacatacaagcacttggatacaagtaaagcttctggggttcgtgtataagatcagtttgcctaatgtccatcaaatgattgtgcacttcttttttccggtttacatctaaaatag

SEQ ID NO: 81410 - DNA, 2917 bp, Zea Mays
caagaaaccaatgctccacagattttatgggcattctggtccactgttacccattcgtttgcctgatccataccaaatggtagtagcgttttgcaatcgattacccattcttttgcctgatgcatagtagccattccccattcccacataggagtattttccaatccataacccacgtcttgaaccatcaaaacgtttccctttcccgttccgactcccatccaaaatccattcaccgcctgccttttcttctcccgtccaccgtgtgcgggctgcggggagcgctctcctgccgctactaggcgaccgccgccgccgtcctacgtgctcgggtccttcctcggctatcaacacctaccagtctatttttatttttattttccaaaagttatagggcgtacatgtgcacacgcatgtccttcaccgggtccgcccctgagtcttccgatcccaataagcaacctgcaaaaaagcagactcgacaatgggcagcgtggacacaccaagaggaggagaatttcttcaatgcactgcggcaagtagggaaaaacttcgacaagattacacaccgtgttcagagtaaaaacaaggatcaggtcaggcattactattatcgtcttgttcgacgcatgaagaagctattgggtcctaggttctcacttgatgcaaaaaactccaaggataccattgctgctatgcttcgctggtggtctctgcttgagaaatttagctgcagtgcatcaaagctgcacctgaagcctcggaggttcaaaacatttgtagaagcattgggaaaacaactgctgaaggacagaaataagtccaggaaaaagcattcacgagtggatatgtgcatatcttctccatctccagttatcagcaaggctcctggggatgagactcctcctgtaaagttcttgtcaatagattctcaaaatggtagcagagtagcatctcctaaagggacaattttcaagcggattgcagaaccaatttctaacaagtcaggaacaactaaaggggacctctctgccacaagaaccgtgaaacagaaaaggaaggcaggtggtgctgttgcatctgccgcatataaaaaatgggagagagcggccatggctggtgtttctttagttgctgatgcggctgaggagctcgagcgcaacacgattaacccaggcatgttatgtaatgttgatgcaagaacactgacttcatcatcagacagactttctactggtgatggcattagcacaaatcatatgaaggaaacagattcacaagcacctgtgaagctgaagctacagttatttccaataaacgaagctactcgaaaggcattggagaaggatgaccataatcctcatttagagctcacattaagctctaggaagaaaatatcatctgtgctagaacatctaaaccgaaaatggggtaactcaaacatcgcatctggagagcttattctttttccgtattgtgctaatcaagaggatttggctacatatcagagatggacaacaagagatactgttgcagtcgctgatgtgtttctttctgtgaatagcccttctgttttccgtttaaggtatggttggttttcccttgttgagcttggagcaggagtaagtgacatatctttaacacattttgaagattgcatgagaccggaagtcatccaagtcaaatcaccatcaggagataaggcttgtgtgcaaaaggatggtactttgctcagtaattgcactcatgagtcatatccttgcagttcaatgttattgcatatgacaccatccagtacaggcaagaactctgagcttccggatcagccggctaatgtgccccactctcggtttggcagccaaaagcaagtgcaggttcctgtaacccaagcttttgaggatgatcagggaatgaattgtgtggcaatatctgaagtagagtgggcagatacccttacagatatcagtgttgagcacttactgacagaagcatccaaagatttagattgcgtggggactagtgtaaaagatcctttgtttcttgagaatccatgcagctatgactcgtttgatgctgttgttgcccttcatgcttctcgttatcaagcatcagaacagccagcccatgctccccattcaaacatatggggagcagaagaaacatgtgatgagttcagttttaatttgtcagcctccaggaagcaagaagggtcaaacacttctagcagctctcctgatactgacaatgaagttcatccttcaaattcagaaggatttcgaggttttcttcaggacttgactggacgagagactgatgctgataatccttgtaatgatgacgccaaagacgaagaggagttttatgctaaatcaccacctcgaaatgacaaaactaatgagttgaaggatcaacctttagctgacatatattggcctgattcactcggaccactggacttggacataccggccgtgagatatcaaaccgatgacatactgataggggacagtcaaagtagttggaattggaaccgcctgatggcaaatagcctcgatgcatttcgaaacctgtcattcttctcggataagaatgactcgattccgtcgatcatgtagaactggggatgttacggtttctacgacttgctgtgttggttaggaaggaacctccaattctgcatttcgctgaagaatatccaacagatgcggatttgatgcatacgtgaggtgctcgtgctgttgtaagataacataacggatgtgctaaccactccatgtaattgtgttgtccttgtacataaagcacatacaagcacttggatacaagtaaagcttctggggttcgtgtataagatcagtttgcctaatgtccatcaaatgattgtgcacttcttttttccggtttacatctaaaatag

SEQ ID NO: 81411 - DNA, 2791 bp, Zea Mays
attttatgggcattctggtccactgttacccattcgtttgcctgatccataccaaatggtagtagcgttttgcaatcgattacccattcttttgcctgatgcatagtagccattccccattcccacataggagtattttccaatccataacccacgtcttgaaccatcaaaacgtttccctttcccgttccgactcccatccaaaatccattcaccgcctgccttttcttctcccgtccaccgtgtgcgggctgcggggagcgctctcctgccgctactaggcgaccgccgccgccgtcctacgtgctcgggtccttcctcggctatcaacacctaccagttatagggcgtacatgtgcacacgcatgtccttcaccgggtccgcccctgagtcttccgatcccaataagcaacctgcaaaaaagcagactcgacaatgggcagcgtggacacaccaagaggaggagaatttcttcaatgcactgcggcaagtagggaaaaacttcgacaagattacacaccgtgttcagagtaaaaacaaggatcaggtcaggcattactattatcgtcttgttcgacgcatgaagaagctattgggtcctaggttctcacttgatgcaaaaaactccaaggataccattgctgctatgcttcgctggtggtctctgcttgagaaatttagctgcagtgcatcaaagctgcacctgaagcctcggaggttcaaaacatttgtagaagcattgggaaaacaactgctgaaggacagaaataagtccaggaaaaagcattcacgagtggatatgtgcatatcttctccatctccagttatcagcaaggctcctggggatgagactcctcctgtaaagttcttgtcaatagattctcaaaatggtagcagagtagcatctcctaaagggacaattttcaagcggattgcagaaccaatttctaacaagtcaggaacaactaaaggggacctctctgccacaagaaccgtgaaacagaaaaggaaggcaggtggtgctgttgcatctgccgcatataaaaaatgggagagagcggccatggctggtgtttctttagttgctgatgcggctgaggagctcgagcgcaacacgattaacccaggcatgttatgtaatgttgatgcaagaacactgacttcatcatcagacagactttctactggtgatggcattagcacaaatcatatgaaggaaacagattcacaagcacctgtgaagctgaagctacagttatttccaataaacgaagctactcgaaaggcattggagaaggatgaccataatcctcatttagagctcacattaagctctaggaagaaaatatcatctgtgctagaacatctaaaccgaaaatggggtaactcaaacatcgcatctggagagcttattctttttccgtattgtgctaatcaagaggatttggctacatatcagagatggacaacaagagatactgttgcagtcgctgatgtgtttctttctgtgaatagcccttctgttttccgtttaaggtatggttggttttcccttgttgagcttggagcaggagtaagtgacatatctttaacacattttgaagattgcatgagaccggaagtcatccaagtcaaatcaccatcaggagataaggcttgtgtgcaaaaggatggcaagaactctgagcttccggatcagccggctaatgtgccccactctcggtttggcagccaaaagcaagtgcaggttcctgtaacccaagcttttgaggatgatcagggaatgaattgtgtggcaatatctgaagtagagtgggcagatacccttacagatatcagtgttgagcacttactgacagaagcatccaaagatttagattgcgtggggactagtgtaaaagatcctttgtttcttgagaatccatgcagctatgactcgtttgatgctgttgttgcccttcatgcttctcgttatcaagcatcagaacagccagcccatgctccccattcaaacatatggggagcagaagaaacatgtgatgagttcagttttaatttgtcagcctccaggaagcaagaagggtcaaacacttctagcagctctcctgatactgacaatgaagttcatccttcaaattcagaaggatttcgaggttttcttcaggacttgactggacgagagactgatgctgataatccttgtaatgatgacgccaaagacgaagaggagttttatgctaaatcaccacctcgaaatgacaaaactaatgagttgaaggatcaacctttagctgacatatattggcctgattcactcggaccactggacttggacataccggccgtgagatatcaaaccgatgacatactgataggggacagtcaaagtagttggaattggaaccgcctgatggcaaatagcctcgatgcatttcgaaacctgtcattcttctcggataagaatgactcgattccgtcgatcatgtagaactggggatgttacggtttctacgacttgctgtgttggttaggaaggaacctccaattctgcatttcgctgaagaatatccaacagatgcggatttgatgcatacgtgaggtgctcgtgctgttgtaagataacataacggatgtgctaaccactccatgtaattgtgttgtccttgtacataaagcacatacaagcacttggatacaagtaaagcttctggggttcgtgtataagatcagtttgcctaatgtccatcaaatgattgtgcacttcttttttccggtttacatctaaaatag

SEQ ID NO: 81412 - DNA, 2744 bp, Zea Mays
ctgatccataccaaatggtagtagcgttttgcaatcgattacccattcttttgcctgatgcatagtagccattccccattcccacataggagtattttccaatccataacccacgtcttgaaccatcaaaacgtttccctttcccgttccgactcccatccaaaatccattcaccgcctgccttttcttctcccgtccaccgtgtgcgggctgcggggagcgctctcctgccgctactaggcgaccgccgccgccgtcctacgtgctcgggtccttcctcggctatcaacacctaccagttatagggcgtacatgtgcacacgcatgtccttcaccgggtccgcccctgagtcttccgatcccaataagcaacctgactcgacaatgggcagcgtggacacaccaagaggaggagaatttcttcaatgcactgcggcaagtagggaaaaacttcgacaagattacacaccgtgttcagagtaaaaacaaggatcaggtcaggcattactattatcgtcttgttcgacgcatgaagaagctattgggtcctaggttctcacttgatgcaaaaaactccaaggataccattgctgctatgcttcgctggtggtctctgcttgagaaatttagctgcagtgcatcaaagctgcacctgaagcctcggaggttcaaaacatttgtagaagcattgggaaaacaactgctgaaggacagaaataagtccaggaaaaagcattcacgagtggatatgtgcatatcttctccatctccagttatcagcaaggctcctggggatgagactcctcctgtaaagttcttgtcaatagattctcaaaatggtagcagagtagcatctcctaaagggacaattttcaagcggattgcagaaccaatttctaacaagtcaggaacaactaaaggggacctctctgccacaagaaccgtgaaacagaaaaggaaggcaggtggtgctgttgcatctgccgcatataaaaaatgggagagagcggccatggctggtgtttctttagttgctgatgcggctgaggagctcgagcgcaacacgattaacccaggcatgttatgtaatgttgatgcaagaacactgacttcatcatcagacagactttctactggtgatggcattagcacaaatcatatgaaggaaacagattcacaagcacctgtgaagctgaagctacagttatttccaataaacgaagctactcgaaaggcattggagaaggatgaccataatcctcatttagagctcacattaagctctaggaagaaaatatcatctgtgctagaacatctaaaccgaaaatggggtaactcaaacatcgcatctggagagcttattctttttccgtattgtgctaatcaagaggatttggctacatatcagagatggacaacaagagatactgttgcagtcgctgatgtgtttctttctgtgaatagcccttctgttttccgtttaaggtatggttggttttcccttgttgagcttggagcaggagtaagtgacatatctttaacacattttgaagattgcatgagaccggaagtcatccaagtcaaatcaccatcaggagataaggcttgtgtgcaaaaggatgtacaggcaagaactctgagcttccggatcagccggctaatgtgccccactctcggtttggcagccaaaagcaagtgcaggttcctgtaacccaagcttttgaggatgatcagggaatgaattgtgtggcaatatctgaagtagagtgggcagatacccttacagatatcagtgttgagcacttactgacagaagcatccaaagatttagattgcgtggggactagtgtaaaagatcctttgtttcttgagaatccatgcagctatgactcgtttgatgctgttgttgcccttcatgcttctcgttatcaagcatcagaacagccagcccatgctccccattcaaacatatggggagcagaagaaacatgtgatgagttcagttttaatttgtcagcctccaggaagcaagaagggtcaaacacttctagcagctctcctgatactgacaatgaagttcatccttcaaattcagaaggatttcgaggttttcttcaggacttgactggacgagagactgatgctgataatccttgtaatgatgacgccaaagacgaagaggagttttatgctaaatcaccacctcgaaatgacaaaactaatgagttgaaggatcaacctttagctgacatatattggcctgattcactcggaccactggacttggacataccggccgtgagatatcaaaccgatgacatactgataggggacagtcaaagtagttggaattggaaccgcctgatggcaaatagcctcgatgcatttcgaaacctgtcattcttctcggataagaatgactcgattccgtcgatcatgtagaactggggatgttacggtttctacgacttgctgtgttggttaggaaggaacctccaattctgcatttcgctgaagaatatccaacagatgcggatttgatgcatacgtgaggtgctcgtgctgttgtaagataacataacggatgtgctaaccactccatgtaattgtgttgtccttgtacataaagcacatacaagcacttggatacaagtaaagcttctggggttcgtgtataagatcagtttgcctaatgtccatcaaatgattgtgcacttcttttttccggtttacatctaaaatag

SEQ ID NO: 81413 - DNA, 2875 bp, Zea Mays
atgcatagtagccattccccattcccacataggagtattttccaatccataacccacgtcttgaaccatcaaaacgtttccctttcccgttccgactcccatccaaaatccattcaccgcctgccttttcttctcccgtccaccgtgtgcgggctgcggggagcgctctcctgccgctactaggcgaccgccgccgccgtcctacgtgctcgggtccttcctcggctatcaacacctaccagttatagggcgtacatgtgcacacgcatgtccttcaccgggtccgcccctgagtcttccgatcccaataagcaacctgtttttgcgctgtgtctgattcatgtagcaaaaaagcagactcgacaatgggcagcgtggacacaccaagaggaggagaatttcttcaatgcactgcggcaagtagggaaaaacttcgacaagattacacaccgtgttcagagtaaaaacaaggatcaggtcaggcattactattatcgtcttgttcgacgcatgaagaagctattgggtcctaggttctcacttgatgcaaaaaactccaaggataccattgctgctatgcttcgctggtggtctctgcttgagaaatttagctgcagtgcatcaaagctgcacctgaagcctcggaggttcaaaacatttgtagaagcattgggaaaacaactgctgaaggacagaaataagtccaggaaaaagcattcacgagtggatatgtgcatatcttctccatctccagttatcagcaaggctcctggggatgagactcctcctgtaaagttcttgtcaatagattctcaaaatggtagcagagtagcatctcctaaagggacaattttcaagcggattgcagaaccaatttctaacaagtcaggaacaactaaaggggacctctctgccacaagaaccgtgaaacagaaaaggaaggcaggtggtgctgttgcatctgccgcatataaaaaatgggagagagcggccatggctggtgtttctttagttgctgatgcggctgaggagctcgagcgcaacacgattaacccaggcatgttatgtaatgttgatgcaagaacactgacttcatcatcagacagactttctactggtgatggcattagcacaaatcatatgaaggaaacagattcacaagcacctgtgaagctgaagctacagttatttccaataaacgaagctactcgaaaggcattggagaaggatgaccataatcctcatttagagctcacattaagctctaggaagaaaatatcatctgtgctagaacatctaaaccgaaaatggggtaactcaaacatcgcatctggagagcttattctttttccgtattgtgctaatcaagaggatttggctacatatcagagatggacaacaagagatactgttgcagtcgctgatgtgtttctttctgtgaatagcccttctgttttccgtttaaggtatggttggttttcccttgttgagcttggagcaggagtaagtgacatatctttaacacattttgaagattgcatgagaccggaagtcatccaagtcaaatcaccatcaggagataaggcttgtgtgcaaaaggatggtactttgctcagtaattgcactcatgagtcatatccttgcagttcaatgttattgcatatgacaccatccagtacaggcaagaactctgagcttccggatcagccggctaatgtgccccactctcggtttggcagccaaaagcaagtgcaggttcctgtaacccaagcttttgaggatgatcagggaatgaattgtgtggcaatatctgaagtagagtgggcagatacccttacagatatcagtgttgagcacttactgacagaagcatccaaagatttagattgcgtggggactagtgtaaaagatcctttgtttcttgagaatccatgcagctatgactcgtttgatgctgttgttgcccttcatgcttctcgttatcaagcatcagaacagccagcccatgctccccattcaaacatatggggagcagaagaaacatgtgatgagttcagttttaatttgtcagcctccaggaagcaagaagggtcaaacacttctagcagctctcctgatactgacaatgaagttcatccttcaaattcagaaggatttcgaggttttcttcaggacttgactggacgagagactgatgctgataatccttgtaatgatgacgccaaagacgaagaggagttttatgctaaatcaccacctcgaaatgacaaaactaatgagttgaaggatcaacctttagctgacatatattgggtacttgatgaaattataatgttcttttgtactggcattatcttagctgagcttacatttttttcttttcttggcagcctgattcactcggaccactggacttggacataccggccgtgagatatcaaaccgatgacatactgataggggacagtcaaagtagttggaattggaaccgcctgatggcaaatagcctcgatgcatttcgaaacctgtcattcttctcggataagaatgactcgattccgtcgatcatgtagaactggggatgttacggtttctacgacttgctgtgttggttaggaaggaacctccaattctgcatttcgctgaagaatatccaacagatgcggatttgatgcatacgtgaggtgctcgtgctgttgtaagataacataacggatgtgctaaccactccatgtaattgtgttgtccttgtacataaagcacatacaagcacttggatacaagtaaagcttctggggttcgtgtataagatcagtttgcctaatgtccatcaaatgattgtgcacttcttttttccggtttacatctaaaatag

SEQ ID NO: 81414 - DNA, 2668 bp, Zea Mays
atgcatagtagccattccccattcccacataggagtattttccaatccataacccacgtcttgaaccatcaaaacgtttccctttcccgttccgactcccatccaaaatccattcaccgcctgccttttcttctcccgtccaccgtgtgcgggctgcggggagcgctctcctgccgctactaggcgaccgccgccgccgtcctacgtgctcgggtccttcctcggctatcaacacctaccagttatagggcgtacatgtgcacacgcatgtccttcaccgggtccgcccctgagtcttccgatcccaataagcaacctgcaaaaaagcagactcgacaatgggcagcgtggacacaccaagaggaggagaatttcttcaatgcactgcggcaagtagggaaaaacttcgacaagattacacaccgtgttcagagtaaaaacaaggatcaggtcaggcattactattatcgtcttgttcgacgcatgaagaagctattgggtcctaggttctcacttgatgcaaaaaactccaaggataccattgctgctatgcttcgctggtggtctctgcttgagaaatttagctgcagtgcatcaaagctgcacctgaagcctcggaggttcaaaacatttgtagaagcattgggaaaacaactgctgaaggacagaaataagtccaggaaaaagcattcacgagtggatatgtgcatatcttctccatctccagttatcagcaaggctcctggggatgagactcctcctgtaaagttcttgtcaatagattctcaaaatggtagcagagtagcatctcctaaagggacaattttcaagcggattgcagaaccaatttctaacaagtcaggaacaactaaaggggacctctctgccacaagaaccgtgaaacagaaaaggaaggcaggtggtgctgttgcatctgccgcatataaaaaatgggagagagcggccatggctggtgtttctttagttgctgatgcggctgaggagctcgagcgcaacacgattaacccaggcatgttatgtaatgttgatgcaagaacactgacttcatcatcagacagactttctactggtgatggcattagcacaaatcatatgaaggaaacagattcacaagcacctgtgaagctgaagctacagttatttccaataaacgaagctactcgaaaggcattggagaaggatgaccataatcctcatttagagctcacattaagctctaggaagaaaatatcatctgtgctagaacatctaaaccgaaaatggggtaactcaaacatcgcatctggagagcttattctttttccgtattgtgctaatcaagaggatttggctacatatcagagatggacaacaagagatactgttgcagtcgctgatgtgtttctttctgtgaatagcccttctgttttccgtttaagttcaatgttattgcatatgacaccatccagtacaggcaagaactctgagcttccggatcagccggctaatgtgccccactctcggtttggcagccaaaagcaagtgcaggttcctgtaacccaagcttttgaggatgatcagggaatgaattgtgtggcaatatctgaagtagagtgggcagatacccttacagatatcagtgttgagcacttactgacagaagcatccaaagatttagattgcgtggggactagtgtaaaagatcctttgtttcttgagaatccatgcagctatgactcgtttgatgctgttgttgcccttcatgcttctcgttatcaagcatcagaacagccagcccatgctccccattcaaacatatggggagcagaagaaacatgtgatgagttcagttttaatttgtcagcctccaggaagcaagaagggtcaaacacttctagcagctctcctgatactgacaatgaagttcatccttcaaattcagaaggatttcgaggttttcttcaggacttgactggacgagagactgatgctgataatccttgtaatgatgacgccaaagacgaagaggagttttatgctaaatcaccacctcgaaatgacaaaactaatgagttgaaggatcaacctttagctgacatatattgggtacttgatgaaattataatgttcttttgtactggcattatcttagctgagcttacatttttttcttttcttggcagcctgattcactcggaccactggacttggacataccggccgtgagatatcaaaccgatgacatactgataggggacagtcaaagtagttggaattggaaccgcctgatggcaaatagcctcgatgcatttcgaaacctgtcattcttctcggataagaatgactcgattccgtcgatcatgtagaactggggatgttacggtttctacgacttgctgtgttggttaggaaggaacctccaattctgcatttcgctgaagaatatccaacagatgcggatttgatgcatacgtgaggtgctcgtgctgttgtaagataacataacggatgtgctaaccactccatgtaattgtgttgtccttgtacataaagcacatacaagcacttggatacaagtaaagcttctggggttcgtgtataagatcagtttgcctaatgtccatcaaatgattgtgcacttcttttttccggtttacatctaaaatag

SEQ ID NO: 81415 - DNA, 1966 bp, Zea Mays
gaaaaggggggaaaagaaaaaaagaaaaagttcccgtcttcggtcttcccaaacccccaacatccatgatccatctcatcgacaccccctccgctctccttatcccttccattcgcccaaacccccgccgccgtgacccctgccagcccgcggccttcccctcgttctaggcttcaactgccggcctcgtgtcttctgggcaagtgaagagagagatggcgtcgccaataccgcgcgagtgggtcgggctgcagcagtttcctccggccacccagaccgagctgcacgagctcctcggcaagctcaaggaggaggatgtgagcacattgacaattctggtgatggggaaaggcggagtggggaagtcatctactgttaactccatcgtcggggagaggatcgccactgtcagcgctttccagtctgagggtctgagaccgatgatgtggtcgcgcacaagggcagggttcaccttgaacattatcgacactcctgggcttattgaaggtggatacattaatgagcaggctgttgacatcattaagagaatggatacacttgatggacaggttataagagccatcaccaattcatttggaaaagatatttggcgaagatcattggttgtgttgacccatgctcaactctcaccacctgatggaatcgagtataatgatttctttacaagaaggtcagaggcacttttgcgatacatccactcgggagcaggaatcaagaaacgagaatatggggatttccctttgccaatagcattggtagagaacagtggaaggtgcaagactaacgagcatggggagaagatacttccggatggaactccgtgggttccaaaactgatgaaagaaattactgttgttatctcaaacgggagcaagcccattcatgttgatcagaagttaattgatggtccaaaccctaacaatcgctggaagatgttcataccaattatacttgctgtggagtacttcttggtagtaaaaggaatccggagggcgatccatgcagatatcgcaaatgggaaggtggatgactgggagcagcgttaccgggacttggttggaagcagggaccctgtggagcagaaaggttctaccacccggaaccgcaaagcctaagttggtgtagcagaaatgattttattcgtgttgtgacccactcgatctgcttgctgttccttttcctaattatgtgttgagggctttatagagttcgctggttctacttgaaaaataattgctcgtgttgtagttgataagaatatcttttccattttatgatgcttggccctcttcgcaattttgaatattgttatcaaacccctgctattatgtttagcaagttgttaaatagctattggagtaaaaattagcatatttaggagtagttcagttttgaatctagttttggtatgcttgctcctgtcagaaaaggttggcaatggagtcaagagaagagggcgtcgagggcatagaaggttggtcggaacgacctatagtgtagcggtggttcaatggttaggagaaacttgtgttatgcatattggacctgactatctcgctgcacgagaaaggggaaaaaagagtgtctgattgtagcggtggttcaatggtaaaggagaagcttgtgttatacatattggatcttactatctcgctgcacgagaaagggggaaaagagtgtcagatttggttactcgctatacgggaaaaggaaaaaaaatgagaaaaggaaaaaaatgagaacatgagtgtgaagaaattgacatcaactatatttaagaaacatctatcgagttgctaaatctgaatagattgctaaatctggaaagtaaatgaaatttgatagtaagtaactaaatttaacaagtctatttagagaattattggagaagccttttttctcaattatttttaaaatttaaaatttagggagttatttagagaac

SEQ ID NO: 81416 - DNA, 1854 bp, Zea Mays
gaaaaggggggaaaagaaaaaaagaaaaagttcccgtcttcggtcttcccaaacccccaacatccatgatccatctcatcgacaccccctccgctctccttatcccttccattcgcccaaacccccgccgccgtgacccctgccagcccgcggccttcccctcgttctaggcttcaactgccggcctcgtgtcttctgggcaagtgaagagagagatggcgtcgccaataccgcgcgagtgggtcgggctgcagcagtttcctccggccacccagaccgagctgcacgagctcctcggcaagctcaaggaggaggatgtgagcacattgacaattctggtgatggggaaaggcggagtggggaagtcatctactgttaactccatcgtcggggagaggatcgccactgtcagcgctttccagtctgagggtctgagaccgatgatgtggtcgcgcacaagggcagggttcaccttgaacattatcgacactcctgggcttattgaaggtggatacattaatgagcaggctgttgacatcattaagagaatggatacacttgatggacaggttataagagccatcaccaattcatttggaaaagatatttggcgaagatcattggttgtgttgacccatgctcaactctcaccacctgatggaatcgagtataatgatttctttacaagaaggtcagaggcacttttgcgatacttccggatggaactccgtgggttccaaaactgatgaaagaaattactgttgttatctcaaacgggagcaagcccattcatgttgatcagaagttaattgatggtccaaaccctaacaatcgctggaagatgttcataccaattatacttgctgtggagtacttcttggtagtaaaaggaatccggagggcgatccatgcagatatcgcaaatgggaaggtggatgactgggagcagcgttaccgggacttggttggaagcagggaccctgtggagcagaaaggttctaccacccggaaccgcaaagcctaagttggtgtagcagaaatgattttattcgtgttgtgacccactcgatctgcttgctgttccttttcctaattatgtgttgagggctttatagagttcgctggttctacttgaaaaataattgctcgtgttgtagttgataagaatatcttttccattttatgatgcttggccctcttcgcaattttgaatattgttatcaaacccctgctattatgtttagcaagttgttaaatagctattggagtaaaaattagcatatttaggagtagttcagttttgaatctagttttggtatgcttgctcctgtcagaaaaggttggcaatggagtcaagagaagagggcgtcgagggcatagaaggttggtcggaacgacctatagtgtagcggtggttcaatggttaggagaaacttgtgttatgcatattggacctgactatctcgctgcacgagaaaggggaaaaaagagtgtctgattgtagcggtggttcaatggtaaaggagaagcttgtgttatacatattggatcttactatctcgctgcacgagaaagggggaaaagagtgtcagatttggttactcgctatacgggaaaaggaaaaaaaatgagaaaaggaaaaaaatgagaacatgagtgtgaagaaattgacatcaactatatttaagaaacatctatcgagttgctaaatctgaatagattgctaaatctggaaagtaaatgaaatttgatagtaagtaactaaatttaacaagtctatttagagaattattggagaagccttttttctcaattatttttaaaatttaaaatttagggagttatttagagaac

SEQ ID NO: 81417 - DNA, 1955 bp, Zea Mays
gaaaaggggggaaaagaaaaaaagaaaaagttcccgtcttcggtcttcccaaacccccaacatccatgatccatctcatcgacaccccctccgctctccttatcccttccattcgcccaaacccccgccgccgtgacccctgccagcccgcggccttcccctcgttctaggcttcaactgccggcctcgtgtcttctgagagagatggcgtcgccaataccgcgcgagtgggtcgggctgcagcagtttcctccggccacccagaccgagctgcacgagctcctcggcaagctcaaggaggaggatgtgagcacattgacaattctggtgatggggaaaggcggagtggggaagtcatctactgttaactccatcgtcggggagaggatcgccactgtcagcgctttccagtctgagggtctgagaccgatgatgtggtcgcgcacaagggcagggttcaccttgaacattatcgacactcctgggcttattgaaggtggatacattaatgagcaggctgttgacatcattaagagaatggatacacttgatggacaggttataagagccatcaccaattcatttggaaaagatatttggcgaagatcattggttgtgttgacccatgctcaactctcaccacctgatggaatcgagtataatgatttctttacaagaaggtcagaggcacttttgcgatacatccactcgggagcaggaatcaagaaacgagaatatggggatttccctttgccaatagcattggtagagaacagtggaaggtgcaagactaacgagcatggggagaagatacttccggatggaactccgtgggttccaaaactgatgaaagaaattactgttgttatctcaaacgggagcaagcccattcatgttgatcagaagttaattgatggtccaaaccctaacaatcgctggaagatgttcataccaattatacttgctgtggagtacttcttggtagtaaaaggaatccggagggcgatccatgcagatatcgcaaatgggaaggtggatgactgggagcagcgttaccgggacttggttggaagcagggaccctgtggagcagaaaggttctaccacccggaaccgcaaagcctaagttggtgtagcagaaatgattttattcgtgttgtgacccactcgatctgcttgctgttccttttcctaattatgtgttgagggctttatagagttcgctggttctacttgaaaaataattgctcgtgttgtagttgataagaatatcttttccattttatgatgcttggccctcttcgcaattttgaatattgttatcaaacccctgctattatgtttagcaagttgttaaatagctattggagtaaaaattagcatatttaggagtagttcagttttgaatctagttttggtatgcttgctcctgtcagaaaaggttggcaatggagtcaagagaagagggcgtcgagggcatagaaggttggtcggaacgacctatagtgtagcggtggttcaatggttaggagaaacttgtgttatgcatattggacctgactatctcgctgcacgagaaaggggaaaaaagagtgtctgattgtagcggtggttcaatggtaaaggagaagcttgtgttatacatattggatcttactatctcgctgcacgagaaagggggaaaagagtgtcagatttggttactcgctatacgggaaaaggaaaaaaaatgagaaaaggaaaaaaatgagaacatgagtgtgaagaaattgacatcaactatatttaagaaacatctatcgagttgctaaatctgaatagattgctaaatctggaaagtaaatgaaatttgatagtaagtaactaaatttaacaagtctatttagagaattattggagaagccttttttctcaattatttttaaaatttaaaatttagggagttatttagagaac

SEQ ID NO: 81418 - DNA, 2011 bp, Zea Mays
gaaaaggggggaaaagaaaaaaagaaaaagttcccgtcttcggtcttcccaaacccccaacatccatgatccatctcatcgacaccccctccgctctccttatcccttccattcgcccaaacccccgccgccgtgacccctgccagcccgcggccttcccctcgttctaggcttcaactgccggcctcgtgtcttctgggcaagtgaagagagagatggcgtcgccaataccgcgcgagtgggtcgggctgcagcagtttcctccggccacccagaccgagctgcacgagctcctcggcaagctcaaggaggaggatgtgagcacattgacaattctggtgatggggaaaggcggagtggggaagtcatctactgttaactccatcgtcggggagaggatcgccacttctgagggtctgagaccgatgatgtggtcgcgcacaagggcagggttcaccttgaacattatcgacactcctgggcttattgaaggtggatacattaatgagcaggctgttgacatcattaagagatttcttctgggcaagactattgatgttctcctgtatgtggatcgtttggatgcgtacagaatggatacacttgatggacaggttataagagccatcaccaattcatttggaaaagatatttggcgaagatcattggttgtgttgacccatgctcaactctcaccacctgatggaatcgagtataatgatttctttacaagaaggtcagaggcacttttgcgatacatccactcgggagcaggaatcaagaaacgagaatatggggatttccctttgccaatagcattggtagagaacagtggaaggtgcaagactaacgagcatggggagaagatacttccggatggaactccgtgggttccaaaactgatgaaagaaattactgttgttatctcaaacgggagcaagcccattcatgttgatcagaagttaattgatggtccaaaccctaacaatcgctggaagatgttcataccaattatacttgctgtggagtacttcttggtagtaaaaggaatccggagggcgatccatgcagatatcgcaaatgggaaggtggatgactgggagcagcgttaccgggacttggttggaagcagggaccctgtggagcagaaaggttctaccacccggaaccgcaaagcctaagttggtgtagcagaaatgattttattcgtgttgtgacccactcgatctgcttgctgttccttttcctaattatgtgttgagggctttatagagttcgctggttctacttgaaaaataattgctcgtgttgtagttgataagaatatcttttccattttatgatgcttggccctcttcgcaattttgaatattgttatcaaacccctgctattatgtttagcaagttgttaaatagctattggagtaaaaattagcatatttaggagtagttcagttttgaatctagttttggtatgcttgctcctgtcagaaaaggttggcaatggagtcaagagaagagggcgtcgagggcatagaaggttggtcggaacgacctatagtgtagcggtggttcaatggttaggagaaacttgtgttatgcatattggacctgactatctcgctgcacgagaaaggggaaaaaagagtgtctgattgtagcggtggttcaatggtaaaggagaagcttgtgttatacatattggatcttactatctcgctgcacgagaaagggggaaaagagtgtcagatttggttactcgctatacgggaaaaggaaaaaaaatgagaaaaggaaaaaaatgagaacatgagtgtgaagaaattgacatcaactatatttaagaaacatctatcgagttgctaaatctgaatagattgctaaatctggaaagtaaatgaaatttgatagtaagtaactaaatttaacaagtctatttagagaattattggagaagccttttttctcaattatttttaaaatttaaaatttagggagttatttagagaac

SEQ ID NO: 81419 - DNA, 1914 bp, Zea Mays
gaaaaggggggaaaagaaaaaaagaaaaagttcccgtcttcggtcttcccaaacccccaacatccatgatccatctcatcgacaccccctccgctctccttatcccttccattcgcccaaacccccgccgccgtgacccctgccagcccgcggccttcccctcgttctaggcttcaactgccggcctcgtgtcttctgggcaagtgaagagagagatggcgtcgccaataccgcgcgagtgggtcgggctgcagcagtttcctccggccacccagaccgagctgcacgagctcctcggcaagctcaaggaggaggatgtgagcacattgacaattctggtgatggggaaaggcggagtggggaagtcatctactgttaactccatcgtcggggagaggatcgccactgtcagcgctttccagtctgagggtctgagaccgatgatgtggtcgcgcacaagggcagggttcaccttgaacattatcgacactcctgggcttattgaaggtggatacattaatgagcaggctgttgacatcattaagagatttcttctgggcaagactattgatgttctcctgtatgtggatcgtttggatgcgtacagaatggatacacttgatggacaggttataagagccatcaccaattcatttggaaaagatatttggcgaagatcattggttgtgttgacccatgctcaactctcaccacctgatggaatcgagtataatgatttctttacaagaaggtcagaggcacttttgcgatacttccggatggaactccgtgggttccaaaactgatgaaagaaattactgttgttatctcaaacgggagcaagcccattcatgttgatcagaagttaattgatggtccaaaccctaacaatcgctggaagatgttcataccaattatacttgctgtggagtacttcttggtagtaaaaggaatccggagggcgatccatgcagatatcgcaaatgggaaggtggatgactgggagcagcgttaccgggacttggttggaagcagggaccctgtggagcagaaaggttctaccacccggaaccgcaaagcctaagttggtgtagcagaaatgattttattcgtgttgtgacccactcgatctgcttgctgttccttttcctaattatgtgttgagggctttatagagttcgctggttctacttgaaaaataattgctcgtgttgtagttgataagaatatcttttccattttatgatgcttggccctcttcgcaattttgaatattgttatcaaacccctgctattatgtttagcaagttgttaaatagctattggagtaaaaattagcatatttaggagtagttcagttttgaatctagttttggtatgcttgctcctgtcagaaaaggttggcaatggagtcaagagaagagggcgtcgagggcatagaaggttggtcggaacgacctatagtgtagcggtggttcaatggttaggagaaacttgtgttatgcatattggacctgactatctcgctgcacgagaaaggggaaaaaagagtgtctgattgtagcggtggttcaatggtaaaggagaagcttgtgttatacatattggatcttactatctcgctgcacgagaaagggggaaaagagtgtcagatttggttactcgctatacgggaaaaggaaaaaaaatgagaaaaggaaaaaaatgagaacatgagtgtgaagaaattgacatcaactatatttaagaaacatctatcgagttgctaaatctgaatagattgctaaatctggaaagtaaatgaaatttgatagtaagtaactaaatttaacaagtctatttagagaattattggagaagccttttttctcaattatttttaaaatttaaaatttagggagttatttagagaac

SEQ ID NO: 81420 - DNA, 1263 bp, Zea Mays
aaatatatccagaaaaattcaagttggtcgtaacaaaaactttccttaaaataagctcacgaagttccgtatttgtagggctgttcactgtccgattgtcggggaaaaattaaaacaggaaaccacgctctgtctatgcctccgttgtgtgtccgacccagcgttgtgattgggggaagtagggagtgctcacaccatttcttgtccattgacatcagcgctccacgcctgcgcccccgaattcccaaatcctgcggcgcctccgccccaaccccgctcgtcgactcctctcttccgaacacgccggaggaatccttctccgcgactcgtcttcctcctctctgccgtgctggcgtggagtggagatccaccaccacctggattggtctcttcttctgctggttagacgctgaatctgtccttcaatgccttcacaggctctattcctgaagaagttgcagagttagaagcaattgccgtgttttttaattgaagggaacaaattttcgggtcatatccagattggatacggaacatgtgaaagctgtccttttgggaccttaagagaatacaaagcaaaaggaacataagggtagaggacggaaataaacaatgggaaagggtgatgtggctactaggtccaaatctcaaaaatcgtcagcaatacagaatgagccgagtacacctgctaacccccccacagcatatcctgattggtctcagttccaggcatactataatgctgctgggacagctccagtaaccccaccggctttttttcattcatctgtagctccaacccatcaggggcacccgtatatgtggggtccacagatgatgcctccttatgggacaccaccaccatatgcaacaatgtatgcacaaggcacaccataccagcaggcacccatgccaccgggttcatacccatacggtccttatcctatgccgtcaccaaatgggacaattcaacctccaacatctggtgctggcggtacagagacagatagatcaaaaaataagcggaagactcccctgaaaagatcaaaaggaagcttaggtagtctggatgttgttgcagtaaaaaataacaagtcagcggcaaagccttcagtttcttcctccaatgaaggttcttcacaaagtgagagtggaagcgggagttcttctgaaggaagcagtacaaattcaaaaagtgtatgtcattccattatattactacatttagcttcataatgctactagtacaaattccaaagcagt

SEQ ID NO: 81421 - DNA, 1246 bp, Zea Mays
gaaaaattcaagttggtcgtaacaaaaactttccttaaaataagctcacgaagttccgtatttgtagggctgttcactgtccgattgtcggggaaaaattaaaacaggaaaccacgctctgtctatgcctccgttgtgtgtccgacccagcgttgtgattgggggaagtagggagtgctcacaccatttcttgtccattgacatcagcgctccacgcctgcgcccccgaattcccaaatcctgcggcgcctccgccccaaccccgctcgtcgactcctctcttccgaacacgccggaggaatccttctccgcgactcgtcttcctcctctctgccgtgctggcgtggagtggagatccaccaccacctggattggtctcttcttctgctggttagacgctgaatctgtccttcaatgccttcacaggctctattcctgaagaagttgcagagttagaagcaattgccgtgttttttaattgaagggaacaaattttcgggtcatatccagattggatacggaacatgctgtccttttgggaccttaagagaatacaaagcaaaaggaacataagggtagaggacggaaataaacaatgggaaagggtgatgtggctactaggtccaaatctcaaaaatcgtcagcaatacagaatgagccgagtacacctgctaacccccccacagcatatcctgattggtctcagttccaggcatactataatgctgctgggacagctccagtaaccccaccggctttttttcattcatctgtagctccaacccatcaggggcacccgtatatgtggggtccacagatgatgcctccttatgggacaccaccaccatatgcaacaatgtatgcacaaggcacaccataccagcaggcacccatgccaccgggttcatacccatacggtccttatcctatgccgtcaccaaatgggacaattcaacctccaacatctggtgctggcggtacagagacagatagatcaaaaaataagcggaagactcccctgaaaagatcaaaaggaagcttaggtagtctggatgttgttgcagtaaaaaataacaagtcagcggcaaagccttcagtttcttcctccaatgaaggttcttcacaaagtgagagtggaagcgggagttcttctgaaggaagcagtacaaattcaaaaagtgtatgtcattccattatattactacatttagcttcataatgctactagtacaaattccaaagcagt

SEQ ID NO: 81422 - DNA, 1017 bp, Zea Mays
caggaaaccacgctctgtctatgcctccgttgtgtgtccgacccagcgttgtgattgggggaagtagggagtgctcacaccatttcttgtccattgacatcagcgctccacgcctgcgcccccgaattcccaaatcctgcggcgcctccgccccaaccccgctcgtcgactcctctcttccgaacacgccggaggaatccttctccgcgactcgtcttcctcctctctgccgtgctggcgtggagtggagatccaccaccacctggattggtctcttcttctgctggttagacgctgaatctgtccttcaatgccttcacaggctctattcctgaagaagttgcagagttagaagcaattgccgtgttttttaattgaagggaacaaattttcgggtcatatccagattggatacggaacatgaatgagccgagtacacctgctaacccccccacagcatatcctgattggtctcagttccaggcatactataatgctgctgggacagctccagtaaccccaccggctttttttcattcatctgtagctccaacccatcaggggcacccgtatatgtggggtccacagatgatgcctccttatgggacaccaccaccatatgcaacaatgtatgcacaaggcacaccataccagcaggcacccatgccaccgggttcatacccatacggtccttatcctatgccgtcaccaaatgggacaattcaacctccaacatctggtgctggcggtacagagacagatagatcaaaaaataagcggaagactcccctgaaaagatcaaaaggaagcttaggtagtctggatgttgttgcagtaaaaaataacaagtcagcggcaaagccttcagtttcttcctccaatgaaggttcttcacaaagtgagagtggaagcgggagttcttctgaaggaagcagtacaaattcaaaaagtgtatgtcattccattatattactacatttagcttcataatgctactagtacaaattccaaagcagt

SEQ ID NO: 81423 - DNA, 1313 bp, Zea Mays
cccagcgttgtgattgggggaagtagggagtgctcacaccatttcttgtccattgacatcagcgctccacgcctgcgcccccgaattcccaaatcctgcggcgcctccgccccaaccccgctcgtcgactcctctcttccgaacacgccggaggaatccttctccgcgactcgtcttcctcctctctgccgtgctggcgtggagtggagatccaccaccacctggattggtctcttcttctgctggttagacgctgaatctgtccttcaatgccttcacaggctctattcctgaagaagttgcagagttagaagcaattgccgtgttttttaattgaagggaacaaattttcgggtcatatccagattggatacggaacatgtgaaagctgtccttttgggaccttaagagaatacaaagcaaaaggaacataagggtagaggacggaaataaacaatgggaaagggtgatgtggctactaggtccaaatctcaaaaatcgtcagcaatacagaatgagccgagtacacctgctaacccccccacagcatatcctgattggtctcagttccaggcatactataatgctgctgggacagctccagtaaccccaccggctttttttcattcatctgtagctccaacccatcaggggcacccgtatatgtggggtccacagatgatgcctccttatgggacaccaccaccatatgcaacaatgtatgcacaaggcacaccataccagcaggcacccatgccaccgggttcatacccatacggtccttatcctatgccgtcaccaaatgggacaattcaacctccagtaagttaatgggtgccttttatttgatatatttattgttacagaatggatgcagaatttcacccattcctttctaaagctttcatcttaactgttctctgtcatttatatttgttacataggaattcacttgtttgagtcgtgtttatgccatttgtctcctcacagcagataagtttttttttttgattgggttatgttgttagacatctggtgctggcggtacagagacagatagatcaaaaaataagcggaagactcccctgaaaagatcaaaaggaagcttaggtagtctggatgttgttgcagtaaaaaataacaagtcagcggcaaagccttcagtttcttcctccaatgaaggttcttcacaaagtgagagtggaagcgggagttcttctgaaggaagcagtacaaattcaaaaagtgtatgtcattccattatattactacatttagcttcataatgctactagtacaaattccaaagcagt

SEQ ID NO: 81424 - DNA, 251 bp, Zea Mays
ttagatgtccaacggggacgtgtacgagcggacgcacgacgagcttgacttcgagttcctcgggaacgtgcgcggcaaggagtggcgcgtgcagaccaacgtgtacggcaacggcagcacggcggccggccgggaggagcgctacggcctctggttcgaccccacggaggacttccaccgctacgccatccactggacccgcgacaggatcattctgtctgatgacgaatactgacgcgggaaggacggaa

SEQ ID NO: 81425 - DNA, 1211 bp, Zea Mays
tagatgtccaacggggacgtgtacgagcggacgcacgacgagcttgacttcgagttcctcgggaacgtgcgcggcaaggagtggcgcgtgcagaccaacgtgtacggcaacggcagcacggcggccggccgggaggagcgctacggcctctggttcgaccccacggaggacttccaccgctacgccatccactggacccgcgacaggatcatttggtgcaagggagcttctattggatggcacagtgatgacaacaagccttatcttaggcaaagggcattcacagcagtttgctacttgaacaatcatggagaggactataagggtggaattttgcagtttcaggatggtgatccttcctgtattgttccagttgctggtgatgttgtcatatacacggctgatactcgtaatgttcattgtgtaaatgaggtaactgaaggggaaaggttgaccctgactctttggttcactagagaccgtgcttatgatgaggatccaaaacttcttaactttctgtctcagacatcattgagctgtgaaccaactgagcaaaattcttatattcctgtaccagcttctgataacatgtatcgcttttcttgtgatcagtctggttttgacatacgatgtgctagagtgcatattctggggtttagttttcactcaagtagtggtgaatgcaatatatctgcgtcaccagctgaagatgacccaatagagttgcttggaaagcaactgcggctcgggaggggagatgatgtctttgagaaaatattttctaacagcttacatgctcttcaggtggtgcaattctactactggaaaaaacatgagctggcagcaaggagggaacaaagtgttgttagttcaggaacagtctgctgtccagttacacatcattcaaaaggaacagaattaccattaccatgcaatcacgcacttgcacaaactatatttggatcatataatactgaggagattgtccagtggaatgattttgcattagctgttgctatgtgggaaaaatattcagaagagttaaagaaacagttgttgacatttttgccatattggttgtccaatgaaaccatttatgttgttgatacctctgagctgcagagagccgaaccaatctaactctccaatggtgatttggactgcctcattcttatgcgacatagctgtggcgtagatatgtttctctcaag

SEQ ID NO: 81426 - DNA, 1332 bp, Zea Mays
gtacaacactgtgaccaaggaatcgggctttagggatccctatgtccagtaccaccacctcgcctccgccgccggccgccggggaccatccccgcgttctgctccgaggtttcctctcccgtgagacatgcaaggagctggagttcgtgcaccggagctgcggcgcagcggggtaccgcccctcggtgatatcgacatctctgccgcacctggcggccaccggctgcggccacctcctgctcccgttcgtgcccgtccgcgagcgcctccgcgacgctgtggagtccttcttcgattgccacttcgatctcttcatcgagttcaccgggcttatcagttggtgcaagggagcttctattggatggcacagtgatgacaacaagccttatcttaggcaaagggcattcacatttgctacttgaacaatcatggagaggactataagggtggaattttgcagtttcaggatggtgatccttcctgtattgttccagttgctggtgatgttgtcatatacacggctgatactcgtaatgttcattgtgtaaatgaggtaactgaaggggaaaggttgaccctgactctttggttcactagagaccgtgcttatgatgaggatccaaaacttcttaactttctgtctcagacatcattgagctgtgaaccaactgagcaaaattcttatattcctgtaccagcttctgataacatgtatcgcttttcttgtgatcagtctggttttgacatacgatgtgctagagtgcatattctggggtttagttttcactcaagtagtggtgaatgcaatatatctgcgtcaccagctgaagatgacccaatagagttgcttggaaagcaactgcggctcgggaggggagatgatgtctttgagaaaatattttctaacagcttacatgctcttcaggtggtgcaattctactactggaaaaaacatgagctggcagcaaggagggaacaaagtgttgttagttcaggaacagtctgctgtccagttacacatcattcaaaaggaacagaattaccattaccatgcaatcacgcacttgcacaaactatatttggatcatataatactgaggagattgtccagtggaatgattttgcattagctgttgctatgtgggaaaaatattcagaagagttaaagaaacagttgttgacatttttgccatattggttgtccaatgaaaccatttatgttgttgatacctctgagctgcagagagccgaaccaatctaactctccaatggtgatttggactgcctcattcttatgcgacatagctgtggcgtagatatgtttctctcaag

SEQ ID NO: 81427 - DNA, 1156 bp, Zea Mays
gtacaacactgtgaccaaggaatcgggctttagggatccctatgtccagtaccaccacctcgcctccgccgccggccgccggggaccatccccgcgttctgctccgaggtttcctctcccgtgagacatgcaaggagctggagttcgtgcaccggagctgcggcgcagcggggtaccgcccctcggtgatatcgacatctctgccgcacctggcggccaccggctgcggccacctcctgctcccgttcgtgcccgtccgcgagcgcctccgcgacgctgtggagtccttcttcgattgccacttcgatctcttcatcgagttcaccgggcttatcagttggtgcaagggagcttctattggatggcacagtgatgacaacaagccttatcttaggcaaagggcattcacagcagtttgctacttgaacaatcatggagaggactataagggtggaattttgcagtttcaggatggtgatccttcctgtattgttccagttgctggtgatgttgtcatatacacggctgatactcgtaatgttcattgtgtaaatgagtctggttttgacatacgatgtgctagagtgcatattctggggtttagttttcactcaagtagtggtgaatgcaatatatctgcgtcaccagctgaagatgacccaatagagttgcttggaaagcaactgcggctcgggaggggagatgatgtctttgagaaaatattttctaacagcttacatgctcttcaggtggtgcaattctactactggaaaaaacatgagctggcagcaaggagggaacaaagtgttgttagttcaggaacagtctgctgtccagttacacatcattcaaaaggaacagaattaccattaccatgcaatcacgcacttgcacaaactatatttggatcatataatactgaggagattgtccagtggaatgattttgcattagctgttgctatgtgggaaaaatattcagaagagttaaagaaacagttgttgacatttttgccatattggttgtccaatgaaaccatttatgttgttgatacctctgagctgcagagagccgaaccaatctaactctccaatggtgatttggactgcctcattcttatgcgacatagctgtggcgtagatatgtttctctcaag

SEQ ID NO: 81428 - DNA, 1336 bp, Zea Mays
gtacaacactgtgaccaaggaatcgggctttagggatccctatgtccagtaccaccacctcgcctccgccgccggccgccggggaccatccccgcgttctgctccgaggtttcctctcccgtgagacatgcaaggagctggagttcgtgcaccggagctgcggcgcagcggggtaccgcccctcggtgatatcgacatctctgccgcacctggcggccaccggctgcggccacctcctgctcccgttcgtgcccgtccgcgagcgcctccgcgacgctgtggagtccttcttcgattgccacttcgatctcttcatcgagttcaccgggcttatcagttggtgcaagggagcttctattggatggcacagtgatgacaacaagccttatcttaggcaaagggcattcacagcagtttgctacttgaacaatcatggagaggactataagggtggaattttgcagtttcaggatggtgatccttcctgtattgttccagttgctggtgatgttgtcatatacacggctgatactcgtaatgttcattgtgtaaatgaggtaactgaaggggaaaggttgaccctgactctttggttcactagagaccgtgcttatgatgaggatccaaaacttcttaactttctgtctcagacatcattgagctgtgaaccaactgagcaaaattcttatattcctgtaccagcttctgataacatgtatcgcttttcttgtgatcagtctggttttgacatacgatgtgctagagtgcatattctggggtttagttttcactcaagtagtggtgaatgcaatatatctgcgtcaccagctgaagatgacccaatagagttgcttggaaagcaactgcggctcgggaggggagatgatgtctttgagaaaatattttctaacagcttacatgctcttcaggtggtgcaattctactactggaaaaaacatgagctggcagcaaggagggaacaaagtgttgttagttcaggaacagtctgctgtccagttacacatcattcaaaaggaacagaattaccattaccatgcaatcacgcacttgcacaaactatatttggatcatataatactgaggagattgtccagtggaatgattttgcattagctgttgctatgtgggaaaaatattcagaagagttaaagaaacagttgttgacatttttgccatattggttgtccaatgaaaccatttatgttgttgatacctctgagctgcagagagccgaaccaatctaactctccaatggtgatttggactgcctcattcttatgcgacatagctgtggcgtagatatgtttctctcaag

SEQ ID NO: 81429 - DNA, 1105 bp, Zea Mays
gtacaacactgtgaccaaggaatcgggctttagggatccctatgtccagtaccaccacctcgcctccgccgccggccgccggggaccatccccgcgttctgctccgaggtttcctctcccgtgagacatgcaaggagctggagttcgtgcaccggagctgcggcgcagcggggtaccgcccctcggtgatatcgacatctctgccgcacctggcggccaccggctgcggccacctcctgctcccgttcgtgcccgtccgcgagcgcctccgcgacgctgtggagtccttcttcgattgccacttcgatctcttcatcgagttcaccgggcttatcagttggtgcaagggagcttctattggatggcacagtgatgacaacaagccttatcttaggcaaagggcattcacagcagtttgctacttgaacaatcatggagaggactataagggtggaattttgcagtttcaggatggtgatccttcctgtattgttccagttgctggttctggttttgacatacgatgtgctagagtgcatattctggggtttagttttcactcaagtagtggtgaatgcaatatatctgcgtcaccagctgaagatgacccaatagagttgcttggaaagcaactgcggctcgggaggggagatgatgtctttgagaaaatattttctaacagcttacatgctcttcaggtggtgcaattctactactggaaaaaacatgagctggcagcaaggagggaacaaagtgttgttagttcaggaacagtctgctgtccagttacacatcattcaaaaggaacagaattaccattaccatgcaatcacgcacttgcacaaactatatttggatcatataatactgaggagattgtccagtggaatgattttgcattagctgttgctatgtgggaaaaatattcagaagagttaaagaaacagttgttgacatttttgccatattggttgtccaatgaaaccatttatgttgttgatacctctgagctgcagagagccgaaccaatctaactctccaatggtgatttggactgcctcattcttatgcgacatagctgtggcgtagatatgtttctctcaag

SEQ ID NO: 81430 - DNA, 1133 bp, Zea Mays
gtacaacactgtgaccaaggaatcgggctttagggatccctatgtccagtaccaccacctcgcctccgccgccggccgccggggaccatccccgcgttctgctccgaggtttcctctcccgtgagacatgcaagttggtgcaagggagcttctattggatggcacagtgatgacaacaagccttatcttaggcaaagggcattcacagcagtttgctacttgaacaatcatggagaggactataagggtggaattttgcagtttcaggatggtgatccttcctgtattgttccagttgctggtgatgttgtcatatacacggctgatactcgtaatgttcattgtgtaaatgaggtaactgaaggggaaaggttgaccctgactctttggttcactagagaccgtgcttatgatgaggatccaaaacttcttaactttctgtctcagacatcattgagctgtgaaccaactgagcaaaattcttatattcctgtaccagcttctgataacatgtatcgcttttcttgtgatcagtctggttttgacatacgatgtgctagagtgcatattctggggtttagttttcactcaagtagtggtgaatgcaatatatctgcgtcaccagctgaagatgacccaatagagttgcttggaaagcaactgcggctcgggaggggagatgatgtctttgagaaaatattttctaacagcttacatgctcttcaggtggtgcaattctactactggaaaaaacatgagctggcagcaaggagggaacaaagtgttgttagttcaggaacagtctgctgtccagttacacatcattcaaaaggaacagaattaccattaccatgcaatcacgcacttgcacaaactatatttggatcatataatactgaggagattgtccagtggaatgattttgcattagctgttgctatgtgggaaaaatattcagaagagttaaagaaacagttgttgacatttttgccatattggttgtccaatgaaaccatttatgttgttgatacctctgagctgcagagagccgaaccaatctaactctccaatggtgatttggactgcctcattcttatgcgacatagctgtggcgtagatatgtttctctcaag

SEQ ID NO: 81431 - DNA, 455 bp, Zea Mays
catcataaaagaacttgagcttgttttcatttggctggaagaatcctctccatgctcttgaacggtctctgcttgtgaagtattgaattggactctaaaggcggagcatgtaagcttatatggtgatcatgcccattgatgtagaagaagtcgatgctgttgatctggaatggactaaacttattatcaaaagatgcttttttttttgtattttggaggctaatattgtggctgcttccgagcaaccttgggccttgttgtttggttagaagaggattgagggggatttgttacttcgcgctgttaaaaaacattatactttgcgctctactgaaagggcagcaaacaaagacgtcgtgtatgccatatgctccttgcctgtgaaaaaagaaaataaagtttgtacggtccagtgtttagtctattcgcagtgcaggttactctatatccttact

SEQ ID NO: 81432 - DNA, 1761 bp, Zea Mays
ggcctctcagtttcatctcgtcttcgtcctccggcgttcttctgctcttctccgcagtcgtcgtcacgtcatcgccctatagctagcttagctagacgaccgctcgcgagggcatacgcgaggctacgactccatcgtgctggtggtgctacaagctcatcatcagttcatcatgctagagaaccaaaagcaagcggaggttctctggccgcggctggtggccaacaagctcttccggaagacctcgggcagccacgccttcgtcgccgatttcccggccaccgatggcgacggcgatgtcgtctttggtggaacggagttcgacggcggcgggtgcagccccgaccccgacgacgcggacgccagccgctgcgtgaagcgggcgcggccgcagccgcagccgcaggagcgcaacaagaagaccctcaagtacaagctgttcgcgagcacgtggaacgtcggcggcgtggcgccaccggacgagctggacctgtcggactggctggacggcggcggcggcgacgacgacgacgggccctacgacatgtacgtgctggggttccaggaggtggtgccgctgcgcgcgcgcaacgtgctgggtgccgacaagaagcgcgtcgggatgcggtggatcgagctcacccgcgccgcgctcaaccggtcgtcgtcatcgcacgcgcagcgcgggggagggagcggcggcggatcaggctcaggcgacggcggcggcggcggcaggcagaaggtgcacccggtgcgggacggcggcggcggcggcgggctggcctgcagggactaccggtgcgtggtgagcaagcagatggtgggcgtcctgctcacggtgtgggtgcgctccgacctccgccgcttcgtccgccgcgccagcgtctcctgcgtcggctgcggcgtcatgggctgccttggcaacaagccgggtgatccttctcggggacctcaactacaggatctcgctgccggaggccaagacgaggctgctggtggagcggcaggactggaagacgctgctggagaacgaccagctgcgcgccgaggtgcgccgcggcggcgcgttccagggctggagcgaggggcccatcgccttctccccgacctacaagtactgccccaactccgacgcctactacggctgcgccaccgccagcgccaccgccgacgcccgccggcacaagcggcgcgcgccggcgtggtgcgaccgcatcctgtggcgcggcgaggggatccggcaggcccggtacggccgctgcgagtcccggctgtcggaccaccgccccgtgcgcgccgtcttcacggtggaggtgggcgcgcccgcgcccgggagtaacctcaactcgctcaggagcttcttcatgtccgagaggttcgacggggctggcagcaggagccccgccgccgaccagctactccgcagggacgacgacgtcaacagcgccagattcagcgacgcgctttgagacacgcatgggatgggagggtggagatggaattgtcactccacttctccggttgcggattgtacttgcgcacagacagaagatcgtatctacaacatgctgctaagatacagagatggtttttttctttttttttaaaaaaaaatccaccctgttcccaacgttctgtaactactatacatttgtactcttgttgatccagtgagtatgattgggcctcaagtcaagtttgttgccatgggcaaccatgaatgacaacagaaatcacagagaaaactatatatattca

SEQ ID NO: 81433 - DNA, 4090 bp, Zea Mays
tccacgtcgtctgaaattcaggtggccgtcggatttttcgtggacgctccctagcggctcggtgtctccatgtgccgtgaaggttcgagaaccatcgtatgttcacgaatcgatttcctgtcacacacaggctctctacgatacgggaagtcgggaaccttccggatggactccttcctcagccatcgtagcttgcctcgcggcactggcggcggctccgcccggccagcacaaccgcagtcccagtcttctagacgaagcgaacgtgcgacgggaaaaacacggcccccgttggtcgaatccacgccggcgacgtcccctgccaccgcccaactgagtggtacaggtacaccgtacaccaatccatccgatctttgggcctaataccttggaacaagcaaaggggtcggacccctaaggcggcagtgctccactccatcaagcgatgcacgacgtcaatggaagactccgccggccaggaggtctgcgccgttcttggcattggggacaacatcaagggcctcttggccacgctgtcgcgcgttgacaccatcatctcctatgattcgtcccctcgctcaacctgcatcctatcataccctatcccgtgccaagtccctgattcacggtggctgtgtggtagtcggtaacgctgcatatgaacctgggcgacatcaagtgcgaggtgttctgcaaccaggtgccccgcacggcagagaacttcttggccctctacgctagcggctactacgacagcactgtgttccaccgcaacatcaaggcttcatggtataaggcggcgaccccatcggttccggcaatgcagggcctccatctgggcaccaagttcgccgacgagttcagggagtcccaaggtagcacactatgcagtgcagggcctaacagcggacccaacgtcaacggcagccggttcttcatcacctacgccaagcagccgttctgaaaaaaaaattgaacagagtcacccaagaatgtgcatgtctggaatgacagcttcagattaacgacaaccacaattttccaattgtgtggttttgatggagtcatgtatgggtaaccaggagaccatctgaataaatccgagaactacgactcattatattaagaagataggaaaaaaaggcttgagaattacgcctcatgattcatcgcatttttcttgatcgttgttgcttcaaggataacagcgagcgggcaaaaagaaatgaatttgatcaatcatattgaatcatggaatggatcacctaacacctgctgcaccatgttcgcatgggtccagtcatactcgagagaaatggtgaaatgaaatcattggacggctaagaacagcgcgccgatcggtgtgcaagaaaggctttctcaatgatgaaaactgcgtctgtaaacccctctatcaatcgcatcagcgcaccagctcacggaaagaagctcaagaacatggtgcctccttttttttctctaaaacttctgaaagttcctttaatccatgttttagctcttatcgcgtggtagaactagcgttgcagacgacaaataccacctttcatccatgacataaggcaaaggttagtccgcgcatagtttaatttgcaggggacgataacacttgtattagatgatgcaagttgcttgtcttacattttgaggtaggggaagaacacttttggtgagacaggaactggtctagagttatccctccgaaaaatcttgcagttcaaaatctgatctcttagtttttgccggtttcttcttcacatctgttccttttcttagtgatgtgtttagcttcctctgtactgctttgtatggaatccggttgaatattgggtcaggcttgtgcagtgcatcagaaaaaactctttttattttctggatttggcatagcatctcccagtgcctagtgccgggaaaccatgactgatgtctccagaatccagcatatgttctctcaactccactttattagggccagttcggtaactccattttcccaaactagtctttagtgtagactacgttactttgtggttttggttggtctagccataaggacatgtacaatggtaattaatgtagaggctcttaaggtgtttaaaaagttatttgcaaaaaaatcgtagagtcatctctctgtgaagagacgcagctcgtaaaccaagtacaaacagacgactcatttatcactgtacgaattcgtcgtctgttatatcgatccgatgacgtacaaccacatttacttctgcatttactaatagactatatttataaacattttattgtataatagagtcttttagttgtcccttgtgtttggaaagctgttttaatgtctccaccgaacataccctaaagtctctacctaatactgctttagagctttttctctacgacaagggagcttaatttctgtgcgcaattgtctctccgaggatcggtgacgtgctgacggcaaactccttggacaactacacggccgaagcaagcaaggacggccctcgtcaagaactcaagacgcgcgtttcaagccctgcctgttggtgtggggggcatgacctcgggagacagcgcgcggccatgcagccggatccggaatggccggtcgcgccgtgcgccggtgcccatccccacgcccgccgcatgctgcctccatctgccctcgatcgggaactgaggccgtgaggcgtacgaaatgcttaatcaaacacagtgatgcgcgggcgctcatccataggcgtacagcgtactgatgcagcatccatggacgtcctgaccacgccatcaatcaagcaaaaatgaaaccagcaacggtagtcaggtgtagtgctgctgcggccacagtgctcggcgctcgctcgtgctgcctgctggtgctctgtgctcgagtgctcgacggccgctgcccgctgcgctgggagcttgcgacgagccaacgggtcaccggtcgacggccacccgcgcgccaccgcgccagactgggcgcgccctcctcgccgtgggtcctccactccgggatccggcggcggcggcggcctccctgcggccctgcctgcgccgtgcagtgccgcccctcgccggcggtcggctcaactccctgtccaccacagtgccgagccggcatccacctcctgcttccaccgccagtttgccacagtgccgcgccggcctcccgtccctggtcgaaggccgccaccgccacctactgaattgtgataatgaacgtgacggcggcgaggcagcggaggctgcccccgctcgggccacggcggccactcccgccgccgcgcctcctcgccgctgtcatcgccttcgccttcgcgctcctcttcctgctcctcgtgcttctctccagctcctcccctcactcgccgccgccatcccaccacgccgtcgtcgcaagatcatcctcgtcctcggcaccgccgtggcctcgctgcagcagcgcggcggcgagcctcggggagctcggcgacgcgatggtgtccatgctgcccaaggacctcccgttcaccgtcttcgtgccctcagtggactctttcacccgcgtccttaggctgcaggggtccaagtccaacgccagcactggagatcaggaagcggccaccgacaccgacaccaacacctacgccatcctatcccgcgtgctcggcttctccgcggtccctcgccgcctgctcgccgcggacgtgccggtgccgccgcgcggggccggggcggtgcgcctcctggactccgtgtccgggctgaggctgtacgcctccagggacgcgcgcggggcgctcgtcgtgaacggcgtgcggtcggagtgcgtcgatattatcaggggcgagaccgtggtgcatgtcctggcgggtgtcctcatggacgccgaatttgagcgttcgttcggtggaatttgacggccgatcatcaagtcatcaaccctttgagtttgacgtggctcatttctttattctggagaggatttgcaagacaatgcatttggaaaattttaaattgcggcgaaaacaagttgcgacttgcctcggatgaggttagatggatcttgaataaaaggttatcacttatcagc

SEQ ID NO: 81434 - DNA, 4495 bp, Zea Mays
cgtcgtctgaaattcaggtggccgtcggatttttcgtggacgctccctagcggctcggtgtctccatgtgccgtgaaggttcgagaaccatcgtatgttcacgaatcgatttcctgtcacacacaggctctctacgatacgggaagtcgggaaccttccggatggactccttcctcagccatcgtagcttgcctcgcggcactggcggcggctccgcccggccagcacaaccgcagtcccagtcttctagacgaagcgaacgtgcgacgggaaaaacacggcccccgttggtcgaatccacgccggcgacgtcccctgccaccgcccaactgagtggtacaggtacaccgtacaccaatccatccgatctttgggcctaataccttggaacaagcaaaggggtcggacccctaaggcggcagtgctccactccatcaagcgatgcacgacgtcaatggaagactccgccggccaggaggtctgcgccgttcttggcattggggacaacatcaagggcctcttggccacgctgtcgcgcgttgacaccatcatctcctatgattcgtcccctcgctcaacctgcatcctatcataccctatcccgtgccaagtccctgattcacggtggctgtgtggtagtcggtaacgctgcatatgaacctgggcgacatcaagtgcgaggtgttctgcaaccaggtgccccgcacggcagagaacttcttggccctctacgctagcggctactacgacagcactgtgttccaccgcaacatcaaggcttcatggtataaggcggcgaccccatcggttccggcaatgcagggcctccatctgggcaccaagttcgccgacgagttcagggagtcccaaggtagcacactatgcagtgcagggcctaacagcggacccaacgtcaacggcagccggttcttcatcacctacgccaagcagccgttctgaaaaaaaaattgaacagagtcacccaagaatgtgcatgtctggaatgacagcttcagattaacgacaaccacaattttccaattgtgtggttttgatggagtcatgtatgggtaaccaggagaccatctgaataaatccgagaactacgactcattatattaagaagataggaaaaaaaggcttgagaattacgcctcatgattcatcgcatttttcttgatcgttgttgcttcaaggataacaggtatatttactgcaactactcagcatgttaggtaatatcaattttttaagttgttgcatcatcatatctcattttaagttgttgtctcaccacatgtactactttataacatgaatactaagttgagtgcataattattttgtgaccactaaaaccaatattttgtatgttcagtacatgtatatatatatccatttaggaatctaatagctagactgctcatgagtctgcatttgtacaccgaactgttccacttcaaacgattttctatttaggtaattctgttatttctatgtgtatgtatctatatatattattgttactataagtttaaagcaatactcttattttaacaccataaacacaacgattaaattaacactcgcgcgaggcgcgagtaagttactagttatatatatacgccaagggatttgtttaagctgcagctaactcatttgtgttgcactgttacgccctttccacttgataactccatgactgtcttagcgagcgggcaaaaagaaatgaatttgatcaatcatattgaatcatggaatggatcacctaacacctgctgcaccatgttcgcatgggtccagtcatactcgagagaaatggtgaaatgaaatcattggacggctaagaacagcgcgccgatcggtggtgcaagaaaggctttctcaatgatgaaaactgcgtctgtaaacccctctatcaatcgcatcagcgcaccagctcacggaaagaagctcaagaacatggtgcctccttttttttctctaaaacttctgaaagttcctttaatccatgttttagctcttatcgcgtggtagaactagcgttgcagacgacaaataccacctttcatccatgacataaggcaaaggttagtccgcgcatagtttaatttgcaggggacgataacacttgtattagatgatgcaagttgcttgtcttacattttgaggtaggggaagaacacttttggtgagacaggaactggtctagagttatccctccgaaaaatcttgcagttcaaaatctgatctcttagtttttgccggtttcttcttcacatctgttccttttcttagtgatgtgtttagcttcctctgtactgctttgtatggaatccggttgaatattgggtcaggcttgtgcagtgcatcagaaaaaactctttttattttctggatttggcatagcatctcccagtgcctagtgccgggaaaccatgactgatgtctccagaatccagcatatgttctctcaactccactttattagggccagttcggtaactccattttcccaaactagtctttagtgtagactacgttactttgtggttttggttggtctagccataaggacatgtacaatggtaattaatgtagaggctcttaaggtgtttaaaaagttatttgcaaaaaaatcgtagagtcatctctctgtgaagagacgcagctcgtaaaccaagtacaaacagacgactcatttatcactgtacgaattcgtcgtctgttatatcgatccgatgacgtacaaccacatttacttctgcatttactaatagactatatttataaacattttattgtataatagagtcttttagttgtcccttgtgtttggaaagctgttttaatgtctccaccgaacataccctaaagtctctacctaatactgctttagagctttttctctacgacaagggagcttaatttctgtgcgcaattgtctctccgaggatcggtgacgtgctgacggcaaactccttggacaactacacggccgaagcaagcaaggacggccctcgtcaagaactcaagacgcgcgtttcaagccctgcctgttggtgtggggggcatgacctcgggagacagcgcgcggccatgcagccggatccggaatggccggtcgcgccgtgcgccggtgcccatccccacgcccgccgcatgctgcctccatctgccctcgatcgggaactgaggccgtgaggcgtacgaaatgcttaatcaaacacagtgatgcgcgggcgctcatccataggcgtacagcgtactgatgcagcatccatggacgtcctgaccacgccatcaatcaagcaaaaatgaaaccagcaacggtagcaaagtggcaatggtttcacttccagtccaatcaattccttcgtttgacgttctatccctgactcaggtagtcaggtgtagtgctgctgcggccacagtgctcggcgctcgctcgtgctgcctgctggtgctctgtgctcgagtgctcgacggccgctgcccgctgcgctgggagcttgcgacgagccaacgggtcaccggtcgacggccacccgcgcgccaccgcgccagactgggcgcgccctcctcgccgtgggtcctccactccgggatccggcggcggcggcggcctccctgcggccctgcctgcgccgtgcagtgccgcccctcgccggcggtcggctcaactccctgtccaccacagtgccgagccggcatccacctcctgcttccaccgccagtttgccacagtgccgcgccggcctcccgtccctggtcgaaggccgccaccgccacctactgaattgtgataatgtgagtgattctcctctccccaatggcccaattcctccccttttcgggaaaaatttctgtctcatgcaaacactttttttatagtctatcacatccaccacttccgaacaaaaaatagattaaaatttacagcttaactcttcgataatttatttttttctatttatatggaccactgtatatgataggctgtcaaagagattctttgcatcccatacaaagaaattttccccttttcgctatctatccattggattgttgaatgttgtattgttaattttaaagatcttagagagtttaagtgatcattaatttgtatagtggctcggggcgtcactttcaccttgcatcccatgcaaagaattttttccccttttcgctatctatccattggattgttgaatgttgtaatgttaattttaaagatcttagagagttaaagtgatcattaatttgtatagtgacccggtgcgtcactttcaccttgcatcccatgcaaagatatttcccccttttcgctatctatccattggattgttgaatgttgtattgttaattttaaaggtcttagagagttaaagtggtcattaatttgtatagtggctcgaggcgtcactttcacctacctccggcaccgtgggagttttttttctattataaactccatttcaagctgaaattcgat

SEQ ID NO: 81435 - DNA, 3824 bp, Zea Mays
cgtcgtctgaaattcaggtggccgtcggatttttcgtggacgctccctagcggctcggtgtctccatgtgccgtgaaggttcgagaaccatcgtatgttcacgaatcgatttcctgtcacacacaggctctctacgatacgggaagtcgggaaccttccggatggactccttcctcagccatcgtagcttgcctcgcggcactggcggcggctccgcccggccagcacaaccgcagtcccagtcttctagacgaagcgaacgtgcgacgggaaaaacacggcccccgttggtcgaatccacgccggcgacgtcccctgccaccgcccaactgagtggtacaggtacaccgtacaccaatccatccgatctttgggcctaataccttggaacaagcaaaggggtcggacccctaaggcggcagtgctccactccatcaagcgatgcacgacgtcaatggaagactccgccggccaggaggtctgcgccgttcttggcattggggacaacatcaagggcctcttggccacgctgtcgcgcgttgacaccatcatctcctatgattcgtcccctcgctcaacctgcatcctatcataccctatcccgtgccaagtccctgattcacggtggctgtgtggtagtcggtaacgctgcatatgaacctgggcgacatcaagtgcgaggtgttctgcaaccaggtgccccgcacggcagagaacttcttggccctctacgctagcggctactacgacagcactgtgttccaccgcaacatcaaggcttcatggtataaggcggcgaccccatcggttccggcaatgcagggcctccatctgggcaccaagttcgccgacgagttcagggagtcccaaggtagcacactatgcagtgcagggcctaacagcggacccaacgtcaacggcagccggttcttcatcacctacgccaagcagccgttctgaaaaaaaaattgaacagagtcacccaagaatgtgcatgtctggaatgacagcttcagattaacgacaaccacaattttccaattgtgtggttttgatggagtcatgtatgggtaaccaggagaccatctgaataaatccgagaactacgactcattatattaagaagataggaaaaaaaggcttgagaattacgcctcatgattcatcgcatttttcttgatcgttgttgcttcaaggataacagtcatactcgagagaaatggtgaaatgaaatcattggacggctaagaacagcgcgccgatcggtgtgcaagaaaggctttctcaatgatgaaaactgcgtctgtaaacccctctatcaatcgcatcagcgcaccagctcacggaaagaagctcaagaacatggtgcctccttttttttctctaaaacttctgaaagttcctttaatccatgttttagctcttatcgcgtggtagaactagcgttgcagacgacaaataccacctttcatccatgacataaggcaaaggttagtccgcgcatagtttaatttgcaggggacgataacacttgtattagatgatgcaagttgcttgtcttacattttgaggtaggggaagaacacttttggtgagacaggaactggtctagagttatccctccgaaaaatcttgcagttcaaaatctgatctcttagtttttgccggtttcttcttcacatctgttccttttcttagtgatgtgtttagcttcctctgtactgctttgtatggaatccggttgaatattgggtcaggcttgtgcagtgcatcagaaaaaactctttttattttctggatttggcatagcatctcccagtgcctagtgccgggaaaccatgactgatgtctccagaatccagcatatgttctctcaactccactttattagggccagttcggtaactccattttcccaaactagtctttagtgtagactacgttactttgtggttttggttggtctagccataaggacatgtacaatggtaattaatgtagaggctcttaaggtgtttaaaaagttatttgcaaaaaaatcgtagagtcatctctctgtgaagagacgcagctcgtaaaccaagtacaaacagacgactcatttatcactgtacgaattcgtcgtctgttatatcgatccgatgacgtacaaccacatttacttctgcatttactaatagactatatttataaacattttattgtataatagagtcttttagttgtcccttgtgtttggaaagctgttttaatgtctccaccgaacataccctaaagtctctacctaatactgctttagagctttttctctacgacaagggagcttaatttctgtgcgcaattgtctctccgaggatcggtgacgtgctgacggcaaactccttggacaactacacggccgaagcaagcaaggacggccctcgtcaagaactcaagacgcgcgtttcaagccctgcctgttggtgtggggggcatgacctcgggagacagcgcgcggccatgcagccggatccggaatggccggtcgcgccgtgcgccggtgcccatccccacgcccgccgcatgctgcctccatctgccctcgatcgggaactgaggccgtgaggcgtacgaaatgcttaatcaaacacagtgatgcgcgggcgctcatccataggcgtacagcgtactgatgcagcatccatggacgtcctgaccacgccatcaatcaagcaaaaatgaaaccagcaacggtagtcaggtgtagtgctgctgcggccacagtgctcggcgctcgctcgtgctgcctgctggtgctctgtgctcgagtgctcgacggccgctgcccgctgcgctgggagcttgcgacgagccaacgggtcaccggtcgacggccacccgcgcgccaccgcgccagactgggcgcgccctcctcgccgtgggtcctccactccgggatccggcggcggcggcggcctccctgcggccctgcctgcgccgtgcagtgccgcccctcgccggcggtcggctcaactccctgtccaccacagtgccgagccggcatccacctcctgcttccaccgccagtttgccacagtgccgcgccggcctcccgtccctggtcgaaggccgccaccgccacctactgaattgtgataatgtgagtgattctcctctccccaatggcccaattcctccccttttcgggaaaaatttctgtctcatgcaaacactttttttatagtctatcacatccaccacttccgaacaaaaaatagattaaaatttacagcttaactcttcgataatttatttttttctatttatatggaccactgtatatgataggctgtcaaagagattctttgcatcccatacaaagaaattttccccttttcgctatctatccattggattgttgaatgttgtattgttaattttaaagatcttagagagtttaagtgatcattaatttgtatagtggctcggggcgtcactttcaccttgcatcccatgcaaagaattttttccccttttcgctatctatccattggattgttgaatgttgtaatgttaattttaaagatcttagagagttaaagtgatcattaatttgtatagtgacccggtgcgtcactttcaccttgcatcccatgcaaagatatttcccccttttcgctatctatccattggattgttgaatgttgtattgttaattttaaaggtcttagagagttaaagtggtcattaatttgtatagtggctcgaggcgtcactttcacctacctccggcaccgtgggagttttttttctattataaactccatttcaagctgaaattcgat

SEQ ID NO: 81436 - DNA, 3916 bp, Zea Mays
cgtcgtctgaaattcaggtggccgtcggatttttcgtggacgctccctagcggctcggtgtctccatgtgccgtgaaggttcgagaaccatcgtatgttcacgaatcgatttcctgtcacacacaggctctctacgatacgggaagtcgggaaccttccggatggactccttcctcagccatcgtagcttgcctcgcggcactggcggcggctccgcccggccagcacaaccgcagtcccagtcttctagacgaagcgaacgtgcgacgggaaaaacacggcccccgttggtcgaatccacgccggcgacgtcccctgccaccgcccaactgagtggtacaggtacaccgtacaccaatccatccgatctttgggcctaataccttggaacaagcaaaggggtcggacccctaaggcggcagtgctccactccatcaagcgatgcacgacgtcaatggaagactccgccggccaggaggtctgcgccgttcttggcattggggacaacatcaagggcctcttggccacgctgtcgcgcgttgacaccatcatctcctatgattcgtcccctcgctcaacctgcatcctatcataccctatcccgtgccaagtccctgattcacggtggctgtgtggtagtcggtaacgctgcatatgaacctgggcgacatcaagtgcgaggtgttctgcaaccaggtgccccgcacggcagagaacttcttggccctctacgctagcggctactacgacagcactgtgttccaccgcaacatcaaggcttcatggtataaggcggcgaccccatcggttccggcaatgcagggcctccatctgggcaccaagttcgccgacgagttcagggagtcccaaggtagcacactatgcagtgcagggcctaacagcggacccaacgtcaacggcagccggttcttcatcacctacgccaagcagccgttctgaaaaaaaaattgaacagagtcacccaagaatgtgcatgtctggaatgacagcttcagattaacgacaaccacaattttccaattgtgtggttttgatggagtcatgtatgggtaaccaggagaccatctgaataaatccgagaactacgactcattatattaagaagataggaaaaaaaggcttgagaattacgcctcatgattcatcgcatttttcttgatcgttgttgcttcaaggataacagcgagcgggcaaaaagaaatgaatttgatcaatcatattgaatcatggaatggatcacctaacacctgctgcaccatgttcgcatgggtccagtcatactcgagagaaatggtgaaatgaaatcattggacggctaagaacagcgcgccgatcggtgtgcaagaaaggctttctcaatgatgaaaactgcgtctgtaaacccctctatcaatcgcatcagcgcaccagctcacggaaagaagctcaagaacatggtgcctccttttttttctctaaaacttctgaaagttcctttaatccatgttttagctcttatcgcgtggtagaactagcgttgcagacgacaaataccacctttcatccatgacataaggcaaaggttagtccgcgcatagtttaatttgcaggggacgataacacttgtattagatgatgcaagttgcttgtcttacattttgaggtaggggaagaacacttttggtgagacaggaactggtctagagttatccctccgaaaaatcttgcagttcaaaatctgatctcttagtttttgccggtttcttcttcacatctgttccttttcttagtgatgtgtttagcttcctctgtactgctttgtatggaatccggttgaatattgggtcaggcttgtgcagtgcatcagaaaaaactctttttattttctggatttggcatagcatctcccagtgcctagtgccgggaaaccatgactgatgtctccagaatccagcatatgttctctcaactccactttattagggccagttcggtaactccattttcccaaactagtctttagtgtagactacgttactttgtggttttggttggtctagccataaggacatgtacaatggtaattaatgtagaggctcttaaggtgtttaaaaagttatttgcaaaaaaatcgtagagtcatctctctgtgaagagacgcagctcgtaaaccaagtacaaacagacgactcatttatcactgtacgaattcgtcgtctgttatatcgatccgatgacgtacaaccacatttacttctgcatttactaatagactatatttataaacattttattgtataatagagtcttttagttgtcccttgtgtttggaaagctgttttaatgtctccaccgaacataccctaaagtctctacctaatactgctttagagctttttctctacgacaagggagcttaatttctgtgcgcaattgtctctccgaggatcggtgacgtgctgacggcaaactccttggacaactacacggccgaagcaagcaaggacggccctcgtcaagaactcaagacgcgcgtttcaagccctgcctgttggtgtggggggcatgacctcgggagacagcgcgcggccatgcagccggatccggaatggccggtcgcgccgtgcgccggtgcccatccccacgcccgccgcatgctgcctccatctgccctcgatcgggaactgaggccgtgaggcgtacgaaatgcttaatcaaacacagtgatgcgcgggcgctcatccataggcgtacagcgtactgatgcagcatccatggacgtcctgaccacgccatcaatcaagcaaaaatgaaaccagcaacggtagtcaggtgtagtgctgctgcggccacagtgctcggcgctcgctcgtgctgcctgctggtgctctgtgctcgagtgctcgacggccgctgcccgctgcgctgggagcttgcgacgagccaacgggtcaccggtcgacggccacccgcgcgccaccgcgccagactgggcgcgccctcctcgccgtgggtcctccactccgggatccggcggcggcggcggcctccctgcggccctgcctgcgccgtgcagtgccgcccctcgccggcggtcggctcaactccctgtccaccacagtgccgagccggcatccacctcctgcttccaccgccagtttgccacagtgccgcgccggcctcccgtccctggtcgaaggccgccaccgccacctactgaattgtgataatgtgagtgattctcctctccccaatggcccaattcctccccttttcgggaaaaatttctgtctcatgcaaacactttttttatagtctatcacatccaccacttccgaacaaaaaatagattaaaatttacagcttaactcttcgataatttatttttttctatttatatggaccactgtatatgataggctgtcaaagagattctttgcatcccatacaaagaaattttccccttttcgctatctatccattggattgttgaatgttgtattgttaattttaaagatcttagagagtttaagtgatcattaatttgtatagtggctcggggcgtcactttcaccttgcatcccatgcaaagaattttttccccttttcgctatctatccattggattgttgaatgttgtaatgttaattttaaagatcttagagagttaaagtgatcattaatttgtatagtgacccggtgcgtcactttcaccttgcatcccatgcaaagatatttcccccttttcgctatctatccattggattgttgaatgttgtattgttaattttaaaggtcttagagagttaaagtggtcattaatttgtatagtggctcgaggcgtcactttcacctacctccggcaccgtgggagttttttttctattataaactccatttcaagctgaaattcgat

SEQ ID NO: 81437 - DNA, 2927 bp, Zea Mays
cgtcgtctgaaattcaggtggccgtcggatttttcgtggacgctccctagcggctcggtgtctccatgtgccgtgaaggttcgagaaccatcgtatgttcacgaatcgatttcctgtcacacacaggctctctacgatacgggaagtcgggaaccttccggatggactccttcctcagccatcgtagcttgcctcgcggcactggcggcggctccgcccggccagcacaaccgcagtcccagtcttctagacgaagcgaacgtgcgacgggaaaaacacggcccccgttggtcgaatccacgccggcgacgtcccctgccaccgcccaactgagtggtacaggtacaccgtacaccaatccatccgatctttgggcctaataccttggaacaagcaaaggggtcggacccctaaggcggcagtgctccactccatcaagcgatgcacgacgtcaatggaagactccgccggccaggaggtctgcgccgttcttggcattggggacaacatcaagggcctcttggccacgctgtcgcgcgttgacaccatcatctcctatgattcgtcccctcgctcaacctgcatcctatcataccctatcccgtgccaagtccctgattcacggtggctgtgtggtagtcggtaacgctgcatatgaacctgggcgacatcaagtgcgaggtgttctgcaaccaggtgccccgcacggcagagaacttcttggccctctacgctagcggctactacgacagcactgtgttccaccgcaacatcaaggcttcatggtataaggcggcgaccccatcggttccggcaatgcagggcctccatctgggcaccaagttcgccgacgagttcagggagtcccaaggtagcacactatgcagtgcagggcctaacagcggacccaacgtcaacggcagccggttcttcatcacctacgccaagcagccgttctgaaaaaaaaattgaacagagtcacccaagaatgtgcatgtctggaatgacagcttcagattaacgacaaccacaattttccaattgtgtggttttgatggagtcatgtatgggtaaccaggagaccatctgaataaatccgagaactacgactcattatattaagaagataggaaaaaaaggcttgagaattacgcctcatgattcatcgcatttttcttgatcgttgttgcttcaaggataacagcgagcgggcaaaaagaaatgaatttgatcaatcatattgaatcatggaatggatcacctaacacctgctgcaccatgttcgcatgggtccagtcatactcgagagaaatggtgaaatgaaatcattggacggctaagaacagcgcgccgatcggtgtgcaagaaaggctttctcaatgatgaaaactgcgtctgtaaacccctctatcaatcgcatcagcgcaccagctcacggaaagaagctcaagaacatggatcggtgacgtgctgacggcaaactccttggacaactacacggccgaagcaagcaaggacggccctcgtcaagaactcaagacgcgcgtttcaagccctgcctgttggtgtggggggcatgacctcgggagacagcgcgcggccatgcagccggatccggaatggccggtcgcgccgtgcgccggtgcccatccccacgcccgccgcatgctgcctccatctgccctcgatcgggaactgaggccgtgaggcgtacgaaatgcttaatcaaacacagtgatgcgcgggcgctcatccataggcgtacagcgtactgatgcagcatccatggacgtcctgaccacgccatcaatcaagcaaaaatgaaaccagcaacggtagtcaggtgtagtgctgctgcggccacagtgctcggcgctcgctcgtgctgcctgctggtgctctgtgctcgagtgctcgacggccgctgcccgctgcgctgggagcttgcgacgagccaacgggtcaccggtcgacggccacccgcgcgccaccgcgccagactgggcgcgccctcctcgccgtgggtcctccactccgggatccggcggcggcggcggcctccctgcggccctgcctgcgccgtgcagtgccgcccctcgccggcggtcggctcaactccctgtccaccacagtgccgagccggcatccacctcctgcttccaccgccagtttgccacagtgccgcgccggcctcccgtccctggtcgaaggccgccaccgccacctactgaattgtgataatgtgagtgattctcctctccccaatggcccaattcctccccttttcgggaaaaatttctgtctcatgcaaacactttttttatagtctatcacatccaccacttccgaacaaaaaatagattaaaatttacagcttaactcttcgataatttatttttttctatttatatggaccactgtatatgataggctgtcaaagagattctttgcatcccatacaaagaaattttccccttttcgctatctatccattggattgttgaatgttgtattgttaattttaaagatcttagagagtttaagtgatcattaatttgtatagtggctcggggcgtcactttcaccttgcatcccatgcaaagaattttttccccttttcgctatctatccattggattgttgaatgttgtaatgttaattttaaagatcttagagagttaaagtgatcattaatttgtatagtgacccggtgcgtcactttcaccttgcatcccatgcaaagatatttcccccttttcgctatctatccattggattgttgaatgttgtattgttaattttaaaggtcttagagagttaaagtggtcattaatttgtatagtggctcgaggcgtcactttcacctacctccggcaccgtgggagttttttttctattataaactccatttcaagctgaaattcgat

SEQ ID NO: 81438 - DNA, 3601 bp, Zea Mays
cgtcgtctgaaattcaggtggccgtcggatttttcgtggacgctccctagcggctcggtgtctccatgtgccgtgaaggttcgagaaccatcgtatgttcacgaatcgatttcctgtcacacacaggctctctacgatacgggaagtcgggaaccttccggatggactccttcctcagccatcgtagcttgcctcgcggcactggcggcggctccgcccggccagcacaaccgcagtcccagtcttctagacgaagcgaacgtgcgacgggaaaaacacggcccccgttggtcgaatccacgccggcgacgtcccctgccaccgcccaactgagtggtacaggtacaccgtacaccaatccatccgatctttgggcctaataccttggaacaagcaaaggggtcggacccctaaggcggcagtgctccactccatcaagcgatgcacgacgtcaatggaagactccgccggccaggaggtctgcgccgttcttggcattggggacaacatcaagggcctcttggccacgctgtcgcgcgttgacaccatcatctcctatgattcgtcccctcgctcaacctgcatcctatcataccctatcccgtgccaagtccctgattcacggtggctgtgtggtagtcggtaacgctgcatatgaacctgggcgacatcaagtgcgaggtgttctgcaaccaggtgccccgcacggcagagaacttcttggccctctacgctagcggctactacgacagcactgtgttccaccgcaacatcaaggcttcatggtataaggcggcgaccccatcggttccggcaatgcagggcctccatctgggcaccaagttcgccgacgagttcagggagtcccaaggtagcacactatgcagtgcagggcctaacagcggacccaacgtcaacggcagccggttcttcatcacctacgccaagcagccgttctgaaaaaaaaattgaacagagtcacccaagaatgtgcatgtctggaatgacagcttcagattaacgacaaccacaattttccaattgtgtggttttgatggagtcatgtatgggtaaccaggagaccatctgaataaatccgagaactacgactcattatattaagaagataggaaaaaaaggcttgagaattacgcctcatgattcatcgcatttttcttgatcgttgttgcttcaaggataacagcgagcgggcaaaaagaaatgaatttgatcaatcatattgaatcatggaatggatcacctaacacctgctgcaccatgttcgcatgggtccagtcatactcgagagaaatggtgaaatgaaatcattggacggctaagaacagcgcgccgatcggtgtgcaagaaaggctttctcaatgatgaaaactgcgtctgtaaacccctctatcaatcgcatcagcgcaccagctcacggaaagaagctcaagaacatggtgcctccttttttttctctaaaacttctgaaagttcctttaatccatgttttagctcttatcgcgtggtagaactagcgttgcagacgacaaataccacctttcatccatgacataaggcaaaggttagtccgcgcatagtttaatttgcaggggacgataacacttgtattagatgatgcaagttgcttgtcttacattttgaggtaggggaagaacacttttggtgagacaggaactggtctagagttatccctccgaaaaatcttgcagttcaaaatctgatctcttagtttttgccggtttcttcttcacatctgttccttttcttagtgatgtgtttagcttcctctgtactgctttgtatggaatccggttgaatattgggtcaggcttgtgcagtgcatcagaaaaaactctttttattttctggatttggcatagcatctcccagtgcctagtgccgggaaaccatgactgatgtctccagaatccagcatatgttctctcaactccactttattagggccagttcggtaactccattttcccaaactagtctttagtgtagactacgttactttgtggttttggttggtctagccataaggacatgtacaatggtaattaatgtagaggctcttaaggtgtttaaaaagttatttgcaaaaaaatcgtagagtcatctctctgtgaagagacgcagctcgtaaaccaagtacaaacagacgactcatttatcactgtacgaattcgtcgtctgttatatcgatccgatgacgtacaaccacatttacttctgcatttactaatagactatatttataaacattttattgtataatagagtcttttagttgtcccttgtgtttggaaagctgttttaatgtctccaccgaacataccctaaagtctctacctaatactgctttagagctttttctctacgacaagggagcttaatttctgtgcgcaattgtctctccgaggatcggtgacgtgctgacggcaaactccttggacaactacacggccgaagcaagcaaggacggccctcgtcaagaactcaagacgcgcgtttcaagccctgcctgttggtgtggggggcatgacctcgggagacagcgcgcggccatgcagccggatccggaatggccggtcgcgccgtgcgccggtgcccatccccacgcccgccgcatgctgcctccatctgccctcgatcgggaactgaggccgtgaggcgtacgaaatgcttaatcaaacacagtgatgcgcgggcgctcatccataggcgtacagcgtactgatgcagcatccatggacgtcctgaccacgccatcaatcaagcaaaaatgaaaccagcaacggtagtcaggtgtagtgctgctgcggccacagtgctcggcgctcgctcgtgctgcctgctggtgctctgtgctcgagtgctcgacggccgctgcccgctgcgctgggagcttgcgacgagccaacgggtcaccggtcgacggccacccgcgcgccaccgcgccagactgggcgcgccctcctcgccgtgggtcctccactccgggatccggcggcggcggcggcctccctgcggccctgcctgcgccgtgcagtgccgcccctcgccggcggtcggctcaactccctgtccaccacagtgccgagccggcatccacctcctgcttccaccgccagtttgccacagtgccgcgccggcctcccgtccctggtcgaaggccgccaccgccacctactgaattgtgataatctggaggctattcttcagaagcctggtgtagaaatgttacaggaatagcaaaaaaactgacatttttagattaagaaacactagaacattttgtcagacttgatttctcacacagaaatagtaattttatttgatgtttaatctattcttgcatgtttgggagttgggacattccaaacagagccctcgatggagtgagggcctgtttggttcacgactaactatgccacactttgcataaggttagtcgtctgaattgaagaactaatcttaggcagaaaagttaggcaaagtgtggcaagttaggtagtaaaccaaacaggccctgagtcttcagttactgtttgggacattccaaaatgctcaggcc

SEQ ID NO: 81439 - DNA, 4108 bp, Zea Mays
cgtcgtctgaaattcaggtggccgtcggatttttcgtggacgctccctagcggctcggtgtctccatgtgccgtgaaggttcgagaaccatcgtatgttcacgaatcgatttcctgtcacacacaggctctctacgatacgggaagtcgggaaccttccggatggactccttcctcagccatcgtagcttgcctcgcggcactggcggcggctccgcccggccagcacaaccgcagtcccagtcttctagacgaagcgaacgtgcgacgggaaaaacacggcccccgttggtcgaatccacgccggcgacgtcccctgccaccgcccaactgagtggtacaggtacaccgtacaccaatccatccgatctttgggcctaataccttggaacaagcaaaggggtcggacccctaaggcggcagtgctccactccatcaagcgatgcacgacgtcaatggaagactccgccggccaggaggtctgcgccgttcttggcattggggacaacatcaagggcctcttggccacgctgtcgcgcgttgacaccatcatctcctatgattcgtcccctcgctcaacctgcatcctatcataccctatcccgtgccaagtccctgattcacggtggctgtgtggtagtcggtaacgctgcatatgaacctgggcgacatcaagtgcgaggtgttctgcaaccaggtgccccgcacggcagagaacttcttggccctctacgctagcggctactacgacagcactgtgttccaccgcaacatcaaggcttcatggtataaggcggcgaccccatcggttccggcaatgcagggcctccatctgggcaccaagttcgccgacgagttcagggagtcccaaggtagcacactatgcagtgcagggcctaacagcggacccaacgtcaacggcagccggttcttcatcacctacgccaagcagccgttctgaaaaaaaaattgaacagagtcacccaagaatgtgcatgtctggaatgacagcttcagattaacgacaaccacaattttccaattgtgtggttttgatggagtcatgtatgggtaaccaggagaccatctgaataaatccgagaactacgactcattatattaagaagataggaaaaaaaggcttgagaattacgcctcatgattcatcgcatttttcttgatcgttgttgcttcaaggataacaggtatatttactgcaactactcagcatgttaggtaatatcaattttttaagttgttgcatcatcatatctcattttaagttgttgtctcaccacatgtactactttataacatgaatactaagttgagtgcataattattttgtgaccactaaaaccaatattttgtatgttcagtacatgtatatatatatccatttaggaatctaatagctagactgctcatgagtctgcatttgtacaccgaactgttccacttcaaacgattttctatttaggtaattctgttatttctatgtgtatgtatctatatatattattgttactataagtttaaagcaatactcttattttaacaccataaacacaacgattaaattaacactcgcgcgaggcgcgagtaagttactagttatatatatacgccaagggatttgtttaagctgcagctaactcatttgtgttgcactgttacgccctttccacttgataactccatgactgtcttagcgagcgggcaaaaagaaatgaatttgatcaatcatattgaatcatggaatggatcacctaacacctgctgcaccatgttcgcatgggtccagtcatactcgagagaaatggtgaaatgaaatcattggacggctaagaacagcgcgccgatcggtgtgcaagaaaggctttctcaatgatgaaaactgcgtctgtaaacccctctatcaatcgcatcagcgcaccagctcacggaaagaagctcaagaacatggtgcctccttttttttctctaaaacttctgaaagttcctttaatccatgttttagctcttatcgcgtggtagaactagcgttgcagacgacaaataccacctttcatccatgacataaggcaaaggttagtccgcgcatagtttaatttgcaggggacgataacacttgtattagatgatgcaagttgcttgtcttacattttgaggtaggggaagaacacttttggtgagacaggaactggtctagagttatccctccgaaaaatcttgcagttcaaaatctgatctcttagtttttgccggtttcttcttcacatctgttccttttcttagtgatgtgtttagcttcctctgtactgctttgtatggaatccggttgaatattgggtcaggcttgtgcagtgcatcagaaaaaactctttttattttctggatttggcatagcatctcccagtgcctagtgccgggaaaccatgactgatgtctccagaatccagcatatgttctctcaactccactttattagggccagttcggtaactccattttcccaaactagtctttagtgtagactacgttactttgtggttttggttggtctagccataaggacatgtacaatggtaattaatgtagaggctcttaaggtgtttaaaaagttatttgcaaaaaaatcgtagagtcatctctctgtgaagagacgcagctcgtaaaccaagtacaaacagacgactcatttatcactgtacgaattcgtcgtctgttatatcgatccgatgacgtacaaccacatttacttctgcatttactaatagactatatttataaacattttattgtataatagagtcttttagttgtcccttgtgtttggaaagctgttttaatgtctccaccgaacataccctaaagtctctacctaatactgctttagagctttttctctacgacaagggagcttaatttctgtgcgcaattgtctctccgaggatcggtgacgtgctgacggcaaactccttggacaactacacggccgaagcaagcaaggacggccctcgtcaagaactcaagacgcgcgtttcaagccctgcctgttggtgtggggggcatgacctcgggagacagcgcgcggccatgcagccggatccggaatggccggtcgcgccgtgcgccggtgcccatccccacgcccgccgcatgctgcctccatctgccctcgatcgggaactgaggccgtgaggcgtacgaaatgcttaatcaaacacagtgatgcgcgggcgctcatccataggcgtacagcgtactgatgcagcatccatggacgtcctgaccacgccatcaatcaagcaaaaatgaaaccagcaacggtagtcaggtgtagtgctgctgcggccacagtgctcggcgctcgctcgtgctgcctgctggtgctctgtgctcgagtgctcgacggccgctgcccgctgcgctgggagcttgcgacgagccaacgggtcaccggtcgacggccacccgcgcgccaccgcgccagactgggcgcgccctcctcgccgtgggtcctccactccgggatccggcggcggcggcggcctccctgcggccctgcctgcgccgtgcagtgccgcccctcgccggcggtcggctcaactccctgtccaccacagtgccgagccggcatccacctcctgcttccaccgccagtttgccacagtgccgcgccggcctcccgtccctggtcgaaggccgccaccgccacctactgaattgtgataatctggaggctattcttcagaagcctggtgtagaaatgttacaggaatagcaaaaaaactgacatttttagattaagaaacactagaacattttgtcagacttgatttctcacacagaaatagtaattttatttgatgtttaatctattcttgcatgtttgggagttgggacattccaaacagagccctcgatggagtgagggcctgtttggttcacgactaactatgccacactttgcataaggttagtcgtctgaattgaagaactaatcttaggcagaaaagttaggcaaagtgtggcaagttaggtagtaaaccaaacaggccctgagtcttcagttactgtttgggacattccaaaatgctcaggcc

SEQ ID NO: 81440 - DNA, 3580 bp, Zea Mays
cgtcgtctgaaattcaggtggccgtcggatttttcgtggacgctccctagcggctcggtgtctccatgtgccgtgaaggttcgagaaccatcgtatgttcacgaatcgatttcctgtcacacacaggctctctacgatacgggaagtcgggaaccttccggatggactccttcctcagccatcgtagcttgcctcgcggcactggcggcggctccgcccggccagcacaaccgcagtcccagtcttctagacgaagcgaacgtgcgacgggaaaaacacggcccccgttggtcgaatccacgccggcgacgtcccctgccaccgcccaactgagtggtacaggtacaccgtacaccaatccatccgatctttgggcctaataccttggaacaagcaaaggggtcggacccctaaggcggcagtgctccactccatcaagcgatgcacgacgtcaatggaagactccgccggccaggaggtctgcgccgttcttggcattggggacaacatcaagggcctcttggccacgctgtcgcgcgttgacaccatcatctcctatgattcgtcccctcgctcaacctgcatcctatcataccctatcccgtgccaagtccctgattcacggtggctgtgtggtagtcggtaacgctgcatatgaacctgggcgacatcaagtgcgaggtgttctgcaaccaggtgccccgcacggcagagaacttcttggccctctacgctagcggctactacgacagcactgtgttccaccgcaacatcaaggcttcatggtataaggcggcgaccccatcggttccggcaatgcagggcctccatctgggcaccaagttcgccgacgagttcagggagtcccaaggtagcacactatgcagtgcagggcctaacagcggacccaacgtcaacggcagccggttcttcatcacctacgccaagcagccgttctgaaaaaaaaattgaacagagtcacccaagaatgtgcatgtctggaatgacagcttcagattaacgacaaccacaattttccaattgtgtggttttgatggagtcatgtatgggtaaccaggagaccatctgaataaatccgagaactacgactcattatattaagaagataggaaaaaaaggcttgagaattacgcctcatgattcatcgcatttttcttgatcgttgttgcttcaaggataacagtcatactcgagagaaatggtgaaatgaaatcattggacggctaagaacagcgcgccgatcggtgtgcaagaaaggctttctcaatgatgaaaactgcgtctgtaaacccctctatcaatcgcatcagcgcaccagctcacggaaagaagctcaagaacatggtgcctccttttttttctctaaaacttctgaaagttcctttaatccatgttttagctcttatcgcgtggtagaactagcgttgcagacgacaaataccacctttcatccatgacataaggcaaaggttagtccgcgcatagtttaatttgcaggggacgataacacttgtattagatgatgcaagttgcttgtcttacattttgaggtaggggaagaacacttttggtgagacaggaactggtctagagttatccctccgaaaaatcttgcagttcaaaatctgatctcttagtttttgccggtttcttcttcacatctgttccttttcttagtgatgtgtttagcttcctctgtactgctttgtatggaatccggttgaatattgggtcaggcttgtgcagtgcatcagaaaaaactctttttattttctggatttggcatagcatctcccagtgcctagtgccgggaaaccatgactgatgtctccagaatccagcatatgttctctcaactccactttattagggccagttcggtaactccattttcccaaactagtctttagtgtagactacgttactttgtggttttggttggtctagccataaggacatgtacaatggtaattaatgtagaggctcttaaggtgtttaaaaagttatttgcaaaaaaatcgtagagtcatctctctgtgaagagacgcagctcgtaaaccaagtacaaacagacgactcatttatcactgtacgaattcgtcgtctgttatatcgatccgatgacgtacaaccacatttacttctgcatttactaatagactatatttataaacattttattgtataatagagtcttttagttgtcccttgtgtttggaaagctgttttaatgtctccaccgaacataccctaaagtctctacctaatactgctttagagctttttctctacgacaagggagcttaatttctgtgcgcaattgtctctccgaggatcggtgacgtgctgacggcaaactccttggacaactacacggccgaagcaagcaaggacggccctcgtcaagaactcaagacgcgcgtttcaagccctgcctgttggtgtggggggcatgacctcgggagacagcgcgcggccatgcagccggatccggaatggccggtcgcgccgtgcgccggtgcccatccccacgcccgccgcatgctgcctccatctgccctcgatcgggaactgaggccgtgaggcgtacgaaatgcttaatcaaacacagtgatgcgcgggcgctcatccataggcgtacagcgtactgatgcagcatccatggacgtcctgaccacgccatcaatcaagcaaaaatgaaaccagcaacggtagcaaagtggcaatggtttcacttccagtccaatcaattccttcgtttgacgttctatccctgactcaggtagtcaggtgtagtgctgctgcggccacagtgctcggcgctcgctcgtgctgcctgctggtgctctgtgctcgagtgctcgacggccgctgcccgctgcgctgggagcttgcgacgagccaacgggtcaccggtcgacggccacccgcgcgccaccgcgccagactgggcgcgccctcctcgccgtgggtcctccactccgggatccggcggcggcggcggcctccctgcggccctgcctgcgccgtgcagtgccgcccctcgccggcggtcggctcaactccctgtccaccacagtgccgagccggcatccacctcctgcttccaccgccagtttgccacagtgccgcgccggcctcccgtccctggtcgaaggccgccaccgccacctactgaattgtgataatctggaggctattcttcagaagcctggtgtagaaatgttacaggaatagcaaaaaaactgacatttttagattaagaaacactagaacattttgtcagacttgatttctcacacagaaatagtaattttatttgatgtttaatctattcttgcatgtttgggagttgggacattccaaacagagccctcgatggagtgagggcctgtttggttcacgactaactatgccacactttgcataaggttagtcgtctgaattgaagaactaatcttaggcagaaaagttaggcaaagtgtggcaagttaggtagtaaaccaaacaggccctgagtcttcagttactgtttgggacattccaaaatgctcaggcc

SEQ ID NO: 81441 - DNA, 4476 bp, Zea Mays
cgtcgtctgaaattcaggtggccgtcggatttttcgtggacgctccctagcggctcggtgtctccatgtgccgtgaaggttcgagaaccatcgtatgttcacgaatcgatttcctgtcacacacaggctctctacgatacgggaagtcgggaaccttccggatggactccttcctcagccatcgtagcttgcctcgcggcactggcggcggctccgcccggccagcacaaccgcagtcccagtcttctagacgaagcgaacgtgcgacgggaaaaacacggcccccgttggtcgaatccacgccggcgacgtcccctgccaccgcccaactgagtggtacaggtacaccgtacaccaatccatccgatctttgggcctaataccttggaacaagcaaaggggtcggacccctaaggcggcagtgctccactccatcaagcgatgcacgacgtcaatggaagactccgccggccaggaggtctgcgccgttcttggcattggggacaacatcaagggcctcttggccacgctgtcgcgcgttgacaccatcatctcctatgattcgtcccctcgctcaacctgcatcctatcataccctatcccgtgccaagtccctgattcacggtggctgtgtggtagtcggtaacgctgcatatgaacctgggcgacatcaagtgcgaggtgttctgcaaccaggtgccccgcacggcagagaacttcttggccctctacgctagcggctactacgacagcactgtgttccaccgcaacatcaaggcttcatggtataaggcggcgaccccatcggttccggcaatgcagggcctccatctgggcaccaagttcgccgacgagttcagggagtcccaaggtagcacactatgcagtgcagggcctaacagcggacccaacgtcaacggcagccggttcttcatcacctacgccaagcagccgttctgaaaaaaaaattgaacagagtcacccaagaatgtgcatgtctggaatgacagcttcagattaacgacaaccacaattttccaattgtgtggttttgatggagtcatgtatgggtaaccaggagaccatctgaataaatccgtatgcacttcaatcatgtgctaatgttgattgtacaatacatacatattaatatagtgattcatgatgtctcaacatttttagatggtaatcggtgcctgcaagtgtgagaataaacttagcttataatactattactatcgtactatggtatcatgatttatgtttattctgtctagaatatctgacatagatataagttttttctctcgaaaacgcaggagaactacgactcattatattaagaagataggaaaaaaaggcttgagaattacgcctcatgattcatcgcatttttcttgatcgttgttgcttcaaggataacaggtatatttactgcaactactcagcatgttaggtaatatcaattttttaagttgttgcatcatcatatctcattttaagttgttgtctcaccacatgtactactttataacatgaatactaagttgagtgcataattattttgtgaccactaaaaccaatattttgtatgttcagtacatgtatatatatatccatttaggaatctaatagctagactgctcatgagtctgcatttgtacaccgaactgttccacttcaaacgattttctatttaggtaattctgttatttctatgtgtatgtatctatatatattattgttactataagtttaaagcaatactcttattttaacaccataaacacaacgattaaattaacactcgcgcgaggcgcgagtaagttactagttatatatatacgccaagggatttgtttaagctgcagctaactcatttgtgttgcactgttacgccctttccacttgataactccatgactgtcttagcgagcgggcaaaaagaaatgaatttgatcaatcatattgaatcatggaatggatcacctaacacctgctgcaccatgttcgcatgggtccagtcatactcgagagaaatggtgaaatgaaatcattggacggctaagaacagcgcgccgatcggtggtgtgtatacatgagaacaagataaggtttccaaattacgttcgtcaatgataataacaagttgaagttctttcagtgcaagaaaggctttctcaatgatgaaaactgcgtctgtaaacccctctatcaatcgcatcagcgcaccagctcacggaaagaagctcaagaacatggtgcctccttttttttctctaaaacttctgaaagttcctttaatccatgttttagctcttatcgcgtggtagaactagcgttgcagacgacaaataccacctttcatccatgacataaggcaaaggttagtccgcgcatagtttaatttgcaggggacgataacacttgtattagatgatgcaagttgcttgtcttacattttgaggtaggggaagaacacttttggtgagacaggaactggtctagagttatccctccgaaaaatcttgcagttcaaaatctgatctcttagtttttgccggtttcttcttcacatctgttccttttcttagtgatgtgtttagcttcctctgtactgctttgtatggaatccggttgaatattgggtcaggcttgtgcagtgcatcagaaaaaactctttttattttctggatttggcatagcatctcccagtgcctagtgccgggaaaccatgactgatgtctccagaatccagcatatgttctctcaactccactttattagggccagttcggtaactccattttcccaaactagtctttagtgtagactacgttactttgtggttttggttggtctagccataaggacatgtacaatggtaattaatgtagaggctcttaaggtgtttaaaaagttatttgcaaaaaaatcgtagagtcatctctctgtgaagagacgcagctcgtaaaccaagtacaaacagacgactcatttatcactgtacgaattcgtcgtctgttatatcgatccgatgacgtacaaccacatttacttctgcatttactaatagactatatttataaacattttattgtataatagagtcttttagttgtcccttgtgtttggaaagctgttttaatgtctccaccgaacataccctaaagtctctacctaatactgctttagagctttttctctacgacaagggagcttaatttctgtgcgcaattgtctctccgaggatcggtgacgtgctgacggcaaactccttggacaactacacggccgaagcaagcaaggacggccctcgtcaagaactcaagacgcgcgtttcaagccctgcctgttggtgtggggggcatgacctcgggagacagcgcgcggccatgcagccggatccggaatggccggtcgcgccgtgcgccggtgcccatccccacgcccgccgcatgctgcctccatctgccctcgatcgggaactgaggccgtgaggcgtacgaaatgcttaatcaaacacagtgatgcgcgggcgctcatccataggcgtacagcgtactgatgcagcatccatggacgtcctgaccacgccatcaatcaagcaaaaatgaaaccagcaacggtagcaaagtggcaatggtttcacttccagtccaatcaattccttcgtttgacgttctatccctgactcaggtagtcaggtgtagtgctgctgcggccacagtgctcggcgctcgctcgtgctgcctgctggtgctctgtgctcgagtgctcgacggccgctgcccgctgcgctgggagcttgcgacgagccaacgggtcaccggtcgacggccacccgcgcgccaccgcgccagactgggcgcgccctcctcgccgtgggtcctccactccgggatccggcggcggcggcggcctccctgcggccctgcctgcgccgtgcagtgccgcccctcgccggcggtcggctcaactccctgtccaccacagtgccgagccggcatccacctcctgcttccaccgccagtttgccacagtgccgcgccggcctcccgtccctggtcgaaggccgccaccgccacctactgaattgtgataatctggaggctattcttcagaagcctggtgtagaaatgttacaggaatagcaaaaaaactgacatttttagattaagaaacactagaacattttgtcagacttgatttctcacacagaaatagtaattttatttgatgtttaatctattcttgcatgtttgggagttgggacattccaaacagagccctcgatggagtgagggcctgtttggttcacgactaactatgccacactttgcataaggttagtcgtctgaattgaagaactaatcttaggcagaaaagttaggcaaagtgtggcaagttaggtagtaaaccaaacaggccctgagtcttcagttactgtttgggacattccaaaatgctcaggcc

SEQ ID NO: 81442 - DNA, 4814 bp, Zea Mays
cgtcgtctgaaattcaggtggccgtcggatttttcgtggacgctccctagcggctcggtgtctccatgtgccgtgaaggttcgagaaccatcgtatgttcacgaatcgatttcctgtcacacacaggctctctacgatacgggaagtcgggaaccttccggatggactccttcctcagccatcgtagcttgcctcgcggcactggcggcggctccgcccggccagcacaaccgcagtcccagtcttctagacgaagcgaacgtgcgacgggaaaaacacggcccccgttggtcgaatccacgccggcgacgtcccctgccaccgcccaactgagtggtacaggtacaccgtacaccaatccatccgatctttgggcctaataccttggaacaagcaaaggggtcggacccctaaggcggcagtgctccactccatcaagcgatgcacgacgtcaatggaagactccgccggccaggaggtctgcgccgttcttggcattggggacaacatcaagggcctcttggccacgctgtcgcgcgttgacaccatcatctcctatgattcgtcccctcgctcaacctgcatcctatcataccctatcccgtgccaagtccctgattcacggtggctgtgtggtagtcggtaacgctgcatatgaacctgggcgacatcaagtgcgaggtgttctgcaaccaggtgccccgcacggcagagaacttcttggccctctacgctagcggctactacgacagcactgtgttccaccgcaacatcaaggcttcatggtataaggcggcgaccccatcggttccggcaatgcagggcctccatctgggcaccaagttcgccgacgagttcagggagtcccaaggtagcacactatgcagtgcagggcctaacagcggacccaacgtcaacggcagccggttcttcatcacctacgccaagcagccgttctgaaaaaaaaattgaacagagtcacccaagaatgtgcatgtctggaatgacagcttcagattaacgacaaccacaattttccaattgtgtggttttgatggagtcatgtatgggtaaccaggagaccatctgaataaatccgtatgcacttcaatcatgtgctaatgttgattgtacaatacatacatattaatatagtgattcatgatgtctcaacatttttagatggtaatcggtgcctgcaagtgtgagaataaacttagcttataatactattactatcgtactatggtatcatgatttatgtttattctgtctagaatatctgacatagatataagttttttctctcgaaaacgcaggagaactacgactcattatattaagaagataggaaaaaaaggcttgagaattacgcctcatgattcatcgcatttttcttgatcgttgttgcttcaaggataacaggtatatttactgcaactactcagcatgttaggtaatatcaattttttaagttgttgcatcatcatatctcattttaagttgttgtctcaccacatgtactactttataacatgaatactaagttgagtgcataattattttgtgaccactaaaaccaatattttgtatgttcagtacatgtatatatatatccatttaggaatctaatagctagactgctcatgagtctgcatttgtacaccgaactgttccacttcaaacgattttctatttaggtaattctgttatttctatgtgtatgtatctatatatattattgttactataagtttaaagcaatactcttattttaacaccataaacacaacgattaaattaacactcgcgcgaggcgcgagtaagttactagttatatatatacgccaagggatttgtttaagctgcagctaactcatttgtgttgcactgttacgccctttccacttgataactccatgactgtcttagcgagcgggcaaaaagaaatgaatttgatcaatcatattgaatcatggaatggatcacctaacacctgctgcaccatgttcgcatgggtccagtcatactcgagagaaatggtgaaatgaaatcattggacggctaagaacagcgcgccgatcggtgtgcaagaaaggctttctcaatgatgaaaactgcgtctgtaaacccctctatcaatcgcatcagcgcaccagctcacggaaagaagctcaagaacatggtgcctccttttttttctctaaaacttctgaaagttcctttaatccatgttttagctcttatcgcgtggtagaactagcgttgcagacgacaaataccacctttcatccatgacataaggcaaaggttagtccgcgcatagtttaatttgcaggggacgataacacttgtattagatgatgcaagttgcttgtcttacattttgaggtaggggaagaacacttttggtgagacaggaactggtctagagttatccctccgaaaaatcttgcagttcaaaatctgatctcttagtttttgccggtttcttcttcacatctgttccttttcttagtgatgtgtttagcttcctctgtactgctttgtatggaatccggttgaatattgggtcaggcttgtgcagtgcatcagaaaaaactctttttattttctggatttggcatagcatctcccagtgcctagtgccgggaaaccatgactgatgtctccagaatccagcatatgttctctcaactccactttattagggccagttcggtaactccattttcccaaactagtctttagtgtagactacgttactttgtggttttggttggtctagccataaggacatgtacaatggtaattaatgtagaggctcttaaggtgtttaaaaagttatttgcaaaaaaatcgtagagtcatctctctgtgaagagacgcagctcgtaaaccaagtacaaacagacgactcatttatcactgtacgaattcgtcgtctgttatatcgatccgatgacgtacaaccacatttacttctgcatttactaatagactatatttataaacattttattgtataatagagtcttttagttgtcccttgtgtttggaaagctgttttaatgtctccaccgaacataccctaaagtctctacctaatactgctttagagctttttctctacgacaagggagcttaatttctgtgcgcaattgtctctccgaggatcggtgacgtgctgacggcaaactccttggacaactacacggccgaagcaagcaaggacggccctcgtcaagaactcaagacgcgcgtttcaagccctgcctgttggtgtggggggcatgacctcgggagacagcgcgcggccatgcagccggatccggaatggccggtcgcgccgtgcgccggtgcccatccccacgcccgccgcatgctgcctccatctgccctcgatcgggaactgaggccgtgaggcgtacgaaatgcttaatcaaacacagtgatgcgcgggcgctcatccataggcgtacagcgtactgatgcagcatccatggacgtcctgaccacgccatcaatcaagcaaaaatgaaaccagcaacggtagtcaggtgtagtgctgctgcggccacagtgctcggcgctcgctcgtgctgcctgctggtgctctgtgctcgagtgctcgacggccgctgcccgctgcgctgggagcttgcgacgagccaacgggtcaccggtcgacggccacccgcgcgccaccgcgccagactgggcgcgccctcctcgccgtgggtcctccactccgggatccggcggcggcggcggcctccctgcggccctgcctgcgccgtgcagtgccgcccctcgccggcggtcggctcaactccctgtccaccacagtgccgagccggcatccacctcctgcttccaccgccagtttgccacagtgccgcgccggcctcccgtccctggtcgaaggccgccaccgccacctactgaattgtgataatgaacgtgacggcggcgaggcagcggaggctgcccccgctcgggccacggcggccactcccgccgccgcgcctcctcgccgctgtcatcgccttcgccttcgcgctcctcttcctgctcctcgtgcttctctccagctcctcccctcactcgccgccgccatcccaccacgccgtcgtcgcaagatcatcctcgtcctcggcaccgccgtggcctcgctgcagcagcgcggcggcgagcctcggggagctcggcgacgcgatggtgtccatgctgcccaaggacctcccgttcaccgtcttcgtgccctcagtggactctttcacccgcgtccttaggctgcaggggtccaagtccaacgccagcactggagatcaggaagcggccaccgacaccgacaccaacacctacgccatcctatcccgcgtgctcggcttctccgcggtccctcgccgcctgctcgccgcggacgtgccggtgccgccgcgcggggccggggcggtgcgcctcctggactccgtgtccgggctgaggctgtacgcctccagggacgcgcgcggggcgctcgtcgtgaacggcgtgcggtcggagtgcgtcgatattatcaggggcgagaccgtggtgcatgtcctggcgggtgtcctcatggacgccgaatttgagcgttcgttcggtggaatttgacggccgatcatcaagtcatcaaccctttgagtttgacgtggctcatttctttattctggagaggatttgcaagacaatgcatttggaaaattttaaattgcggcgaaaacaagttgcgacttgcctcggatgaggttagatggatcttgaataaaaggttatcacttatcagc

SEQ ID NO: 81443 - DNA, 4378 bp, Zea Mays
cgtcgtctgaaattcaggtggccgtcggatttttcgtggacgctccctagcggctcggtgtctccatgtgccgtgaaggttcgagaaccatcgtatgttcacgaatcgatttcctgtcacacacaggctctctacgatacgggaagtcgggaaccttccggatggactccttcctcagccatcgtagcttgcctcgcggcactggcggcggctccgcccggccagcacaaccgcagtcccagtcttctagacgaagcgaacgtgcgacgggaaaaacacggcccccgttggtcgaatccacgccggcgacgtcccctgccaccgcccaactgagtggtacaggtacaccgtacaccaatccatccgatctttgggcctaataccttggaacaagcaaaggggtcggacccctaaggcggcagtgctccactccatcaagcgatgcacgacgtcaatggaagactccgccggccaggaggtctgcgccgttcttggcattggggacaacatcaagggcctcttggccacgctgtcgcgcgttgacaccatcatctcctatgattcgtcccctcgctcaacctgcatcctatcataccctatcccgtgccaagtccctgattcacggtggctgtgtggtagtcggtaacgctgcatatgaacctgggcgacatcaagtgcgaggtgttctgcaaccaggtgccccgcacggcagagaacttcttggccctctacgctagcggctactacgacagcactgtgttccaccgcaacatcaaggcttcatggtataaggcggcgaccccatcggttccggcaatgcagggcctccatctgggcaccaagttcgccgacgagttcagggagtcccaaggtagcacactatgcagtgcagggcctaacagcggacccaacgtcaacggcagccggttcttcatcacctacgccaagcagccgttctgaaaaaaaaattgaacagagtcacccaagaatgtgcatgtctggaatgacagcttcagattaacgacaaccacaattttccaattgtgtggttttgatggagtcatgtatgggtaaccaggagaccatctgaataaatccgtatgcacttcaatcatgtgctaatgttgattgtacaatacatacatattaatatagtgattcatgatgtctcaacatttttagatggtaatcggtgcctgcaagtgtgagaataaacttagcttataatactattactatcgtactatggtatcatgatttatgtttattctgtctagaatatctgacatagatataagttttttctctcgaaaacgcaggagaactacgactcattatattaagaagataggaaaaaaaggcttgagaattacgcctcatgattcatcgcatttttcttgatcgttgttgcttcaaggataacagcgagcgggcaaaaagaaatgaatttgatcaatcatattgaatcatggaatggatcacctaacacctgctgcaccatgttcgcatgggtccagtcatactcgagagaaatggtgaaatgaaatcattggacggctaagaacagcgcgccgatcggtgtgcaagaaaggctttctcaatgatgaaaactgcgtctgtaaacccctctatcaatcgcatcagcgcaccagctcacggaaagaagctcaagaacatggtgcctccttttttttctctaaaacttctgaaagttcctttaatccatgttttagctcttatcgcgtggtagaactagcgttgcagacgacaaataccacctttcatccatgacataaggcaaaggttagtccgcgcatagtttaatttgcaggggacgataacacttgtattagatgatgcaagttgcttgtcttacattttgaggtaggggaagaacacttttggtgagacaggaactggtctagagttatccctccgaaaaatcttgcagttcaaaatctgatctcttagtttttgccggtttcttcttcacatctgttccttttcttagtgatgtgtttagcttcctctgtactgctttgtatggaatccggttgaatattgggtcaggcttgtgcagtgcatcagaaaaaactctttttattttctggatttggcatagcatctcccagtgcctagtgccgggaaaccatgactgatgtctccagaatccagcatatgttctctcaactccactttattagggccagttcggtaactccattttcccaaactagtctttagtgtagactacgttactttgtggttttggttggtctagccataaggacatgtacaatggtaattaatgtagaggctcttaaggtgtttaaaaagttatttgcaaaaaaatcgtagagtcatctctctgtgaagagacgcagctcgtaaaccaagtacaaacagacgactcatttatcactgtacgaattcgtcgtctgttatatcgatccgatgacgtacaaccacatttacttctgcatttactaatagactatatttataaacattttattgtataatagagtcttttagttgtcccttgtgtttggaaagctgttttaatgtctccaccgaacataccctaaagtctctacctaatactgctttagagctttttctctacgacaagggagcttaatttctgtgcgcaattgtctctccgaggatcggtgacgtgctgacggcaaactccttggacaactacacggccgaagcaagcaaggacggccctcgtcaagaactcaagacgcgcgtttcaagccctgcctgttggtgtggggggcatgacctcgggagacagcgcgcggccatgcagccggatccggaatggccggtcgcgccgtgcgccggtgcccatccccacgcccgccgcatgctgcctccatctgccctcgatcgggaactgaggccgtgaggcgtacgaaatgcttaatcaaacacagtgatgcgcgggcgctcatccataggcgtacagcgtactgatgcagcatccatggacgtcctgaccacgccatcaatcaagcaaaaatgaaaccagcaacggtagcaaagtggcaatggtttcacttccagtccaatcaattccttcgtttgacgttctatccctgactcaggtagtcaggtgtagtgctgctgcggccacagtgctcggcgctcgctcgtgctgcctgctggtgctctgtgctcgagtgctcgacggccgctgcccgctgcgctgggagcttgcgacgagccaacgggtcaccggtcgacggccacccgcgcgccaccgcgccagactgggcgcgccctcctcgccgtgggtcctccactccgggatccggcggcggcggcggcctccctgcggccctgcctgcgccgtgcagtgccgcccctcgccggcggtcggctcaactccctgtccaccacagtgccgagccggcatccacctcctgcttccaccgccagtttgccacagtgccgcgccggcctcccgtccctggtcgaaggccgccaccgccacctactgaattgtgataatgaacgtgacggcggcgaggcagcggaggctgcccccgctcgggccacggcggccactcccgccgccgcgcctcctcgccgctgtcatcgccttcgccttcgcgctcctcttcctgctcctcgtgcttctctccagctcctcccctcactcgccgccgccatcccaccacgccgtcgtcgcaagatcatcctcgtcctcggcaccgccgtggcctcgctgcagcagcgcggcggcgagcctcggggagctcggcgacgcgatggtgtccatgctgcccaaggacctcccgttcaccgtcttcgtgccctcagtggactctttcacccgcgtccttaggctgcaggggtccaagtccaacgccagcactggagatcaggaagcggccaccgacaccgacaccaacacctacgccatcctatcccgcgtgctcggcttctccgcggtccctcgccgcctgctcgccgcggacgtgccggtgccgccgcgcggggccggggcggtgcgcctcctggactccgtgtccgggctgaggctgtacgcctccagggacgcgcgcggggcgctcgtcgtgaacggcgtgcggtcggagtgcgtcgatattatcaggggcgagaccgtggtgcatgtcctggcgggtgtcctcatggacgccgaatttgagcgttcgttcggtggaatttgacggccgatcatcaagtcatcaaccctttgagtttgacgtggctcatttctttattctggagaggatttgcaagacaatgcatttggaaaattttaaattgcggcgaaaacaagttgcgacttgcctcggatgaggttagatggatcttgaataaaaggttatcacttatcagc

SEQ ID NO: 81444 - DNA, 4130 bp, Zea Mays
cgtcgtctgaaattcaggtggccgtcggatttttcgtggacgctccctagcggctcggtgtctccatgtgccgtgaaggttcgagaaccatcgtatgttcacgaatcgatttcctgtcacacacaggctctctacgatacgggaagtcgggaaccttccggatggactccttcctcagccatcgtagcttgcctcgcggcactggcggcggctccgcccggccagcacaaccgcagtcccagtcttctagacgaagcgaacgtgcgacgggaaaaacacggcccccgttggtcgaatccacgccggcgacgtcccctgccaccgcccaactgagtggtacaggtacaccgtacaccaatccatccgatctttgggcctaataccttggaacaagcaaaggggtcggacccctaaggcggcagtgctccactccatcaagcgatgcacgacgtcaatggaagactccgccggccaggaggtctgcgccgttcttggcattggggacaacatcaagggcctcttggccacgctgtcgcgcgttgacaccatcatctcctatgattcgtcccctcgctcaacctgcatcctatcataccctatcccgtgccaagtccctgattcacggtggctgtgtggtagtcggtaacgctgcatatgaacctgggcgacatcaagtgcgaggtgttctgcaaccaggtgccccgcacggcagagaacttcttggccctctacgctagcggctactacgacagcactgtgttccaccgcaacatcaaggcttcatggtataaggcggcgaccccatcggttccggcaatgcagggcctccatctgggcaccaagttcgccgacgagttcagggagtcccaaggtagcacactatgcagtgcagggcctaacagcggacccaacgtcaacggcagccggttcttcatcacctacgccaagcagccgttctgaaaaaaaaattgaacagagtcacccaagaatgtgcatgtctggaatgacagcttcagattaacgacaaccacaattttccaattgtgtggttttgatggagtcatgagaactacgactcattatattaagaagataggaaaaaaaggcttgagaattacgcctcatgattcatcgcatttttcttgatcgttgttgcttcaaggataacaggtcgagcgggcaaaaagaaatgaatttgatcaatcatattgaatcatggaatggatcacctaacacctgctgcaccatgttcgcatgggtccagtcatactcgagagaaatggtgaaatgaaatcattggacggctaagaacagcgcgccgatcggtggtgtgtatacatgagaacaagataaggtttccaaattacgttcgtcaatgataataacaagttgaagttctttcagtgcaagaaaggctttctcaatgatgaaaactgcgtctgtaaacccctctatcaatcgcatcagcgcaccagctcacggaaagaagctcaagaacatggtgcctccttttttttctctaaaacttctgaaagttcctttaatccatgttttagctcttatcgcgtggtagaactagcgttgcagacgacaaataccacctttcatccatgacataaggcaaaggttagtccgcgcatagtttaatttgcaggggacgataacacttgtattagatgatgcaagttgcttgtcttacattttgaggtaggggaagaacacttttggtgagacaggaactggtctagagttatccctccgaaaaatcttgcagttcaaaatctgatctcttagtttttgccggtttcttcttcacatctgttccttttcttagtgatgtgtttagcttcctctgtactgctttgtatggaatccggttgaatattgggtcaggcttgtgcagtgcatcagaaaaaactctttttattttctggatttggcatagcatctcccagtgcctagtgccgggaaaccatgactgatgtctccagaatccagcatatgttctctcaactccactttattagggccagttcggtaactccattttcccaaactagtctttagtgtagactacgttactttgtggttttggttggtctagccataaggacatgtacaatggtaattaatgtagaggctcttaaggtgtttaaaaagttatttgcaaaaaaatcgtagagtcatctctctgtgaagagacgcagctcgtaaaccaagtacaaacagacgactcatttatcactgtacgaattcgtcgtctgttatatcgatccgatgacgtacaaccacatttacttctgcatttactaatagactatatttataaacattttattgtataatagagtcttttagttgtcccttgtgtttggaaagctgttttaatgtctccaccgaacataccctaaagtctctacctaatactgctttagagctttttctctacgacaagggagcttaatttctgtgcgcaattgtctctccgaggatcggtgacgtgctgacggcaaactccttggacaactacacggccgaagcaagcaaggacggccctcgtcaagaactcaagacgcgcgtttcaagccctgcctgttggtgtggggggcatgacctcgggagacagcgcgcggccatgcagccggatccggaatggccggtcgcgccgtgcgccggtgcccatccccacgcccgccgcatgctgcctccatctgccctcgatcgggaactgaggccgtgaggcgtacgaaatgcttaatcaaacacagtgatgcgcgggcgctcatccataggcgtacagcgtactgatgcagcatccatggacgtcctgaccacgccatcaatcaagcaaaaatgaaaccagcaacggtagtcaggtgtagtgctgctgcggccacagtgctcggcgctcgctcgtgctgcctgctggtgctctgtgctcgagtgctcgacggccgctgcccgctgcgctgggagcttgcgacgagccaacgggtcaccggtcgacggccacccgcgcgccaccgcgccagactgggcgcgccctcctcgccgtgggtcctccactccgggatccggcggcggcggcggcctccctgcggccctgcctgcgccgtgcagtgccgcccctcgccggcggtcggctcaactccctgtccaccacagtgccgagccggcatccacctcctgcttccaccgccagtttgccacagtgccgcgccggcctcccgtccctggtcgaaggccgccaccgccacctactgaattgtgataatgaacgtgacggcggcgaggcagcggaggctgcccccgctcgggccacggcggccactcccgccgccgcgcctcctcgccgctgtcatcgccttcgccttcgcgctcctcttcctgctcctcgtgcttctctccagctcctcccctcactcgccgccgccatcccaccacgccgtcgtcgcaagatcatcctcgtcctcggcaccgccgtggcctcgctgcagcagcgcggcggcgagcctcggggagctcggcgacgcgatggtgtccatgctgcccaaggacctcccgttcaccgtcttcgtgccctcagtggactctttcacccgcgtccttaggctgcaggggtccaagtccaacgccagcactggagatcaggaagcggccaccgacaccgacaccaacacctacgccatcctatcccgcgtgctcggcttctccgcggtccctcgccgcctgctcgccgcggacgtgccggtgccgccgcgcggggccggggcggtgcgcctcctggactccgtgtccgggctgaggctgtacgcctccagggacgcgcgcggggcgctcgtcgtgaacggcgtgcggtcggagtgcgtcgatattatcaggggcgagaccgtggtgcatgtcctggcgggtgtcctcatggacgccgaatttgagcgttcgttcggtggaatttgacggccgatcatcaagtcatcaaccctttgagtttgacgtggctcatttctttattctggagaggatttgcaagacaatgcatttggaaaattttaaattgcggcgaaaacaagttgcgacttgcctcggatgaggttagatggatcttgaataaaaggttatcacttatcagc

SEQ ID NO: 81445 - DNA, 3449 bp, Zea Mays
cgtcgtctgaaattcaggtggccgtcggatttttcgtggacgctccctagcggctcggtgtctccatgtgccgtgaaggttcgagaaccatcgtatgttcacgaatcgatttcctgtcacacacaggctctctacgatacgggaagtcgggaaccttccggatggactccttcctcagccatcgtagcttgcctcgcggcactggcggcggctccgcccggccagcacaaccgcagtcccagtcttctagacgaagcgaacgtgcgacgggaaaaacacggcccccgttggtcgaatccacgccggcgacgtcccctgccaccgcccaactgagtggtacaggtacaccgtacaccaatccatccgatctttgggcctaataccttggaacaagcaaaggggtcggacccctaaggcggcagtgctccactccatcaagcgatgcacgacgtcaatggaagactccgccggccaggaggtctgcgccgttcttggcattggggacaacatcaagggcctcttggccacgctgtcgcgcgttgacaccatcatctcctatgattcgtcccctcgctcaacctgcatcctatcataccctatcccgtgccaagtccctgattcacggtggctgtgtggtagtcggtaacgctgcatatgaacctgggcgacatcaagtgcgaggtgttctgcaaccaggtgccccgcacggcagagaacttcttggccctctacgctagcggctactacgacagcactgtgttccaccgcaacatcaaggcttcatggtataaggcggcgaccccatcggttccggcaatgcagggcctccatctgggcaccaagttcgccgacgagttcagggagtcccaaggtagcacactatgcagtgcagggcctaacagcggacccaacgtcaacggcagccggttcttcatcacctacgccaagcagccgttctgaaaaaaaaattgaacagagtcacccaagaatgtgcatgtctggaatgacagcttcagattaacgacaaccacaattttccaattgtgtggttttgatggagtcatgtatgggtaaccaggagaccatctgaataaatccgagaactacgactcattatattaagaagataggaaaaaaaggcttgagaattacgcctcatgattcatcgcatttttcttgatcgttgttgcttcaaggataacagcgagcgggcaaaaagaaatgaatttgatcaatcatattgaatcatggaatggatcacctaacacctgctgcaccatgttcgcatgggtccagtcatactcgagagaaatggtgaaatgaaatcattggacggctaagaacagcgcgccgatcggtgtgcaagaaaggctttctcaatgatgaaaactgcgtctgtaaacccctctatcaatcgcatcagcgcaccagctcacggaaagaagctcaagaacatggtgcctccttttttttctctaaaacttctgaaagttcctttaatccatgttttagctcttatcgcgtggtagaactagcgttgcagacgacaaataccacctttcatccatgacataaggcaaaggttagtccgcgcatagtttaatttgcaggggacgataacacttgtattagatgatgcaagttgcttgtcttacattttgaggtaggggaagaacacttttggtgagacaggaactggtctagagttatccctccgaaaaatcttgcagttcaaaatctgatctcttagtttttgccggtttcttcttcacatctgttccttttcttagtgatgtgtttagcttcctctgtactgctttgtatggaatccggttgaatattgggtcaggcttgtgcagtgcatcagaaaaaactctttttattttctggatttggcatagcatctcccagtgcctagtgccgggaaaccatgactgatgtctccagaatccagcatatgttctctcaactccactttattagggccagttcggtaactccattttcccaaactagtctttagtgtagactacgttactttgtggttttggttggtctagccataaggacatgtacaatggtaattaatgtagaggctcttaaggtgtttaaaaagttatttgcaaaaaaatcgtagagtcatctctctgtgaagagacgcagctcgtaaaccaagtacaaacagacgactcatttatcactgtacgaattcgtcgtctgttatatcgatccgatgacgtacaaccacatttacttctgcatttactaatagactatatttataaacattttattgtataatagagtcttttagttgtcccttgtgtttggaaagctgttttaatgtctccaccgaacataccctaaagtctctacctaatactgctttagagctttttctctacgacaagggagcttaatttctgtgcgcaattgtctctccgaggatcggtgacgtgctgacggcaaactccttggacaactacacggccgaagcaagcaaggacggccctcgtcaagaactcaagacgcgcgtttcaagccctgcctgttggtgtggggggcatgacctcgggagacagcgcgcggccatgcagccggatccggaatggccggtcgcgccgtgcgccggtgcccatccccacgcccgccgcatgctgcctccatctgccctcgatcgggaactgaggccgtgaggcgtacgaaatgcttaatcaaacacagtgatgcgcgggcgctcatccataggcgtacagcgtactgatgcagcatccatggacgtcctgaccacgccatcaatcaagcaaaaatgaaaccagcaacggtagcaaagtggcaatggtttcacttccagtccaatcaattccttcgtttgacgttctatccctgactcaggtagtcaggtgtagtgctgctgcggccacagtgctcggcgctcgctcgtgctgcctgctggtgctctgtgctcgagtgctcgacggccgctgcccgctgcgctgggagcttgcgacgagccaacgggtcaccggtcgacggccacccgcgcgccaccgcgccagactgggcgcgccctcctcgccgtgggtcctccactccgggatccggcggcggcggcggcctccctgcggccctgcctgcgccgtgcagtgccgcccctcgccggcggtcggctcaactccctgtccaccacagtgccgagccggcatccacctcctgcttccaccgccagtttgccacagtgccgcgccggcctcccgtccctggtcgaaggccgccaccgccacctactgaattgtgataatgcaaagtgcttacacttgacgaaacaattcatctcaacatggaaatagagcaatgacctgtacatatcatatccagtagggtaatcctactacagagcacacacacatctactattgctattggtgtaaatttgacactatccttgc

SEQ ID NO: 81446 - DNA, 1351 bp, Zea Mays
cgtcgtctgaaattcaggtggccgtcggatttttcgtggacgctccctagcggctcggtgtctccatgtgccgtgaaggttcgagaaccatcgtatgttcacgaatcgatttcctgtcacacacaggctctctacgatacgggaagtcgggaaccttccggatggactccttcctcagccatcgtagcttgcctcgcggcactggcggcggctccgcccggccagcacaaccgcagtcccagtcttctagacgaagcgaacgtgcgacgggaaaaacacggcccccgttggtcgaatccacgccggcgacgtcccctgccaccgcccaactgagtggtacaggtacaccgtacaccaatccatccgatctttgggcctaataccttggaacaagcaaaggggtcggacccctaaggcggcagtgctccactccatcaagcgatgcacgacgtcaatggaagactccgccggccaggaggtctgcgccgttcttggcattggggacaacatcaagggcctcttggccacgctgtcgcgcgttgacaccatcatctcctatgattcgtcccctcgctcaacctgcatcctatcataccctatcccgtgccaagtccctgattcacggtggctgtgtggtagtcggtaacgctgcatatgaacctgggcgacatcaagtgcgaggtgttctgcaaccaggtgccccgcacggcagagaacttcttggccctctacgctagcggctactacgacagcactgtgttccaccgcaacatcaaggcttcatggtataaggcggcgaccccatcggttccggcaatgcagggcctccatctgggcaccaagttcgccgacgagttcagggagtcccaaggtagcacactatgcagtgcagggcctaacagcggacccaacgtcaacggcagccggttcttcatcacctacgccaagcagccgttctgaaaaaaaaattgaacagagtcacccaagaatgtgcatgtctggaatgacagcttcagattaacgacaaccacaattttccaattgtgtggttttgatggagtcatgtatgggtaaccaggagaccatctgaataaatccgagaactacgactcattatattaagaagataggaaaaaaaggcttgagaattacgcctcatgattcatcgcatttttcttgatcgttgttgcttcaaggataacaggcaaagtgcttacacttgacgaaacaattcatctcaacatggaaatagagcaatgacctgtacatatcatatccagtagggtaatcctactacagagcacacacacatctactattgctattggtgtaaatttgacactatccttgc

SEQ ID NO: 81447 - DNA, 4080 bp, Zea Mays
ggcgtcgtcgcgtcctcacacccccgcaaggccacaaacacccgcgctcgtcgctgtctcctcctcgccttttgccccgcatcgcgtctcgctgaaaccctctcggtcaccgccgctgtcgatcagacccggctgtagctcagggaccccgtcgctgcagtatcctccgagggtcgttggcgggggagtcgtcgtcgtcgtatttggctgccggaattcgatgcgccacggagcgggcgagaggacctagttgagttgaatacggcagcgacgggaggacgtgatgccgggggtggcgtccgcagcgggatcggggatctggtcgcgccggcgggacgagatcacgttcgatcgccttcagaagttctggaatgacttgcttcctcaagcacggcaggaactcctcaaattagataagcaaactctcattgaacaagcacgcaagaatttctactgctcaaggtgcaatgggttgcttctggaaagttttgcacaaattgttatctatgggaagtcactgcagcaagaagcttcagatattggtcatctgaggacagctattgaattaagaattacacatggagagcaagatggcgctcaggacccatcaatccatccctggggaggcctttcaaccacaaaagatggcttccttacgcttcttgactgctttataaaagcaaaatcattacgggtgcttcagaatgtctttgacaatgcacgggcaagagaaagggaacgggaaatgctttatcctgatgcctgtggtgcaggtggcagaggatggatcagccaagggatggctaactataggggtcatggaataagagaaatgtgtgctctacacactgcccacctttcatgtactacactggtggatttctggtcagcgcttggtgaaggaactagatcatctcttctgcggatgaaggaggaagatttcattgaaaaacttatgtacagtttggtggaaatttctgaacaggtttgatagtaagagattttgccgagagtgtcgaaggaatgttatccgtgaattcaaggatctgaaggaactgaagcgcatgcaaagggaacctcgctgcaccagttggttttgtgttgcagatactgcttttaagtgtgaggtgtttgaggatgctgtcgtaattgattggcaccagtgcttatcagagccagatgaatcttatgaccactttgaatgggctattgggacagatgaaggagaatccgatatttttggctttgaaaatgttggaatgaatgcacaagtccacagaaatggaatcgatcttgatcagtttgaggactacttcataacgttgcgagcttggaggcttgatggccagtgcacagagctgtgtgtaaaagcacatgcattgaagggtcaatcatgtgctcaccacaggctagtggtgggtgatggctttgtgactatgacaaagggtgaaagtattagaaatttctttgagcatgctgaagaggccgaggaagaggatgaagacgatgccatggacagggatggaaatgattttgatggtgatgatgcccattcacagaagcatgccaagagccctgaactggcaagagaatttcttttggatgctgctgctgtgatattcaaagaacagattgagaaggccttcagggaaggtacagcacagcaaaatgcacgtagtgtttttgtgacccttgctttaaaacttttggaacagcgagttcatgtagcatgcaaagaaataattacgttggaaaaacagaacaaacttcttgaagaagaggagaaagaaaagcgtgaagaacatgagcgcgggatgaagaggagaacaagagagagagaaaagaagaacagaagaaaagaaaggctgaaagaaaaggatcatagtaaaggaaaaagactagttgaatcaaagtcaccagacaatatttcatcttcagctccaagcaactccacagcatctatcaatgattattcgacaaatactctggactcaagagattcaggtacggaagaggaatatagtgctgaaggtgtgaatctgtgcactcctgacagctgtgtgaatcaatcttcatgtaaaaaaattaatggagaaaacagtgtccactgcaatgcagtgacagaattttctccaatggacaacagtgacatttctacatcagatcaacccaagtctttgagacgaagtccaagatcaagagattattttcctcaagatcagtcatgttggtatgatgactgcggagatgagtctggaagaattggtgaattacgatggaagtcaagggaaaagacaagaggtactgatagaagttgcaacacagcatccacctcaaataacaagacaagagagaggcactcatacaatttttgcagctgtggccatccagaagactatggagttatggacagctgtttcttgccaacagttagatctgtcagagagatgaagatagcaagaaaatcaggagttgagaaacctaaggtgcagtacaacagatgctatacattggatagctttatagtgccaaaaggaaaccatgctggttgtacacagaaaaatgctatcccaaagcaagtatgggagcctatggatgctcgaaggaagactaacttacacaacacagttcatgattcaggttcaattaacgatgttgatccactgaaacatgtggtttttgataacagcggatctcataagttcagtgtaagatgtgaatcacagcctcaggcttctgaaagttccagggatgtttgtaattcagatcaaagatgtgcaaatggtgggagaaatcaaactacttcctgtgctagtactcttatggtaaataaacaaaattgttactcagaaaatgatgaaggctccaggcatgatgtagagctgatgacgaactctgctagttctgatagcacctcgtcatgcatgagccagggagatagggaaagcagctccagcagtacaacctcttcgagcgctcaaaatccggaatcatcttctgaatctgaggaatcaccggagagaataaacagcacagtaggtacaccatcatcaagagctgcttcacggtctttgcttgaagcatgtgcaggaaatggtttcagagaataccaacccaagacaacccgcccagctcacaatgacatgtttgggtacaatgtatcccctgtccaagaccagctgctgcattaccaaatcacgcatccacctcaacaaccgccaataacaatgggatttcatgaccgttcttgggctgcaccaacgaatggaaactttcagtatgctcgaccatcccacttatattctagtccgctcgtattcggagtacctggaaatcattttattgattatccttacatggctcctgccttcagccatatacctccagagcctattcacaaggccgcaggcagctttagagccgtgcctctgtcactgccttttcaaaacggacatcggcaggttgctgagcatactcagagagacatgaatctagagaggcacccttcgaagttgactatgctgacaggcaaggatcccccagaagacaagaacaagtcgggactaaagtatctcccagaagacaagaacaaatcatgggaggcggatgcatccttctcgttgttccaattcaacttgccaatagcttcgcctgtaacaccatcatcgaaagataagagcggaaagttggctgcaaggacgccactggttgaggttcaacctcagctttgcttgagggaacaggcagatgtgaagcagtataacctcttctcctcgaaagataatggtatattttcgtttatgtagataaattaaaaactgtgacaaatctgttatccttcgtttctgctgtctcttgctgcacttcgtgaatgatttgtgttctccggagaaaaataaaggctgttggcattttcctcttgctgtctgtatcttcgtttacctttatgtttgttcccgtgtgcgctaaaagctagcaaactgtaatgctgctgactcttgattttttttatagaacacatagatttgtgttggttcatgattcgctcctgagaacacgttaaccgggaaatgaaaatac

SEQ ID NO: 81448 - DNA, 3993 bp, Zea Mays
ggccacaaacacccgcgctcgtcgctgtctcctcctcgccttttgccccgcatcgcgtctcgctgaaaccctctcggtcaccgccgctgtcgatcagacccggctgtagctcagggaccccgtcgctgcagtatcctccgagggtcgttggcgggggagtcgtcgtcgtcgtatttggctgccggaattcgatgcgccacggagcgggcgagaggacctagttgagttgaatacggcagcgacgggaggacgtgatgccgggggtggcgtccgcagcgggatcggggatctggtcgcgccggcgggacgagatcacgttcgatcgccttcagaagcaactaagttctcaattgaggaagtggctactttttggctgtgaattgattttttttcagttctggaatgacttgcttcctcaagcacggcaggaactcctcaaattagataagcaaactctcattgaacaagcacgcaagaatttctactgctcaaggtgcaatgggttgcttctggaaagttttgcacaaattgttatctatgggaagtcactgcagcaagaagcttcagatattggtcatctgaggacagctattgaattaagaattacacatggagagcaagatggcgctcaggacccatcaatccatccctggggaggcctttcaaccacaaaagatggcttccttacgcttcttgactgctttataaaagcaaaatcattacgggtgcttcagaatgtctttgacaatgcacgggcaagagaaagggaacgggaaatgctttatcctgatgcctgtggtgcaggtggcagaggatggatcagccaagggatggctaactataggggtcatggaataagagaaatgtgtgctctacacactgcccacctttcatgtactacactggtggatttctggtcagcgcttggtgaaggaactagatcatctcttctgcggatgaaggaggaagatttcattgaaaaacttatgtacaggtttgatagtaagagattttgccgagagtgtcgaaggaatgttatccgtgaattcaaggatctgaaggaactgaagcgcatgcaaagggaacctcgctgcaccagttggttttgtgttgcagatactgcttttaagtgtgaggtgtttgaggatgctgtcgtaattgattggcaccagtgcttatcagagccagatgaatcttatgaccactttgaatgggctattgggacagatgaaggagaatccgatatttttggctttgaaaatgttggaatgaatgcacaagtccacagaaatggaatcgatcttgatcagtttgaggactacttcataacgttgcgagcttggaggcttgatggccagtgcacagagctgtgtgtaaaagcacatgcattgaagggtcaatcatgtgctcaccacaggctagtggtgggtgatggctttgtgactatgacaaagggtgaaagtattagaaatttctttgagcatgctgaagaggccgaggaagaggatgaagacgatgccatggacagggatggaaatgattttgatggtgatgatgcccattcacagaagcatgccaagagccctgaactggcaagagaatttcttttggatgctgctgctgtgatattcaaagaacagattgagaaggccttcagggaaggtacagcacagcaaaatgcacgtagtgtttttgtgacccttgctttaaaacttttggaacagcgagttcatgtagcatgcaaagaaataattacgttggaaaaacagaacaaacttcttgaagaagaggagaaagaaaagcgtgaagaacatgagcgcgggatgaagaggagaacaagagagagagaaaagaagaacagaagaaaagaaaggctgaaagaaaaggatcatagtaaaggaaaaagactagttgaatcaaagtcaccagacaatatttcatcttcagctccaagcaactccacagcatctatcaatgattattcgacaaatactctggactcaagagattcaggtacggaagaggaatatagtgctgaaggtgtgaatctgtgcactcctgacagctgtgtgaatcaatcttcatgtaaaaaaattaatggagaaaacagtgtccactgcaatgcagtgacagaattttctccaatggacaacagtgacatttctacatcagatcaacccaagtctttgagacgaagtccaagatcaagagattattttcctcaagatcagtcatgttggtatgatgactgcggagatgagtctggaagaattggtgaattacgatggaagtcaagggaaaagacaagaggtactgatagaagttgcaacacagcatccacctcaaataacaagacaagagagaggcactcatacaatttttgcagctgtggccatccagaagactatggagttatggacagctgtttcttgccaacagttagatctgtcagagagatgaagatagcaagaaaatcaggagttgagaaacctaaggtgcagtacaacagatgctatacattggatagctttatagtgccaaaaggaaaccatgctggttgtacacagaaaaatgctatcccaaagcaagtatgggagcctatggatgctcgaaggaagactaacttacacaacacagttcatgattcaggttcaattaacgatgttgatccactgaaacatgtggtttttgataacagcggatctcataagttcagtgtaagatgtgaatcacagcctcaggcttctgaaagttccagggatgtttgtaattcagatcaaagatgtgcaaatggtgggagaaatcaaactacttcctgtgctagtactcttatggtaaataaacaaaattgttactcagaaaatgatgaaggctccaggcatgatgtagagctgatgacgaactctgctagttctgatagcacctcgtcatgcatgagccagggagatagggaaagcagctccagcagtacaacctcttcgagcgctcaaaatccggaatcatcttctgaatctgaggaatcaccggagagaataaacagcacagtaggtacaccatcatcaagagctgcttcacggtctttgcttgaagcatgtgcaggaaatggtttcagagaataccaacccaagacaacccgcccagctcacaatgacatgtttgggtacaatgtatcccctgtccaagaccagctgctgcattaccaaatcacgcatccacctcaacaaccgccaataacaatgggatttcatgaccgttcttgggctgcaccaacgaatggaaactttcaccatatacctccagagcctattcacaaggccgcaggcagctttagagccgtgcctctgtcactgccttttcaaaacggacatcggcaggttgctgagcatactcagagagacatgaatctagagaggcacccttcgaagttgactatgctgacaggcaaggatcccccagaagacaagaacaagtcgggactaaagtatctcccagaagacaagaacaaatcatgggaggcggatgcatccttctcgttgttccaattcaacttgccaatagcttcgcctgtaacaccatcatcgaaagataagagcggaaagttggctgcaaggacgccactggttgaggttcaacctcagctttgcttgagggaacaggcagatgtgaagcagtataacctcttctcctcgaaagataatggtatattttcgtttatgtagataaattaaaaactgtgacaaatctgttatccttcgtttctgctgtctcttgctgcacttcgtgaatgatttgtgttctccggagaaaaataaaggctgttggcattttcctcttgctgtctgtatcttcgtttacctttatgtttgttcccgtgtgcgctaaaagctagcaaactgtaatgctgctgactcttgattttttttatagaacacatagatttgtgttggttcatgattcgctcctgagaacacgttaaccgggaaatgaaaatac

SEQ ID NO: 81449 - DNA, 3949 bp, Zea Mays
ggccacaaacacccgcgctcgtcgctgtctcctcctcgccttttgccccgcatcgcgtctcgctgaaaccctctcggtcaccgccgctgtcgatcagacccggctgtagctcagggaccccgtcgctgcagtatcctccgagggtcgttggcgggggagtcgtcgtcgtcgtatttggctgccggaattcgatgcgccacggagcgggcgagaggacctagttgagttgaatacggcagcgacgggaggacgtgatgccgggggtggcgtccgcagcgggatcggggatctggtcgcgccggcgggacgagatcacgttcgatcgccttcagaagcacggcaggaactcctcaaattagataagcaaactctcattgaacaagcacgcaagaatttctactgctcaaggtgcaatgggttgcttctggaaagttttgcacaaattgttatctatgggaagtcactgcagcaagaagcttcagatattggtcatctgaggacagctattgaattaagaattacacatggagagcaagatggcgctcaggacccatcaatccatccctggggaggcctttcaaccacaaaagatggcttccttacgcttcttgactgctttataaaagcaaaatcattacgggtgcttcagaatgtggcagaggatggatcagccaagggatggctaactataggggtcatggaataagagaaatgtgtgctctacacactgcccacctttcatgtactacactggtggatttctggtcagcgcttggtgaaggaactagatcatctcttctgcggatgaaggaggaagatttcattgaaaaacttatgtacaggtttgatagtaagagattttgccgagagtgtcgaaggaatgttatccgtgaattcaaggatctgaaggaactgaagcgcatgcaaagggaacctcgctgcaccagttggttttgtgttgcagatactgcttttaagtgtgaggtgtttgaggatgctgtcgtaattgattggcaccagtgcttatcagagccagatgaatcttatgaccactttgaatgggctattgggacagatgaaggagaatccgatatttttggctttgaaaatgttggaatgaatgcacaagtccacagaaatggaatcgatcttgatcagtttgaggactacttcataacgttgcgagcttggaggcttgatggccagtgcacagagctgtgtgtaaaagcacatgcattgaagggtcaatcatgtgctcaccacaggctagtggtgggtgatggctttgtgactatgacaaagggtgaaagtattagaaatttctttgagcatgctgaagaggccgaggaagaggatgtacatcactcgtcatttatggctatgtctttaactgagatagacataaataggtcattcatttttggtgtcaaaagatatcattctgattgatgaaaatatgtgcaggaagacgatgccatggacagggatggaaatgattttgatggtgatgatgcccattcacagaagcatgccaagagccctgaactggcaagagaatttcttttggatgctgctgctgtgatattcaaagaacagattgagaaggccttcagggaaggtacagcacagcaaaatgcacgtagtgtttttgtgacccttgctttaaaacttttggaacagcgagttcatgtagcatgcaaagaaataattacgttggaaaaacagaacaaacttcttgaagaagaggagaaagaaaagcgtgaagaacatgagcgcgggatgaagaggagaacaagagagagagaaaagaagaacagaagaaaagaaaggctgaaagaaaaggatcatagtaaaggaaaaagactagttgaatcaaagtcaccagacaatatttcatcttcagctccaagcaactccacagcatctatcaatgattattcgacaaatactctggactcaagagattcaggtacggaagaggaatatagtgctgaaggtgtgaatctgtgcactcctgacagctgtgtgaatcaatcttcatgtaaaaaaattaatggagaaaacagtgtccactgcaatgcagtgacagaattttctccaatggacaacagtgacatttctacatcagatcaacccaagtctttgagacgaagtccaagatcaagagattattttcctcaagatcagtcatgttggtatgatgactgcggagatgagtctggaagaattggtgaattacgatggaagtcaagggaaaagacaagaggtactgatagaagttgcaacacagcatccacctcaaataacaagacaagagagaggcactcatacaatttttgcagctgtggccatccagaagactatggagttatggacagctgtttcttgccaacagttagatctgtcagagagatgaagatagcaagaaaatcaggagttgagaaacctaaggtgcagtacaacagatgctatacattggatagctttatagtgccaaaaggaaaccatgctggttgtacacagaaaaatgctatcccaaagcaagtatgggagcctatggatgctcgaaggaagactaacttacacaacacagttcatgattcaggttcaattaacgatgttgatccactgaaacatgtggtttttgataacagcggatctcataagttcagtgtaagatgtgaatcacagcctcaggcttctgaaagttccagggatgtttgtaattcagatcaaagatgtgcaaatggtgggagaaatcaaactacttcctgtgctagtactcttatggtaaataaacaaaattgttactcagaaaatgatgaaggctccaggcatgatgtagagctgatgacgaactctgctagttctgatagcacctcgtcatgcatgagccagggagatagggaaagcagctccagcagtacaacctcttcgagcgctcaaaatccggaatcatcttctgaatctgaggaatcaccggagagaataaacagcacagtaggtacaccatcatcaagagctgcttcacggtctttgcttgaagcatgtgcaggaaatggtttcagagaataccaacccaagacaacccgcccagctcacaatgacatgtttgggtacaatgtatcccctgtccaagaccagctgctgcattaccaaatcacgcatccacctcaacaaccgccaataacaatgggatttcatgaccgttcttgggctgcaccaacgaatggaaactttcaccatatacctccagagcctattcacaaggccgcaggcagctttagagccgtgcctctgtcactgccttttcaaaacggacatcggcaggttgctgagcatactcagagagacatgaatctagagaggcacccttcgaagttgactatgctgacaggcaaggatcccccagaagacaagaacaagtcgggactaaagtatctcccagaagacaagaacaaatcatgggaggcggatgcatccttctcgttgttccaattcaacttgccaatagcttcgcctgtaacaccatcatcgaaagataagagcggaaagttggctgcaaggacgccactggttgaggttcaacctcagctttgcttgagggaacaggcagatgtgaagcagtataacctcttctcctcgaaagataatggtatattttcgtttatgtagataaattaaaaactgtgacaaatctgttatccttcgtttctgctgtctcttgctgcacttcgtgaatgatttgtgttctccggagaaaaataaaggctgttggcattttcctcttgctgtctgtatcttcgtttacctttatgtttgttcccgtgtgcgctaaaagctagcaaactgtaatgctgctgactcttgattttttttatagaacacatagatttgtgttggttcatgattcgctcctgagaacacgttaaccgggaaatgaaaatac

SEQ ID NO: 81450 - DNA, 4301 bp, Zea Mays
ggccacaaacacccgcgctcgtcgctgtctcctcctcgccttttgccccgcatcgcgtctcgctgaaaccctctcggtcaccgccgctgtcgatcagacccggctgtagctcagggaccccgtcgctgcagtatcctccgagggtcgttggcgggggagtcgtcgtcgtcgtatttggctgccggaattcgatgcgccacggagcgggcgagaggacctagttgagttgaatacggcagcgacgggaggacgtgatgccgggggtggcgtccgcagcgggatcggggatctggtcgcgccggcgggacgagatcacgttcgatcgccttcagaagcaggtatagctgctagtagaatcatactggacaaaactggtgattgcactcaaataattaaaacaagttttcgcccattccattttggtactgtcacatgttctgtaatcttcttcaaggtttgtgccatgtcttttatgatgaccttgcatttgaattactagagcttgcttcaccatcacctttatttgagtttgtaacattgcgccacccttgaataggattgtgattgatcattattttgtaagtaatgttcttattaagctgtttctatcatcaagttcattccactgggtattatttttcagcaactaagttctcaattgaggaagtggctactttttggctgtgaattgattttttttcagttctggaatgacttgcttcctcaagcacggcaggaactcctcaaattagataagcaaactctcattgaacaagcacgcaagaatttctactgctcaaggtgcaatgggttgcttctggaaagttttgcacaaattgttatctatgggaagtcactgcagcaagaagcttcagatattggtcatctgaggacagctattgaattaagaattacacatggagagcaagatggcgctcaggacccatcaatccatccctggggaggcctttcaaccacaaaagatggcttccttacgcttcttgactgctttataaaagcaaaatcattacgggtgcttcagaatgtctttgacaatgcacgggcaagagaaagggaacgggaaatgctttatcctgatgcctgtggtgcaggtggcagaggatggatcagccaagggatggctaactataggggtcatggaataagagaaatgtgtgctctacacactgcccacctttcatgtactacactggtggatttctggtcagcgcttggtgaaggaactagatcatctcttctgcggatgaaggaggaagatttcattgaaaaacttatgtacaggtttgatagtaagagattttgccgagagtgtcgaaggaatgttatccgtgaattcaaggatctgaaggaactgaagcgcatgcaaagggaacctcgctgcaccagttggttttgtgttgcagatactgcttttaagtgtgaggtgtttgaggatgctgtcgtaattgattggcaccagtgcttatcagagccagatgaatcttatgaccactttgaatgggctattgggacagatgaaggagaatccgatatttttggctttgaaaatgttggaatgaatgcacaagtccacagaaatggaatcgatcttgatcagtttgaggactacttcataacgttgcgagcttggaggcttgatggccagtgcacagagctgtgtgtaaaagcacatgcattgaagggtcaatcatgtgctcaccacaggctagtggtgggtgatggctttgtgactatgacaaagggtgaaagtattagaaatttctttgagcatgctgaagaggccgaggaagaggatgaagacgatgccatggacagggatggaaatgattttgatggtgatgatgcccattcacagaagcatgccaagagccctgaactggcaagagaatttcttttggatgctgctgctgtgatattcaaagaacagattgagaaggccttcagggaaggtacagcacagcaaaatgcacgtagtgtttttgtgacccttgctttaaaacttttggaacagcgagttcatgtagcatgcaaagaaataattacgttggaaaaacagaacaaacttcttgaagaagaggagaaagaaaagcgtgaagaacatgagcgcgggatgaagaggagaacaagagagagagaaaagaagaacagaagaaaagaaaggctgaaagaaaaggatcatagtaaaggaaaaagactagttgaatcaaagtcaccagacaatatttcatcttcagctccaagcaactccacagcatctatcaatgattattcgacaaatactctggactcaagagattcaggtacggaagaggaatatagtgctgaaggtgtgaatctgtgcactcctgacagctgtgtgaatcaatcttcatgtaaaaaaattaatggagaaaacagtgtccactgcaatgcagtgacagaattttctccaatggacaacagtgacatttctacatcagatcaacccaagtctttgagacgaagtccaagatcaagagattattttcctcaagatcagtcatgttggtatgatgactgcggagatgagtctggaagaattggtgaattacgatggaagtcaagggaaaagacaagaggtactgatagaagttgcaacacagcatccacctcaaataacaagacaagagagaggcactcatacaatttttgcagctgtggccatccagaagactatggagttatggacagctgtttcttgccaacagttagatctgtcagagagatgaagatagcaagaaaatcaggagttgagaaacctaaggtgcagtacaacagatgctatacattggatagctttatagtgccaaaaggaaaccatgctggttgtacacagaaaaatgctatcccaaagcaagtatgggagcctatggatgctcgaaggaagactaacttacacaacacagttcatgattcaggttcaattaacgatgttgatccactgaaacatgtggtttttgataacagcggatctcataagttcagtgtaagatgtgaatcacagcctcaggcttctgaaagttccagggatgtttgtaattcagatcaaagatgtgcaaatggtgggagaaatcaaactacttcctgtgctagtactcttatggtaaataaacaaaattgttactcagaaaatgatgaaggctccaggcatgatgtagagctgatgacgaactctgctagttctgatagcacctcgtcatgcatgagccagggagatagggaaagcagctccagcagtacaacctcttcgagcgctcaaaatccggaatcatcttctgaatctgaggaatcaccggagagaataaacagcacagtaggtacaccatcatcaagagctgcttcacggtctttgcttgaagcatgtgcaggaaatggtttcagagaataccaacccaagacaacccgcccagctcacaatgacatgtttgggtacaatgtatcccctgtccaagaccagctgctgcattaccaaatcacgcatccacctcaacaaccgccaataacaatgggatttcatgaccgttcttgggctgcaccaacgaatggaaactttcaccatatacctccagagcctattcacaaggccgcaggcagctttagagccgtgcctctgtcactgccttttcaaaacggacatcggcaggttgctgagcatactcagagagacatgaatctagagaggcacccttcgaagttgactatgctgacaggcaaggatcccccagaagacaagaacaagtcgggactaaagtatctcccagaagacaagaacaaatcatgggaggcggatgcatccttctcgttgttccaattcaacttgccaatagcttcgcctgtaacaccatcatcgaaagataagagcggaaagttggctgcaaggacgccactggttgaggttcaacctcagctttgcttgagggaacaggcagatgtgaagcagtataacctcttctcctcgaaagataatggtatattttcgtttatgtagataaattaaaaactgtgacaaatctgttatccttcgtttctgctgtctcttgctgcacttcgtgaatgatttgtgttctccggagaaaaataaaggctgttggcattttcctcttgctgtctgtatcttcgtttacctttatgtttgttcccgtgtgcgctaaaagctagcaaactgtaatgctgctgactcttgattttttttatagaacacatagatttgtgttggttcatgattcgctcctgagaacacgttaaccgggaaatgaaaatac

SEQ ID NO: 81451 - DNA, 4148 bp, Zea Mays
ggccacaaacacccgcgctcgtcgctgtctcctcctcgccttttgccccgcatcgcgtctcgctgaaaccctctcggtcaccgccgctgtcgatcagacccggctgtagctcagggaccccgtcgctgcagtatcctccgagggtcgttggcgggggagtcgtcgtcgtcgtatttggctgccggaattcgatgcgccacggagcgggcgagaggacctagttgagttgaatacggcagcgacgggaggacgtgatgccgggggtggcgtccgcagcgggatcggggatctggtcgcgccggcgggacgagatcacgttcgatcgccttcagaagcaggtatagctgctagtagaatcatactggacaaaactggtgattgcactcaaataattaaaacaagttttcgcccattccattttggtactgtcacatgttctgtaatcttcttcaagttctggaatgacttgcttcctcaagcacggcaggaactcctcaaattagataagcaaactctcattgaacaagcacgcaagaatttctactgctcaaggtgcaatgggttgcttctggaaagttttgcacaaattgttatctatgggaagtcactgcagcaagaagcttcagatattggtcatctgaggacagctattgaattaagaattacacatggagagcaagatggcgctcaggacccatcaatccatccctggggaggcctttcaaccacaaaagatggcttccttacgcttcttgactgctttataaaagcaaaatcattacgggtgcttcagaatgtctttgacaatgcacgggcaagagaaagggaacgggaaatgctttatcctgatgcctgtggtgcaggtggcagaggatggatcagccaagggatggctaactataggggtcatggaataagagaaatgtgtgctctacacactgcccacctttcatgtactacactggtggatttctggtcagcgcttggtgaaggaactagatcatctcttctgcggatgaaggaggaagatttcattgaaaaacttatgtacaggtttgatagtaagagattttgccgagagtgtcgaaggaatgttatccgtgaattcaaggatctgaaggaactgaagcgcatgcaaagggaacctcgctgcaccagttggttttgtgttgcagatactgcttttaagtgtgaggtgtttgaggatgctgtcgtaattgattggcaccagtgcttatcagagccagatgaatcttatgaccactttgaatgggctattgggacagatgaaggagaatccgatatttttggctttgaaaatgttggaatgaatgcacaagtccacagaaatggaatcgatcttgatcagtttgaggactacttcataacgttgcgagcttggaggcttgatggccagtgcacagagctgtgtgtaaaagcacatgcattgaagggtcaatcatgtgctcaccacaggctagtggtgggtgatggctttgtgactatgacaaagggtgaaagtattagaaatttctttgagcatgctgaagaggccgaggaagaggatgaagacgatgccatggacagggatggaaatgattttgatggtgatgatgcccattcacagaagcatgccaagagccctgaactggcaagagaatttcttttggatgctgctgctgtgatattcaaagaacagattgagaaggccttcagggaaggtacagcacagcaaaatgcacgtagtgtttttgtgacccttgctttaaaacttttggaacagcgagttcatgtagcatgcaaagaaataattacgttggaaaaacagaacaaacttcttgaagaagaggagaaagaaaagcgtgaagaacatgagcgcgggatgaagaggagaacaagagagagagaaaagaagaacagaagaaaagaaaggctgaaagaaaaggatcatagtaaaggaaaaagactagttgaatcaaagtcaccagacaatatttcatcttcagctccaagcaactccacagcatctatcaatgattattcgacaaatactctggactcaagagattcaggtacggaagaggaatatagtgctgaaggtgtgaatctgtgcactcctgacagctgtgtgaatcaatcttcatgtaaaaaaattaatggagaaaacagtgtccactgcaatgcagtgacagaattttctccaatggacaacagtgacatttctacatcagatcaacccaagtctttgagacgaagtccaagatcaagagattattttcctcaagatcagtcatgttggtatgatgactgcggagatgagtctggaagaattggtgaattacgatggaagtcaagggaaaagacaagaggtactgatagaagttgcaacacagcatccacctcaaataacaagacaagagagaggcactcatacaatttttgcagctgtggccatccagaagactatggagttatggacagctgtttcttgccaacagttagatctgtcagagagatgaagatagcaagaaaatcaggagttgagaaacctaaggtgcagtacaacagatgctatacattggatagctttatagtgccaaaaggaaaccatgctggttgtacacagaaaaatgctatcccaaagcaagtatgggagcctatggatgctcgaaggaagactaacttacacaacacagttcatgattcaggttcaattaacgatgttgatccactgaaacatgtggtttttgataacagcggatctcataagttcagtgtaagatgtgaatcacagcctcaggcttctgaaagttccagggatgtttgtaattcagatcaaagatgtgcaaatggtgggagaaatcaaactacttcctgtgctagtactcttatggtaaataaacaaaattgttactcagaaaatgatgaaggctccaggcatgatgtagagctgatgacgaactctgctagttctgatagcacctcgtcatgcatgagccagggagatagggaaagcagctccagcagtacaacctcttcgagcgctcaaaatccggaatcatcttctgaatctgaggaatcaccggagagaataaacagcacagtaggtacaccatcatcaagagctgcttcacggtctttgcttgaagcatgtgcaggaaatggtttcagagaataccaacccaagacaacccgcccagctcacaatgacatgtttgggtacaatgtatcccctgtccaagaccagctgctgcattaccaaatcacgcatccacctcaacaaccgccaataacaatgggatttcatgaccgttcttgggctgcaccaacgaatggaaactttcagtatgctcgaccatcccacttatattctagtccgctcgtattcggagtacctggaaatcattttattgattatccttacatggctcctgccttcagccatatacctccagagcctattcacaaggccgcaggcagctttagagccgtgcctctgtcactgccttttcaaaacggacatcggcaggttgctgagcatactcagagagacatgaatctagagaggcacccttcgaagttgactatgctgacaggcaaggatcccccagaagacaagaacaagtcgggactaaagtatctcccagaagacaagaacaaatcatgggaggcggatgcatccttctcgttgttccaattcaacttgccaatagcttcgcctgtaacaccatcatcgaaagataagagcggaaagttggctgcaaggacgccactggttgaggttcaacctcagctttgcttgagggaacaggcagatgtgaagcagtataacctcttctcctcgaaagataatggtatattttcgtttatgtagataaattaaaaactgtgacaaatctgttatccttcgtttctgctgtctcttgctgcacttcgtgaatgatttgtgttctccggagaaaaataaaggctgttggcattttcctcttgctgtctgtatcttcgtttacctttatgtttgttcccgtgtgcgctaaaagctagcaaactgtaatgctgctgactcttgattttttttatagaacacatagatttgtgttggttcatgattcgctcctgagaacacgttaaccgggaaatgaaaatac

SEQ ID NO: 81452 - DNA, 3934 bp, Zea Mays
ggccacaaacacccgcgctcgtcgctgtctcctcctcgccttttgccccgcatcgcgtctcgctgaaaccctctcggtcaccgccgctgtcgatcagacccggctgtagctcagggaccccgtcgctgcagtatcctccgagggtcgttggcgggggagtcgtcgtcgtcgtatttggctgccggaattcgatgcgccacggagcgggcgagaggacctagttgagttgaatacggcagcgacgggaggacgtgatgccgggggtggcgtccgcagcgggatcggggatctggtcgcgccggcgggacgagatcacgttcgatcgccttcagaagttctggaatgacttgcttcctcaagcacggcaggaactcctcaaattagataagcaaactctcattgaacaagcacgcaagaatttctactgctcaaggtgcaatgggttgcttctggaaagttttgcacaaattgttatctatgggaagtcactgcagcaagaagcttcagatattggtcatctgaggacagctattgaattaagaattacacatggagagcaagatggcgctcaggacccatcaatccatccctggggaggcctttcaaccacaaaagatggcttccttacgcttcttgactgctttataaaagcaaaatcattacgggtgcttcagaatgtctttgacaatgcacgggcaagagaaagggaacgggaaatgctttatcctgatgcctgtggtgcaggtggcagaggatggatcagccaagggatggctaactataggggtcatggaataagagaaatgtgtgctctacacactgcccacctttcatgtactacactggtggatttctggtcagcgcttggtgaaggaactagatcatctcttctgcggatgaaggaggaagatttcattgaaaaacttatgtacaggtttgatagtaagagattttgccgagagtgtcgaaggaatgttatccgtgaattcaaggatctgaaggaactgaagcgcatgcaaagggaacctcgctgcaccagttggttttgtgttgcagatactgcttttaagtgtgaggtgtttgaggatgctgtcgtaattgattggcaccagtgcttatcagagccagatgaatcttatgaccactttgaatgggctattgggacagatgaaggagaatccgatatttttggctttgaaaatgttggaatgaatgcacaagtccacagaaatggaatcgatcttgatcagtttgaggactacttcataacgttgcgagcttggaggcttgatggccagtgcacagagctgtgtgtaaaagcacatgcattgaagggtcaatcatgtgctcaccacaggctagtggtgggtgatggctttgtgactatgacaaagggtgaaagtattagaaatttctttgagcatgctgaagaggccgaggaagaggatacgatgccatggacagggatggaaatgattttgatggtgatgatgcccattcacagaagcatgccaagagccctgaactggcaagagaatttcttttggatgctgctgctgtgatattcaaagaacagattgagaaggccttcagggaaggtacagcacagcaaaatgcacgtagtgtttttgtgacccttgctttaaaacttttggaacagcgagttcatgtagcatgcaaagaaataattacgttggaaaaacagaacaaacttcttgaagaagaggagaaagaaaagcgtgaagaacatgagcgcgggatgaagaggagaacaagagagagagaaaagaagaacagaagaaaagaaaggctgaaagaaaaggatcatagtaaaggaaaaagactagttgaatcaaagtcaccagacaatatttcatcttcagctccaagcaactccacagcatctatcaatgattattcgacaaatactctggactcaagagattcaggtacggaagaggaatatagtgctgaaggtgtgaatctgtgcactcctgacagctgtgtgaatcaatcttcatgtaaaaaaattaatggagaaaacagtgtccactgcaatgcagtgacagaattttctccaatggacaacagtgacatttctacatcagatcaacccaagtctttgagacgaagtccaagatcaagagattattttcctcaagatcagtcatgttggtatgatgactgcggagatgagtctggaagaattggtgaattacgatggaagtcaagggaaaagacaagaggtactgatagaagttgcaacacagcatccacctcaaataacaagacaagagagaggcactcatacaatttttgcagctgtggccatccagaagactatggagttatggacagctgtttcttgccaacagttagatctgtcagagagatgaagatagcaagaaaatcaggagttgagaaacctaaggtgcagtacaacagatgctatacattggatagctttatagtgccaaaaggaaaccatgctggttgtacacagaaaaatgctatcccaaagcaagtatgggagcctatggatgctcgaaggaagactaacttacacaacacagttcatgattcaggttcaattaacgatgttgatccactgaaacatgtggtttttgataacagcggatctcataagttcagtgtaagatgtgaatcacagcctcaggcttctgaaagttccagggatgtttgtaattcagatcaaagatgtgcaaatggtgggagaaatcaaactacttcctgtgctagtactcttatggtaaataaacaaaattgttactcagaaaatgatgaaggctccaggcatgatgtagagctgatgacgaactctgctagttctgatagcacctcgtcatgcatgagccagggagatagggaaagcagctccagcagtacaacctcttcgagcgctcaaaatccggaatcatcttctgaatctgaggaatcaccggagagaataaacagcacagtaggtacaccatcatcaagagctgcttcacggtctttgcttgaagcatgtgcaggaaatggtttcagagaataccaacccaagacaacccgcccagctcacaatgacatgtttgggtacaatgtatcccctgtccaagaccagctgctgcattaccaaatcacgcatccacctcaacaaccgccaataacaatgggatttcatgaccgttcttgggctgcaccaacgaatggaaactttcagtatgctcgaccatcccacttatattctagtccgctcgtattcggagtacctggaaatcattttattgattatccttacatggctcctgccttcagccatatacctccagagcctattcacaaggccgcaggcacccttcgaagttgactatgctgacaggcaaggatcccccagaagacaagaacaagtcgggactaaagtatctcccagaagacaagaacaaatcatgggaggcggatgcatccttctcgttgttccaattcaacttgccaatagcttcgcctgtaacaccatcatcgaaagataagagcggaaagttggctgcaaggacgccactggttgaggttcaacctcagctttgcttgagggaacaggcagatgtgaagcagtataacctcttctcctcgaaagataatggtatattttcgtttatgtagataaattaaaaactgtgacaaatctgttatccttcgtttctgctgtctcttgctgcacttcgtgaatgatttgtgttctccggagaaaaataaaggctgttggcattttcctcttgctgtctgtatcttcgtttacctttatgtttgttcccgtgtgcgctaaaagctagcaaactgtaatgctgctgactcttgattttttttatagaacacatagatttgtgttggttcatgattcgctcctgagaacacgttaaccgggaaatgaaaatac

SEQ ID NO: 81453 - DNA, 4008 bp, Zea Mays
ggccacaaacacccgcgctcgtcgctgtctcctcctcgccttttgccccgcatcgcgtctcgctgaaaccctctcggtcaccgccgctgtcgatcagacccggctgtagctcagggaccccgtcgctgcagtatcctccgagggtcgttggcgggggagtcgtcgtcgtcgtatttggctgccggaattcgatgcgccacggagcgggcgagaggacctagttgagttgaatacggcagcgacgggaggacgtgatgccgggggtggcgtccgcagcgggatcggggatctggtcgcgccggcgggacgagatcacgttcgatcgccttcagaaggaactcctcaaattagataagcaaactctcattgaacaagcacgcaagaatttctactgctcaaggtgcaatgggttgcttctggaaagttttgcacaaattgttatctatgggaagtcactgcagcaagaagcttcagatattggtcatctgaggacagctattgaattaagaattacacatggagagcaagatggcgctcaggacccatcaatccatccctggggaggcctttcaaccacaaaagatggcttccttacgcttcttgactgctttataaaagcaaaatcattacgggtgcttcagaatgtctttgacaatgcacgggcaagagaaagggaacgggaaatgctttatcctgatgcctgtggtgcaggtggcagaggatggatcagccaagggatggctaactataggggtcatggaataagagaaatgtgtgctctacacactgcccacctttcatgtactacactggtggatttctggtcagcgcttggtgaaggaactagatcatctcttctgcggatgaaggaggaagatttcattgaaaaacttatgtacaggtttgatagtaagagattttgccgagagtgtcgaaggaatgttatccgtgaattcaaggatctgaaggaactgaagcgcatgcaaagggaacctcgctgcaccagttggttttgtgttgcagatactgcttttaagtgtgaggtgtttgaggatgctgtcgtaattgattggcaccagtgcttatcagagccagatgaatcttatgaccactttgaatgggctattgggacagatgaaggagaatccgatatttttggctttgaaaatgttggaatgaatgcacaagtccacagaaatggaatcgatcttgatcagtttgaggactacttcataacgttgcgagcttggaggcttgatggccagtgcacagagctgtgtgtaaaagcacatgcattgaagggtcaatcatgtgctcaccacaggctagtggtgggtgatggctttgtgactatgacaaagggtgaaagtattagaaatttctttgagcatgctgaagaggccgaggaagaggatgtacatcactcgtcatttatggctatgtctttaactgagatagacataaataggtcattcatttttggtgtcaaaagatatcattctgattgatgaaaatatgtgcaggaagacgatgccatggacagggatggaaatgattttgatggtgatgatgcccattcacagaagcatgccaagagccctgaactggcaagagaatttcttttggatgctgctgctgtgatattcaaagaacagattgagaaggccttcagggaaggtacagcacagcaaaatgcacgtagtgtttttgtgacccttgctttaaaacttttggaacagcgagttcatgtagcatgcaaagaaataattacgttggaaaaacagaacaaacttcttgaagaagaggagaaagaaaagcgtgaagaacatgagcgcgggatgaagaggagaacaagagagagagaaaagaagaacagaagaaaagaaaggctgaaagaaaaggatcatagtaaaggaaaaagactagttgaatcaaagtcaccagacaatatttcatcttcagctccaagcaactccacagcatctatcaatgattattcgacaaatactctggactcaagagattcaggtacggaagaggaatatagtgctgaaggtgtgaatctgtgcactcctgacagctgtgtgaatcaatcttcatgtaaaaaaattaatggagaaaacagtgtccactgcaatgcagtgacagaattttctccaatggacaacagtgacatttctacatcagatcaacccaagtctttgagacgaagtccaagatcaagagattattttcctcaagatcagtcatgttggtatgatgactgcggagatgagtctggaagaattggtgaattacgatggaagtcaagggaaaagacaagaggtactgatagaagttgcaacacagcatccacctcaaataacaagacaagagagaggcactcatacaatttttgcagctgtggccatccagaagactatggagttatggacagctgtttcttgccaacagttagatctgtcagagagatgaagatagcaagaaaatcaggagttgagaaacctaaggtgcagtacaacagatgctatacattggatagctttatagtgccaaaaggaaaccatgctggttgtacacagaaaaatgctatcccaaagcaagtatgggagcctatggatgctcgaaggaagactaacttacacaacacagttcatgattcaggttcaattaacgatgttgatccactgaaacatgtggtttttgataacagcggatctcataagttcagtgtaagatgtgaatcacagcctcaggcttctgaaagttccagggatgtttgtaattcagatcaaagatgtgcaaatggtgggagaaatcaaactacttcctgtgctagtactcttatggtaaataaacaaaattgttactcagaaaatgatgaaggctccaggcatgatgtagagctgatgacgaactctgctagttctgatagcacctcgtcatgcatgagccagggagatagggaaagcagctccagcagtacaacctcttcgagcgctcaaaatccggaatcatcttctgaatctgaggaatcaccggagagaataaacagcacagtaggtacaccatcatcaagagctgcttcacggtctttgcttgaagcatgtgcaggaaatggtttcagagaataccaacccaagacaacccgcccagctcacaatgacatgtttgggtacaatgtatcccctgtccaagaccagctgctgcattaccaaatcacgcatccacctcaacaaccgccaataacaatgggatttcatgaccgttcttgggctgcaccaacgaatggaaactttcaccatatacctccagagcctattcacaaggccgcaggcagctttagagccgtgcctctgtcactgccttttcaaaacggacatcggcaggttgctgagcatactcagagagacatgaatctagagaggcacccttcgaagttgactatgctgacaggcaaggatcccccagaagacaagaacaagtcgggactaaagtatctcccagaagacaagaacaaatcatgggaggcggatgcatccttctcgttgttccaattcaacttgccaatagcttcgcctgtaacaccatcatcgaaagataagagcggaaagttggctgcaaggacgccactggttgaggttcaacctcagctttgcttgagggaacaggcagatgtgaagcagtataacctcttctcctcgaaagataatggtatattttcgtttatgtagataaattaaaaactgtgacaaatctgttatccttcgtttctgctgtctcttgctgcacttcgtgaatgatttgtgttctccggagaaaaataaaggctgttggcattttcctcttgctgtctgtatcttcgtttacctttatgtttgttcccgtgtgcgctaaaagctagcaaactgtaatgctgctgactcttgattttttttatagaacacatagatttgtgttggttcatgattcgctcctgagaacacgttaaccgggaaatgaaaatac

SEQ ID NO: 81454 - DNA, 3974 bp, Zea Mays
ggccacaaacacccgcgctcgtcgctgtctcctcctcgccttttgccccgcatcgcgtctcgctgaaaccctctcggtcaccgccgctgtcgatcagacccggctgtagctcagggaccccgtcgctgcagtatcctccgagggtcgttggcgggggagtcgtcgtcgtcgtatttggctgccggaattcgatgcgccacggagcgggcgagaggacctagttgagttgaatacggcagcgacgggaggacgtgatgccgggggtggcgtccgcagcgggatcggggatctggtcgcgccggcgggacgagatcacgttcgatcgccttcagaagttctggaatgacttgcttcctcaagcacggcaggaactcctcaaattagataagcaaactctcattgaacaagcacgcaagaatttctactgctcaaggtgcaatgggttgcttctggaaagttttgcacaaattgttatctatgggaagtcactgcagcaagaagcttcagatattggtcatctgaggacagctattgaattaagaattacacatggagagcaagatggcgctcaggacccatcaatccatccctggggaggcctttcaaccacaaaagatggcttccttacgcttcttgactgctttataaaagcaaaatcattacgggtgcttcagaatgtggcagaggatggatcagccaagggatggctaactataggggtcatggaataagagaaatgtgtgctctacacactgcccacctttcatgtactacactggtggatttctggtcagcgcttggtgaaggaactagatcatctcttctgcggatgaaggaggaagatttcattgaaaaacttatgtacaggtttgatagtaagagattttgccgagagtgtcgaaggaatgttatccgtgaattcaaggatctgaaggaactgaagcgcatgcaaagggaacctcgctgcaccagttggttttgtgttgcagatactgcttttaagtgtgaggtgtttgaggatgctgtcgtaattgattggcaccagtgcttatcagagccagatgaatcttatgaccactttgaatgggctattgggacagatgaaggagaatccgatatttttggctttgaaaatgttggaatgaatgcacaagtccacagaaatggaatcgatcttgatcagtttgaggactacttcataacgttgcgagcttggaggcttgatggccagtgcacagagctgtgtgtaaaagcacatgcattgaagggtcaatcatgtgctcaccacaggctagtggtgggtgatggctttgtgactatgacaaagggtgaaagtattagaaatttctttgagcatgctgaagaggccgaggaagaggatgtacatcactcgtcatttatggctatgtctttaactgagatagacataaataggtcattcatttttggtgtcaaaagatatcattctgattgatgaaaatatgtgcaggaagacgatgccatggacagggatggaaatgattttgatggtgatgatgcccattcacagaagcatgccaagagccctgaactggcaagagaatttcttttggatgctgctgctgtgatattcaaagaacagattgagaaggccttcagggaaggtacagcacagcaaaatgcacgtagtgtttttgtgacccttgctttaaaacttttggaacagcgagttcatgtagcatgcaaagaaataattacgttggaaaaacagaacaaacttcttgaagaagaggagaaagaaaagcgtgaagaacatgagcgcgggatgaagaggagaacaagagagagagaaaagaagaacagaagaaaagaaaggctgaaagaaaaggatcatagtaaaggaaaaagactagttgaatcaaagtcaccagacaatatttcatcttcagctccaagcaactccacagcatctatcaatgattattcgacaaatactctggactcaagagattcaggtacggaagaggaatatagtgctgaaggtgtgaatctgtgcactcctgacagctgtgtgaatcaatcttcatgtaaaaaaattaatggagaaaacagtgtccactgcaatgcagtgacagaattttctccaatggacaacagtgacatttctacatcagatcaacccaagtctttgagacgaagtccaagatcaagagattattttcctcaagatcagtcatgttggtatgatgactgcggagatgagtctggaagaattggtgaattacgatggaagtcaagggaaaagacaagaggtactgatagaagttgcaacacagcatccacctcaaataacaagacaagagagaggcactcatacaatttttgcagctgtggccatccagaagactatggagttatggacagctgtttcttgccaacagttagatctgtcagagagatgaagatagcaagaaaatcaggagttgagaaacctaaggtgcagtacaacagatgctatacattggatagctttatagtgccaaaaggaaaccatgctggttgtacacagaaaaatgctatcccaaagcaagtatgggagcctatggatgctcgaaggaagactaacttacacaacacagttcatgattcaggttcaattaacgatgttgatccactgaaacatgtggtttttgataacagcggatctcataagttcagtgtaagatgtgaatcacagcctcaggcttctgaaagttccagggatgtttgtaattcagatcaaagatgtgcaaatggtgggagaaatcaaactacttcctgtgctagtactcttatggtaaataaacaaaattgttactcagaaaatgatgaaggctccaggcatgatgtagagctgatgacgaactctgctagttctgatagcacctcgtcatgcatgagccagggagatagggaaagcagctccagcagtacaacctcttcgagcgctcaaaatccggaatcatcttctgaatctgaggaatcaccggagagaataaacagcacagtaggtacaccatcatcaagagctgcttcacggtctttgcttgaagcatgtgcaggaaatggtttcagagaataccaacccaagacaacccgcccagctcacaatgacatgtttgggtacaatgtatcccctgtccaagaccagctgctgcattaccaaatcacgcatccacctcaacaaccgccaataacaatgggatttcatgaccgttcttgggctgcaccaacgaatggaaactttcaccatatacctccagagcctattcacaaggccgcaggcagctttagagccgtgcctctgtcactgccttttcaaaacggacatcggcaggttgctgagcatactcagagagacatgaatctagagaggcacccttcgaagttgactatgctgacaggcaaggatcccccagaagacaagaacaagtcgggactaaagtatctcccagaagacaagaacaaatcatgggaggcggatgcatccttctcgttgttccaattcaacttgccaatagcttcgcctgtaacaccatcatcgaaagataagagcggaaagttggctgcaaggacgccactggttgaggttcaacctcagctttgcttgagggaacaggcagatgtgaagcagtataacctcttctcctcgaaagataatggtatattttcgtttatgtagataaattaaaaactgtgacaaatctgttatccttcgtttctgctgtctcttgctgcacttcgtgaatgatttgtgttctccggagaaaaataaaggctgttggcattttcctcttgctgtctgtatcttcgtttacctttatgtttgttcccgtgtgcgctaaaagctagcaaactgtaatgctgctgactcttgattttttttatagaacacatagatttgtgttggttcatgattcgctcctgagaacacgttaaccgggaaatgaaaatac

SEQ ID NO: 81455 - DNA, 4044 bp, Zea Mays
ggccacaaacacccgcgctcgtcgctgtctcctcctcgccttttgccccgcatcgcgtctcgctgaaaccctctcggtcaccgccgctgtcgatcagacccggctgtagctcagggaccccgtcgctgcagtatcctccgagggtcgttggcgggggagtcgtcgtcgtcgtatttggctgccggaattcgatgcgccacggagcgggcgagaggacctagttgagttgaatacggcagcgacgggaggacgtgatgccgggggtggcgtccgcagcgggatcggggatctggtcgcgccggcgggacgagatcacgttcgatcgccttcagaagttctggaatgacttgcttcctcaagcacggcaggaactcctcaaattagataagcaaactctcattgaacaagcacgcaagaatttctactgctcaaggtgcaatgggttgcttctggaaagttttgcacaaattgttatctatgggaagtcactgcagcaagaagcttcagatattggtcatctgaggacagctattgaattaagaattacacatggagagcaagatggcgctcaggacccatcaatccatccctggggaggcctttcaaccacaaaagatggcttccttacgcttcttgactgctttataaaagcaaaatcattacgggtgcttcagaatgtctttgacaatgcacgggcaagagaaagggaacgggaaatgctttatcctgatgcctgtggtgcaggtggcagaggatggatcagccaagggatggctaactataggggtcatggaataagagaaatgtgtgctctacacactgcccacctttcatgtactacactggtggatttctggtcagcgcttggtgaaggaactagatcatctcttctgcggatgaaggaggaagatttcattgaaaaacttatgtacaggtttgatagtaagagattttgccgagagtgtcgaaggaatgttatccgtgaattcaaggatctgaaggaactgaagcgcatgcaaagggaacctcgctgcaccagttggttttgtgttgcagatactgcttttaagtgtgaggtgtttgaggatgctgtcgtaattgattggcaccagtgcttatcagagccagatgaatcttatgaccactttgaatgggctattgggacagatgaaggagaatccgatatttttggctttgaaaatgttggaatgaatgcacaagtccacagaaatggaatcgatcttgatcagtttgaggactacttcataacgttgcgagcttggaggcttgatggccagtgcacagagctgtgtgtaaaagcacatgcattgaagggtcaatcatgtgctcaccacaggctagtggtgggtgatggctttgtgactatgacaaagggtgaaagtattagaaatttctttgagcatgctgaagaggccgaggaagaggatgaagacgatgccatggacagggatggaaatgattttgatggtgatgatgcccattcacagaagcatgccaagagccctgaactggcaagagaatttcttttggatgctgctgctgtgatattcaaagaacagattgagaaggccttcagggaaggtacagcacagcaaaatgcacgtagtgtttttgtgacccttgctttaaaacttttggaacagcgagttcatgtagcatgcaaagaaataattacgttggaaaaacagttgaatttattgcagaacaaacttcttgaagaagaggagaaagaaaagcgtgaagaacatgagcgcgggatgaagaggagaacaagagagagagaaaagaagaacagaagaaaagaaaggctgaaagaaaaggatcatagtaaaggaaaaagactagttgaatcaaagtcaccagacaatatttcatcttcagctccaagcaactccacagcatctatcaatgattattcgacaaatactctggactcaagagattcaggtacggaagaggaatatagtgctgaaggtgtgaatctgtgcactcctgacagctgtgtgaatcaatcttcatgtaaaaaaattaatggagaaaacagtgtccactgcaatgcagtgacagaattttctccaatggacaacagtgacatttctacatcagatcaacccaagtctttgagacgaagtccaagatcaagagattattttcctcaagatcagtcatgttggtatgatgactgcggagatgagtctggaagaattggtgaattacgatggaagtcaagggaaaagacaagaggtactgatagaagttgcaacacagcatccacctcaaataacaagacaagagagaggcactcatacaatttttgcagctgtggccatccagaagactatggagttatggacagctgtttcttgccaacagttagatctgtcagagagatgaagatagcaagaaaatcaggagttgagaaacctaaggtgcagtacaacagatgctatacattggatagctttatagtgccaaaaggaaaccatgctggttgtacacagaaaaatgctatcccaaagcaagtatgggagcctatggatgctcgaaggaagactaacttacacaacacagttcatgattcaggttcaattaacgatgttgatccactgaaacatgtggtttttgataacagcggatctcataagttcagtgtaagatgtgaatcacagcctcaggcttctgaaagttccagggatgtttgtaattcagatcaaagatgtgcaaatggtgggagaaatcaaactacttcctgtgctagtactcttatggtaaataaacaaaattgttactcagaaaatgatgaaggctccaggcatgatgtagagctgatgacgaactctgctagttctgatagcacctcgtcatgcatgagccagggagatagggaaagcagctccagcagtacaacctcttcgagcgctcaaaatccggaatcatcttctgaatctgaggaatcaccggagagaataaacagcacagtaggtacaccatcatcaagagctgcttcacggtctttgcttgaagcatgtgcaggaaatggtttcagagaataccaacccaagacaacccgcccagctcacaatgacatgtttgggtacaatgtatcccctgtccaagaccagctgctgcattaccaaatcacgcatccacctcaacaaccgccaataacaatgggatttcatgaccgttcttgggctgcaccaacgaatggaaactttcagtatgctcgaccatcccacttatattctagtccgctcgtattcggagtacctggaaatcattttattgattatccttacatggctcctgccttcagccatatacctccagagcctattcacaaggccgcaggcagctttagagccgtgcctctgtcactgccttttcaaaacggacatcggcaggttgctgagcatactcagagagacatgaatctagagaggcacccttcgaagttgactatgctgacaggcaaggatcccccagaagacaagaacaagtcgggactaaagtatctcccagaagacaagaacaaatcatgggaggcggatgcatccttctcgttgttccaattcaacttgccaatagcttcgcctgtaacaccatcatcgaaagataagagcggaaagttggctgcaaggacgccactggttgaggttcaacctcagctttgcttgagggaacaggcagatgtgaagcagtataacctcttctcctcgaaagataatggtatattttcgtttatgtagataaattaaaaactgtgacaaatctgttatccttcgtttctgctgtctcttgctgcacttcgtgaatgatttgtgttctccggagaaaaataaaggctgttggcattttcctcttgctgtctgtatcttcgtttacctttatgtttgttcccgtgtgcgctaaaagctagcaaactgtaatgctgctgactcttgattttttttatagaacacatagatttgtgttggttcatgattcgctcctgagaacacgttaaccgggaaatgaaaatac

SEQ ID NO: 81456 - DNA, 4145 bp, Zea Mays
ggccacaaacacccgcgctcgtcgctgtctcctcctcgccttttgccccgcatcgcgtctcgctgaaaccctctcggtcaccgccgctgtcgatcagacccggctgtagctcagggaccccgtcgctgcagtatcctccgagggtcgttggcgggggagtcgtcgtcgtcgtatttggctgccggaattcgatgcgccacggagcgggcgagaggacctagttgagttgaatacggcagcgacgggaggacgtgatgccgggggtggcgtccgcagcgggatcggggatctggtcgcgccggcgggacgagatcacgttcgatcgccttcagaaggtatagctgctagtagaatcatactggacaaaactggtgattgcactcaaataattaaaacaagttttcgcccattccattttggtactgtcacatgttctgtaatcttcttcaagttctggaatgacttgcttcctcaagcacggcaggaactcctcaaattagataagcaaactctcattgaacaagcacgcaagaatttctactgctcaaggtgcaatgggttgcttctggaaagttttgcacaaattgttatctatgggaagtcactgcagcaagaagcttcagatattggtcatctgaggacagctattgaattaagaattacacatggagagcaagatggcgctcaggacccatcaatccatccctggggaggcctttcaaccacaaaagatggcttccttacgcttcttgactgctttataaaagcaaaatcattacgggtgcttcagaatgtctttgacaatgcacgggcaagagaaagggaacgggaaatgctttatcctgatgcctgtggtgcaggtggcagaggatggatcagccaagggatggctaactataggggtcatggaataagagaaatgtgtgctctacacactgcccacctttcatgtactacactggtggatttctggtcagcgcttggtgaaggaactagatcatctcttctgcggatgaaggaggaagatttcattgaaaaacttatgtacaggtttgatagtaagagattttgccgagagtgtcgaaggaatgttatccgtgaattcaaggatctgaaggaactgaagcgcatgcaaagggaacctcgctgcaccagttggttttgtgttgcagatactgcttttaagtgtgaggtgtttgaggatgctgtcgtaattgattggcaccagtgcttatcagagccagatgaatcttatgaccactttgaatgggctattgggacagatgaaggagaatccgatatttttggctttgaaaatgttggaatgaatgcacaagtccacagaaatggaatcgatcttgatcagtttgaggactacttcataacgttgcgagcttggaggcttgatggccagtgcacagagctgtgtgtaaaagcacatgcattgaagggtcaatcatgtgctcaccacaggctagtggtgggtgatggctttgtgactatgacaaagggtgaaagtattagaaatttctttgagcatgctgaagaggccgaggaagaggatgaagacgatgccatggacagggatggaaatgattttgatggtgatgatgcccattcacagaagcatgccaagagccctgaactggcaagagaatttcttttggatgctgctgctgtgatattcaaagaacagattgagaaggccttcagggaaggtacagcacagcaaaatgcacgtagtgtttttgtgacccttgctttaaaacttttggaacagcgagttcatgtagcatgcaaagaaataattacgttggaaaaacagaacaaacttcttgaagaagaggagaaagaaaagcgtgaagaacatgagcgcgggatgaagaggagaacaagagagagagaaaagaagaacagaagaaaagaaaggctgaaagaaaaggatcatagtaaaggaaaaagactagttgaatcaaagtcaccagacaatatttcatcttcagctccaagcaactccacagcatctatcaatgattattcgacaaatactctggactcaagagattcaggtacggaagaggaatatagtgctgaaggtgtgaatctgtgcactcctgacagctgtgtgaatcaatcttcatgtaaaaaaattaatggagaaaacagtgtccactgcaatgcagtgacagaattttctccaatggacaacagtgacatttctacatcagatcaacccaagtctttgagacgaagtccaagatcaagagattattttcctcaagatcagtcatgttggtatgatgactgcggagatgagtctggaagaattggtgaattacgatggaagtcaagggaaaagacaagaggtactgatagaagttgcaacacagcatccacctcaaataacaagacaagagagaggcactcatacaatttttgcagctgtggccatccagaagactatggagttatggacagctgtttcttgccaacagttagatctgtcagagagatgaagatagcaagaaaatcaggagttgagaaacctaaggtgcagtacaacagatgctatacattggatagctttatagtgccaaaaggaaaccatgctggttgtacacagaaaaatgctatcccaaagcaagtatgggagcctatggatgctcgaaggaagactaacttacacaacacagttcatgattcaggttcaattaacgatgttgatccactgaaacatgtggtttttgataacagcggatctcataagttcagtgtaagatgtgaatcacagcctcaggcttctgaaagttccagggatgtttgtaattcagatcaaagatgtgcaaatggtgggagaaatcaaactacttcctgtgctagtactcttatggtaaataaacaaaattgttactcagaaaatgatgaaggctccaggcatgatgtagagctgatgacgaactctgctagttctgatagcacctcgtcatgcatgagccagggagatagggaaagcagctccagcagtacaacctcttcgagcgctcaaaatccggaatcatcttctgaatctgaggaatcaccggagagaataaacagcacagtaggtacaccatcatcaagagctgcttcacggtctttgcttgaagcatgtgcaggaaatggtttcagagaataccaacccaagacaacccgcccagctcacaatgacatgtttgggtacaatgtatcccctgtccaagaccagctgctgcattaccaaatcacgcatccacctcaacaaccgccaataacaatgggatttcatgaccgttcttgggctgcaccaacgaatggaaactttcagtatgctcgaccatcccacttatattctagtccgctcgtattcggagtacctggaaatcattttattgattatccttacatggctcctgccttcagccatatacctccagagcctattcacaaggccgcaggcagctttagagccgtgcctctgtcactgccttttcaaaacggacatcggcaggttgctgagcatactcagagagacatgaatctagagaggcacccttcgaagttgactatgctgacaggcaaggatcccccagaagacaagaacaagtcgggactaaagtatctcccagaagacaagaacaaatcatgggaggcggatgcatccttctcgttgttccaattcaacttgccaatagcttcgcctgtaacaccatcatcgaaagataagagcggaaagttggctgcaaggacgccactggttgaggttcaacctcagctttgcttgagggaacaggcagatgtgaagcagtataacctcttctcctcgaaagataatggtatattttcgtttatgtagataaattaaaaactgtgacaaatctgttatccttcgtttctgctgtctcttgctgcacttcgtgaatgatttgtgttctccggagaaaaataaaggctgttggcattttcctcttgctgtctgtatcttcgtttacctttatgtttgttcccgtgtgcgctaaaagctagcaaactgtaatgctgctgactcttgattttttttatagaacacatagatttgtgttggttcatgattcgctcctgagaacacgttaaccgggaaatgaaaatac

SEQ ID NO: 81457 - DNA, 3854 bp, Zea Mays
ggccacaaacacccgcgctcgtcgctgtctcctcctcgccttttgccccgcatcgcgtctcgctgaaaccctctcggtcaccgccgctgtcgatcagacccggctgtagctcagggaccccgtcgctgcagtatcctccgagggtcgttggcgggggagtcgtcgtcgtcgtatttggctgccggaattcgatgcgccacggagcgggcgagaggacctagttgagttgaatacggcagcgacgggaggacgtgatgccgggggtggcgtccgcagcgggatcggggatctggtcgcgccggcgggacgagatcacgttcgatcgccttcagaagttctggaatgacttgcttcctcaagcacggcaggaactcctcaaattagataagcaaactctcattgaacaagcacgcaagaatttctactgctcaaggtgcaatgggttgcttctggaaagttttgcacaaattgttatctatgggaagtcactgcagcaagaagcttcagatattggtcatctgaggacagctattgaattaagaattacacatggagagcaagatggcgctcaggacccatcaatccatccctggggaggcctttcaaccacaaaagatggcttccttacgcttcttgactgctttataaaagcaaaatcattacgggtgcttcagaatgtctttgacaatgcacgggcaagagaaagggaacgggaaatgctttatcctgatgcctgtggtgcaggtggcagaggatggatcagccaagggatggctaactataggggtcatggaataagagaaatgtgtgctctacacactgcccacctttcatgtactacactggtggatttctggtcagcgcttggtgaaggaactagatcatctcttctgcggatgaaggaggaagatttcattgaaaaacttatgtacaggtttgatagtaagagattttgccgagagtgtcgaaggaatgttatccgtgaattcaaggatctgaaggaactgaagcgcatgcaaagggaacctcgctgcaccagttggttttgtgttgcagatactgcttttaagtgtgaggtgtttgaggatgctgtcgtaattgattggcaccagtgcttatcagagccagatgaatcttatgaccactttgaatgggctattgggacagatgaaggagaatccgatatttttggctttgaaaatgttggaatgaatgcacaagtccacagaaatggaatcgatcttgatcagtttgaggactacttcataacgttgcgagcttggaggcttgatggccagtgcacagagctgtgtgtaaaagcacatgcattgaagggtcaatcatgtgctcaccacaggctagtggaagacgatgccatggacagggatggaaatgattttgatggtgatgatgcccattcacagaagcatgccaagagccctgaactggcaagagaatttcttttggatgctgctgctgtgatattcaaagaacagattgagaaggccttcagggaaggtacagcacagcaaaatgcacgtagtgtttttgtgacccttgctttaaaacttttggaacagcgagttcatgtagcatgcaaagaaataattacgttggaaaaacagaacaaacttcttgaagaagaggagaaagaaaagcgtgaagaacatgagcgcgggatgaagaggagaacaagagagagagaaaagaagaacagaagaaaagaaaggctgaaagaaaaggatcatagtaaaggaaaaagactagttgaatcaaagtcaccagacaatatttcatcttcagctccaagcaactccacagcatctatcaatgattattcgacaaatactctggactcaagagattcaggtacggaagaggaatatagtgctgaaggtgtgaatctgtgcactcctgacagctgtgtgaatcaatcttcatgtaaaaaaattaatggagaaaacagtgtccactgcaatgcagtgacagaattttctccaatggacaacagtgacatttctacatcagatcaacccaagtctttgagacgaagtccaagatcaagagattattttcctcaagatcagtcatgttggtatgatgactgcggagatgagtctggaagaattggtgaattacgatggaagtcaagggaaaagacaagaggtactgatagaagttgcaacacagcatccacctcaaataacaagacaagagagaggcactcatacaatttttgcagctgtggccatccagaagactatggagttatggacagctgtttcttgccaacagttagatctgtcagagagatgaagatagcaagaaaatcaggagttgagaaacctaaggtgcagtacaacagatgctatacattggatagctttatagtgccaaaaggaaaccatgctggttgtacacagaaaaatgctatcccaaagcaagtatgggagcctatggatgctcgaaggaagactaacttacacaacacagttcatgattcaggttcaattaacgatgttgatccactgaaacatgtggtttttgataacagcggatctcataagttcagtgtaagatgtgaatcacagcctcaggcttctgaaagttccagggatgtttgtaattcagatcaaagatgtgcaaatggtgggagaaatcaaactacttcctgtgctagtactcttatggtaaataaacaaaattgttactcagaaaatgatgaaggctccaggcatgatgtagagctgatgacgaactctgctagttctgatagcacctcgtcatgcatgagccagggagatagggaaagcagctccagcagtacaacctcttcgagcgctcaaaatccggaatcatcttctgaatctgaggaatcaccggagagaataaacagcacagtaggtacaccatcatcaagagctgcttcacggtctttgcttgaagcatgtgcaggaaatggtttcagagaataccaacccaagacaacccgcccagctcacaatgacatgtttgggtacaatgtatcccctgtccaagaccagctgctgcattaccaaatcacgcatccacctcaacaaccgccaataacaatgggatttcatgaccgttcttgggctgcaccaacgaatggaaactttcagtatgctcgaccatcccacttatattctagtccgctcgtattcggagtacctggaaatcattttattgattatccttacatggctcctgccttcagccatatacctccagagcctattcacaaggccgcaggcacccttcgaagttgactatgctgacaggcaaggatcccccagaagacaagaacaagtcgggactaaagtatctcccagaagacaagaacaaatcatgggaggcggatgcatccttctcgttgttccaattcaacttgccaatagcttcgcctgtaacaccatcatcgaaagataagagcggaaagttggctgcaaggacgccactggttgaggttcaacctcagctttgcttgagggaacaggcagatgtgaagcagtataacctcttctcctcgaaagataatggtatattttcgtttatgtagataaattaaaaactgtgacaaatctgttatccttcgtttctgctgtctcttgctgcacttcgtgaatgatttgtgttctccggagaaaaataaaggctgttggcattttcctcttgctgtctgtatcttcgtttacctttatgtttgttcccgtgtgcgctaaaagctagcaaactgtaatgctgctgactcttgattttttttatagaacacatagatttgtgttggttcatgattcgctcctgagaacacgttaaccgggaaatgaaaatac

SEQ ID NO: 81458 - DNA, 3592 bp, Zea Mays
gattgcactcaaataattaaaacaagttttcgcccattccattttggtactgtcacatgttctgtaatcttcttcaagttctggaatgacttgcttcctcaagcacggcaggaactcctcaaattagataagcaaactctcattgaacaagcacgcaagaatttctactgctcaaggtgcaatgggttgcttctggaaagttttgcacaaattgttatctatgggaagtcactgcagcaagaagcttcagatattggtcatctgaggacagctattgaattaagaattacacatggagagcaagatggcgctcaggacccatcaatccatccctggggaggcctttcaaccacaaaagatggcttccttacgcttcttgactgctttataaaagcaaaatcattacgggtgcttcagaatgtctttgacaatgcacgggcaagagaaagggaacgggaaatgctttatcctgatgcctgtggtgcaggtggcagaggatggatcagccaagggatggctaactataggggtcatggaataagagaaatgtgtgctctacacactgcccacctttcatgtactacactggtggatttctggtcagcgcttggtgaaggaactagatcatctcttctgcggatgaaggaggaagatttcattgaaaaacttatgtacaggtttgatagtaagagattttgccgagagtgtcgaaggaatgttatccgtgaattcaaggatctgaaggaactgaagcgcatgcaaagggaacctcgctgcaccagttggttttgtgttgcagatactgcttttaagtgtgaggtgtttgaggatgctgtcgtaattgattggcaccagtgcttatcagagccagatgaatcttatgaccactttgaatgggctattgggacagatgaaggagaatccgatatttttggctttgaaaatgttggaatgaatgcacaagtccacagaaatggaatcgatcttgatcagtttgaggactacttcataacgttgcgagcttggaggcttgatggccagtgcacagagctgtgtgtaaaagcacatgcattgaagggtcaatcatgtgctcaccacaggctagtggaagacgatgccatggacagggatggaaatgattttgatggtgatgatgcccattcacagaagcatgccaagagccctgaactggcaagagaatttcttttggatgctgctgctgtgatattcaaagaacagattgagaaggccttcagggaaggtacagcacagcaaaatgcacgtagtgtttttgtgacccttgctttaaaacttttggaacagcgagttcatgtagcatgcaaagaaataattacgttggaaaaacagaacaaacttcttgaagaagaggagaaagaaaagcgtgaagaacatgagcgcgggatgaagaggagaacaagagagagagaaaagaagaacagaagaaaagaaaggctgaaagaaaaggatcatagtaaaggaaaaagactagttgaatcaaagtcaccagacaatatttcatcttcagctccaagcaactccacagcatctatcaatgattattcgacaaatactctggactcaagagattcaggtacggaagaggaatatagtgctgaaggtgtgaatctgtgcactcctgacagctgtgtgaatcaatcttcatgtaaaaaaattaatggagaaaacagtgtccactgcaatgcagtgacagaattttctccaatggacaacagtgacatttctacatcagatcaacccaagtctttgagacgaagtccaagatcaagagattattttcctcaagatcagtcatgttggtatgatgactgcggagatgagtctggaagaattggtgaattacgatggaagtcaagggaaaagacaagaggtactgatagaagttgcaacacagcatccacctcaaataacaagacaagagagaggcactcatacaatttttgcagctgtggccatccagaagactatggagttatggacagctgtttcttgccaacagttagatctgtcagagagatgaagatagcaagaaaatcaggagttgagaaacctaaggtgcagtacaacagatgctatacattggatagctttatagtgccaaaaggaaaccatgctggttgtacacagaaaaatgctatcccaaagcaagtatgggagcctatggatgctcgaaggaagactaacttacacaacacagttcatgattcaggttcaattaacgatgttgatccactgaaacatgtggtttttgataacagcggatctcataagttcagtgtaagatgtgaatcacagcctcaggcttctgaaagttccagggatgtttgtaattcagatcaaagatgtgcaaatggtgggagaaatcaaactacttcctgtgctagtactcttatggtaaataaacaaaattgttactcagaaaatgatgaaggctccaggcatgatgtagagctgatgacgaactctgctagttctgatagcacctcgtcatgcatgagccagggagatagggaaagcagctccagcagtacaacctcttcgagcgctcaaaatccggaatcatcttctgaatctgaggaatcaccggagagaataaacagcacagtaggtacaccatcatcaagagctgcttcacggtctttgcttgaagcatgtgcaggaaatggtttcagagaataccaacccaagacaacccgcccagctcacaatgacatgtttgggtacaatgtatcccctgtccaagaccagctgctgcattaccaaatcacgcatccacctcaacaaccgccaataacaatgggatttcatgaccgttcttgggctgcaccaacgaatggaaactttcaccatatacctccagagcctattcacaaggccgcaggcagctttagagccgtgcctctgtcactgccttttcaaaacggacatcggcaggttgctgagcatactcagagagacatgaatctagagaggcacccttcgaagttgactatgctgacaggcaaggatcccccagaagacaagaacaagtcgggactaaagtatctcccagaagacaagaacaaatcatgggaggcggatgcatccttctcgttgttccaattcaacttgccaatagcttcgcctgtaacaccatcatcgaaagataagagcggaaagttggctgcaaggacgccactggttgaggttcaacctcagctttgcttgagggaacaggcagatgtgaagcagtataacctcttctcctcgaaagataatggtatattttcgtttatgtagataaattaaaaactgtgacaaatctgttatccttcgtttctgctgtctcttgctgcacttcgtgaatgatttgtgttctccggagaaaaataaaggctgttggcattttcctcttgctgtctgtatcttcgtttacctttatgtttgttcccgtgtgcgctaaaagctagcaaactgtaatgctgctgactcttgattttttttatagaacacatagatttgtgttggttcatgattcgctcctgagaacacgttaaccgggaaatgaaaatac

SEQ ID NO: 81459 - DNA, 3258 bp, Zea Mays
ctcgttctcactttctcagcctcgtccatgcttgccagctgtgcttcctgccgctcctctagtctccacaatccagtccttctccagtctgcccgctcattctgtcgaacacctcgtcctctacatcctcatcgacgtcttcccaattcaaaactcctaaaccctagcccttcttcccgacaccaccatccatccaaaatcactgggtgatgcggaagaggtagcctccgccgatggcctgctgcttcgtccgcgtcgctgcggcgccccgcctcctcatctaccgcgccgccgctccgcggcagctcccgtcgccgctcaacgtattcaggaagggtttttccgagcagtcagttctgccagtcacagattcgattgagtgtttccaaggaccatcagtgccgaatactccacggattccactgtatgatgacagcgtatcctcaagcatattggatacattgtcgaatccgactgggggtgtccctcatgctgatccttcaaagagcagaataatgctagttgatggaacgtcgatgatgtatagatcctactacaagatattagcacagctgcagcacggccagttggagcatgctgatggaaatggggattgggttttaactatattcaaagctctatccctgcttcttgacatgctggagttcattccatctcatgctgcggttgtgtttgaccacgatggagtcccatatggtcattatactgccatgccatctaaagaatgtcacatggcaaaaggtatgggtgtatgatgtctcaaagttgatgggaacatggtagaaggtaatctgtggctgtcaattagcatcttggggatgcatcagaggtcttggactgagcctcaatccactaattgtgtttcatggcatggagccctggcttgcacataagcaatgttctattatacatttatacttcattccttggtcaagaaagtgttgggtagagagaagtagaaatggtataggagtgttgggtaaccagttttagaatatgcaatataggctttgtaaaaaaacttgacctgcgggggtaagaccgcccccacggtattatattaagaagaccttctcacgcaggtcgagaaaacccccgaaccctgccccacccatacatagcggcaccgtagcccatgtgagaacgaccacaaccgtggccgagccttagacttgtgctttggcgtgggacaaacgaggtgatttatttaaccacagccgggaaattcgctcccacggggagtcgaacccaggacctgaggagtgctactcaaaccacctagccaactcggctagaggccctttagcactgcctacttttattttctaagaattttatgtcacttagtttcttggttcttattatcttcctagctatactttacttaaaaatgtgtagtatattggaagcaacaaacatacgagtcatcaagggcatcttcgatgctccaacttgggaggtcttagagatactttgcttacacattggaaagagagcataccaacacttattcatttaggttttcattagccacttcttagaagatacctttgcttatggagggttgggtaccaattgattgttttcagctgttgtatcatgttactctcatcttttgaatcctataaagaaacattaccattttttctcccctttaggaatgacctttcgtcatatgttgtaccctgcttacaagagcaaccgcactccaacacctgacaccgttgttcagggcatgcaatacttgaaggcatccattaaggcaatgtcaataaaagtaattgaggttccaggcgttgaagctgatgatgttattggcaccctggccataaacagtgtttcggctggttacaaggtacggattgtctctcctgataaagacttcttccaaattttatcaccttctttgcgtctgctcaggattgctccacgtggatcagggatggtttcatttggagttgaagacttcgtcaagcgatatggaccattgaaaccctcgcagtttgtggatgttgttgcactttcaggagacaaagctgacaatatacctggagttgaggggattggagatattaatgcagtaaagctgatatctaagtttggttccttggataatctactgaaatccgtggacgaagttgaggatgaacgaattaaacaggctttgatttctcactcggaacaggcaatcctttgcaaaaacctggccacgctgcgttctgatcttcctcattatatggttcctttcaagacagccgaccttgtatttaagaagccacaggatgatggagagaaattcataaaactcttacgagcattggaagcatatgcagaaggaattttgtcaaggctgagagtttgggttcaaagcttggtgtcgtagtgctcaatactggcggcattgacttctgtggactcggcggccagctacactcacatcgcaacgcaaaatcaaattgttgctggcagaagtgcataaattgaaggtgccgatgcttaagcaaagcagctcagtgtttatacctcggaacttagctctgtagataagaaatgcacaacattgcccatgtattccgccttttttgagaggaaagctcgtggaatctatttgattttttttctctgtactaccaattacaaagggttgtaggtggagctgtggaggccagagcgggcaaccgtgtggcttaacattctaccacgcctagcactctagcaggtttcatgaagtctactacggtggtgaatcagatcgcacaactgttgtgttgtaggagcgagtatgtgctcgttttgtcgcacaaagatgttgtaaggctgagtccaatccttgtcgatcctgactgttgatgccggcggtcggtaccgagcaaactggctccaatgccggtcggtttgattggctggttggtgggcttgccaatcgatctgaggcctagtttgttttgtggtgattaaagtttagtgagtcacttttagtttctaaagaaacaaacatggtaactaaagtggtgtaactaaacttaagttctttagccacaagggagtgactaaaaggactaaagtaggatttctttcttagtgcatcacacatctactaattaataggagaaatgcagtcttattcgcgtcaaaccgtctcgtacaccagcacaaaccgtctcgtataataacaggactacaggagagcaacttcccctcgaaacgtcatgtacgaactacgaactaatggatgag

SEQ ID NO: 81460 - DNA, 1166 bp, Zea Mays
ctcagcctcgtccatgcttgccagctgtgcttcctgccgctcctctagtctccacaatccagtccttctccagtctgcccgctcattctgtcgaacacctcgtcctctacatcctcatcgacgtcttcccaattcaaaactcctaaaccctagcccttcttcccgacaccaccatccatccaaaatcactgggtgatgcggaagaggtagcctccgccgatggcctgctgcttcgtccgcgtcgctgcggcgccccgcctcctcatctaccgcgccgccgctccgcggcagctcccgtcgccgctcaacgtattcaggaagggtttttccgagcagtcagttctgccagtcacagattcgattgagtgtttccaaggaccatcagtgccgaatactccacggattccactgtatgatgacagcgtatcctcaagcatattggatacattgtcgaatccgactgggggtgtccctcatgctgatccttcaaagagcagaataatgctagttgatggaacgtcgatgatgtatagatcctactacaagatattagcacagctgcagcacggccagttggagcatgctgatggaaatggggattgggttttaactatattcaaagctctatccctgcttcttgacatgctggagttcattccatctcatgctgcggttgtgtttgaccacgatggagtcccatatggtcattatactgccatgccatctaaagaatgtcacatggcaaaaggaatgacctttcgtcatatgttgtaccctgcttacaagagcaaccgcactccaacacctgacaccgttgttcagggcatgcaatacttgaaggcatccattaaggcaatgtcaataaaagtaattgaggttccaggcgttgaagctgatgatgttattggcaccctggccataaacagtgtttcggctggttacaaggtacggattgtctctcctgataaagacttcttccaaattttatcaccttctttgcgtctgctcaggattgctccacgtggatcagggatggtttcatttggagttgaagacttcgtcaagcgatatggaccattgaaaccctcgcagtttgtggatgttgttgcactttcaggagacaaagctgacaatatacctgtaaaaaagaattatgtatagacggg

SEQ ID NO: 81461 - DNA, 3237 bp, Zea Mays
ccgctcctctagtctccacaatccagtccttctccagtctgcccgctcattctgtcgaacacctcgtcctctacatcctcatcgacgtcttcccaattcaaaactcctaaaccctagcccttcttcccgacaccaccatccatccaaaatcactgggtgatgcggaagaggtagcctccgccgatggcctgctgcttcgtccgcgtcgctgcggcgccccgcctcctcatctaccgcgccgccgctccgcggcagctcccgtcgccgctcaacgtattcaggaagggtttttccgagcagtcagttctgccagtcacagattcgattgagtgtttccaaggaccatcagtgccgaatactccacggattccactgtatgatgacagcgtatcctcaagcatattggatacattgtcgaatccgactgggggtgtccctcatgctgatccttcaaagagcagaataatgctagttgatggaacgtcgatgatgtatagatcctactacaagatattagcacagctgcagcacggccagttggagcatgctgatggaaatggggattgggttttaactatattcaaagctctatccctgcttcttgacatgctggagttcattccatctcatgctgcggttgtgtttgaccacgatggagtcccatatggtcattatactgccatgccatctaaagaatgtcacatggcaaaaggtatgggtgtatgatgtctcaaagttgatgggaacatggtagaaggtaatctgtggctgtcaattagcatcttggggatgcatcagaggtcttggactgagcctcaatccactaattgtgtttcatggcatggagccctggcttgcacataagcaatgttctattatacatttatacttcattccttggtcaagaaagtgttgggtagagagaagtagaaatggtataggagtgttgggtaaccagttttagaatatgcaatataggctttgtaaaaaaacttgacctgcgggggtaagaccgcccccacggtattatattaagaagaccttctcacgcaggtcgagaaaacccccgaaccctgccccacccatacatagcggcaccgtagcccatgtgagaacgaccacaaccgtggccgagccttagacttgtgctttggcgtgggacaaacgaggtgatttatttaaccacagccgggaaattcgctcccacggggagtcgaacccaggacctgaggagtgctactcaaaccacctagccaactcggctagaggccctttagcactgcctacttttattttctaagaattttatgtcacttagtttcttggttcttattatcttcctagctatactttacttaaaaatgtgtagtatattggaagcaacaaacatacgagtcatcaagggcatcttcgatgctccaacttgggaggtcttagagatactttgcttacacattggaaagagagcataccaacacttattcatttaggttttcattagccacttcttagaagatacctttgcttatggagggttgggtaccaattgattgttttcagctgttgtatcatgttactctcatcttttgaatcctataaagaaacattaccattttttctcccctttaggaatgacctttcgtcatatgttgtaccctgcttacaagagcaaccgcactccaacacctgacaccgttgttcagggcatgcaatacttgaaggcatccattaaggcaatgtcaataaaagtaattgaggttccaggcgttgaagctgatgatgttattggcaccctggccataaacagtgtttcggctggttacaaggattgctccacgtggatcagggatggtttcatttggagttgaagacttcgtcaagcgatatggaccattgaaaccctcgcagtttgtggatgttgttgcactttcaggagacaaagctgacaatatacctggagttgaggggattggagatattaatgcagtaaagctgatatctaagtttggttccttggataatctactgaaatccgtggacgaagttgaggatgaacgaattaaacaggctttgatttctcactcggaacaggcaatcctttgcaaaaacctggccacgctgcgttctgatcttcctcattatatggttcctttcaagacagccgaccttgtatttaagaagccacaggatgatggagagaaattcataaaactcttacgagcattggaagcatatgcagaaggttcctcagtaaatccaatcatcagaagagcagcctatctttggaacaaacttaaatcatgatgacactgatgttttcagcgttgaataaaaaggaattttgtcaaggctgagagtttgggttcaaagcttggtgtcgtagtgctcaatactggcggcattgacttctgtggactcggcggccagctacactcacatcgcaacgcaaaatcaaattgttgctggcagaagtgcataaattgaaggtgccgatgcttaagcaaagcagctcagtgtttatacctcggaacttagctctgtagataagaaatgcacaacattgcccatgtattccgccttttttgagaggaaagctcgtggaatctatttgattttttttctctgtactaccaattacaaagggttgtaggtggagctgtggaggccagagcgggcaaccgtgtggcttaacattctaccacgcctagcactctagcaggtttcatgaagtctactacggtggtgaatcagatcgcacaactgttgtgttgtaggagcgagtatgtgctcgttttgtcgcacaaagatgttgtaaggctgagtccaatccttgtcgatcctgactgttgatgccggcggtcggtaccgagcaaactggctccaatgccggtcggtttgattggctggttggtgggcttgccaatcgatctgaggcctagtttgttttgtggtgattaaagtttagtgagtcacttttagtttctaaagaaacaaacatggtaactaaagtggtgtaactaaacttaagttctttagccacaagggagtgactaaaaggactaaagtaggatttctttcttagtgcatcacacatctactaattaataggagaaatgcagtcttattcgcgtcaaaccgtctcgtacaccagcacaaaccgtctcgtataataacaggactacaggagagcaacttcccctcgaaacgtcatgtacgaactacgaactaatggatgag

SEQ ID NO: 81462 - DNA, 3309 bp, Zea Mays
ccgctcctctagtctccacaatccagtccttctccagtctgcccgctcattctgtcgaacacctcgtcctctacatcctcatcgacgtcttcccaattcaaaactcctaaaccctagcccttcttcccgacaccaccatccatccaaaatcactgggtgatgcggaagaggtagcctccgccgatggcctgctgcttcgtccgcgtcgctgcggcgccccgcctcctcatctaccgcgccgccgctccgcggcagctcccgtcgccgctcaacgtattcaggaagggtttttccgagcagtcagttctgccagtcacagattcgattgagtgtttccaaggaccatcagtgccgaatactccacggattccactgtatgatgacagcgtatcctcaagcatattggatacattgtcgaatccgactgggggtgtccctcatgctgatccttcaaagagcagaataatgctagttgatggaacgtcgatgatgtatagatcctactacaagatattagcacagctgcagcacggccagttggagcatgctgatggaaatggggattgggttttaactatattcaaagctctatccctgcttcttgacatgctggagttcattccatctcatgctgcggttgtgtttgaccacgatggagtcccatatggtcattatactgccatgccatctaaagaatgtcacatggcaaaaggtatgggtgtatgatgtctcaaagttgatgggaacatggtagaaggtaatctgtggctgtcaattagcatcttggggatgcatcagaggtcttggactgagcctcaatccactaattgtgtttcatggcatggagccctggcttgcacataagcaatgttctattatacatttatacttcattccttggtcaagaaagtgttgggtagagagaagtagaaatggtataggagtgttgggtaaccagttttagaatatgcaatataggctttgtaaaaaaacttgacctgcgggggtaagaccgcccccacggtattatattaagaagaccttctcacgcaggtcgagaaaacccccgaaccctgccccacccatacatagcggcaccgtagcccatgtgagaacgaccacaaccgtggccgagccttagacttgtgctttggcgtgggacaaacgaggtgatttatttaaccacagccgggaaattcgctcccacggggagtcgaacccaggacctgaggagtgctactcaaaccacctagccaactcggctagaggccctttagcactgcctacttttattttctaagaattttatgtcacttagtttcttggttcttattatcttcctagctatactttacttaaaaatgtgtagtatattggaagcaacaaacatacgagtcatcaagggcatcttcgatgctccaacttgggaggtcttagagatactttgcttacacattggaaagagagcataccaacacttattcatttaggttttcattagccacttcttagaagatacctttgcttatggagggttgggtaccaattgattgttttcagctgttgtatcatgttactctcatcttttgaatcctataaagaaacattaccattttttctcccctttaggaatgacctttcgtcatatgttgtaccctgcttacaagagcaaccgcactccaacacctgacaccgttgttcagggcatgcaatacttgaaggcatccattaaggcaatgtcaataaaagtaattgaggttccaggcgttgaagctgatgatgttattggcaccctggccataaacagtgtttcggctggttacaaggtacggattgtctctcctgataaagacttcttccaaattttatcaccttctttgcgtctgctcaggattgctccacgtggatcagggatggtttcatttggagttgaagacttcgtcaagcgatatggaccattgaaaccctcgcagtttgtggatgttgttgcactttcaggagacaaagctgacaatatacctggagttgaggggattggagatattaatgcagtaaagctgatatctaagtttggttccttggataatctactgaaatccgtggacgaagttgaggatgaacgaattaaacaggcaatgtgctttgatttctcactcggaacaggcaatcctttgcaaaaacctggccacgctgcgttctgatcttcctcattatatggttcctttcaagacagccgaccttgtatttaagaagccacaggatgatggagagaaattcataaaactcttacgagcattggaagcatatgcagaaggttcctcagtaaatccaatcatcagaagagcagcctatctttggaacaaacttaaatcatgatgacactgatgttttcagcgttgaataaaaaggaattttgtcaaggctgagagtttgggttcaaagcttggtgtcgtagtgctcaatactggcggcattgacttctgtggactcggcggccagctacactcacatcgcaacgcaaaatcaaattgttgctggcagaagtgcataaattgaaggtgccgatgcttaagcaaagcagctcagtgtttatacctcggaacttagctctgtagataagaaatgcacaacattgcccatgtattccgccttttttgagaggaaagctcgtggaatctatttgattttttttctctgtactaccaattacaaagggttgtaggtggagctgtggaggccagagcgggcaaccgtgtggcttaacattctaccacgcctagcactctagcaggtttcatgaagtctactacggtggtgaatcagatcgcacaactgttgtgttgtaggagcgagtatgtgctcgttttgtcgcacaaagatgttgtaaggctgagtccaatccttgtcgatcctgactgttgatgccggcggtcggtaccgagcaaactggctccaatgccggtcggtttgattggctggttggtgggcttgccaatcgatctgaggcctagtttgttttgtggtgattaaagtttagtgagtcacttttagtttctaaagaaacaaacatggtaactaaagtggtgtaactaaacttaagttctttagccacaagggagtgactaaaaggactaaagtaggatttctttcttagtgcatcacacatctactaattaataggagaaatgcagtcttattcgcgtcaaaccgtctcgtacaccagcacaaaccgtctcgtataataacaggactacaggagagcaacttcccctcgaaacgtcatgtacgaactacgaactaatggatgag

SEQ ID NO: 81463 - DNA, 1295 bp, Zea Mays
agcctcgggcactaggagttgaggggattggagatattaatgcagtaaagctgatatctaagtttggttccttggataatctactgaaatccgtggacgaagttgaggatgaacgaattaaacaggctttgatttctcactcggaacaggcaatcctttgcaaaaacctggccacgctgcgttctgatcttcctcattatatggttcctttcaagacagccgaccttgtatttaagaagccacaggatgatggagagaaattcataaaactcttacgagcattggaagcatatgcagaaggttcctcagtaaatccaatcatcagaagagcagcctatctttggaacaaacttaaatcatgatgacactgatgttttcagcgttgaataaaaaggaattttgtcaaggctgagagtttgggttcaaagcttggtgtcgtagtgctcaatactggcggcattgacttctgtggactcggcggccagctacactcacatcgcaacgcaaaatcaaattgttgctggcagaagtgcataaattgaaggtgccgatgcttaagcaaagcagctcagtgtttatacctcggaacttagctctgtagataagaaatgcacaacattgcccatgtattccgccttttttgagaggaaagctcgtggaatctatttgattttttttctctgtactaccaattacaaagggttgtaggtggagctgtggaggccagagcgggcaaccgtgtggcttaacattctaccacgcctagcactctagcaggtttcatgaagtctactacggtggtgaatcagatcgcacaactgttgtgttgtaggagcgagtatgtgctcgttttgtcgcacaaagatgttgtaaggctgagtccaatccttgtcgatcctgactgttgatgccggcggtcggtaccgagcaaactggctccaatgccggtcggtttgattggctggttggtgggcttgccaatcgatctgaggcctagtttgttttgtggtgattaaagtttagtgagtcacttttagtttctaaagaaacaaacatggtaactaaagtggtgtaactaaacttaagttctttagccacaagggagtgactaaaaggactaaagtaggatttctttcttagtgcatcacacatctactaattaataggagaaatgcagtcttattcgcgtcaaaccgtctcgtacaccagcacaaaccgtctcgtataataacaggactacaggagagcaacttcccctcgaaacgtcatgtacgaactacgaactaatggatgag

SEQ ID NO: 81464 - DNA, 1251 bp, Zea Mays
gttctttgcaaaaattgcaggggttccttggataatctactgaaatccgtggacgaagttgaggatgaacgaattaaacaggctttgatttctcactcggaacaggcaatcctttgcaaaaacctggccacgctgcgttctgatcttcctcattatatggttcctttcaagacagccgaccttgtatttaagaagccacaggatgatggagagaaattcataaaactcttacgagcattggaagcatatgcagaaggttcctcagtaaatccaatcatcagaagagcagcctatctttggaacaaacttaaatcatgatgacactgatgttttcagcgttgaataaaaaggaattttgtcaaggctgagagtttgggttcaaagcttggtgtcgtagtgctcaatactggcggcattgacttctgtggactcggcggccagctacactcacatcgcaacgcaaaatcaaattgttgctggcagaagtgcataaattgaaggtgccgatgcttaagcaaagcagctcagtgtttatacctcggaacttagctctgtagataagaaatgcacaacattgcccatgtattccgccttttttgagaggaaagctcgtggaatctatttgattttttttctctgtactaccaattacaaagggttgtaggtggagctgtggaggccagagcgggcaaccgtgtggcttaacattctaccacgcctagcactctagcaggtttcatgaagtctactacggtggtgaatcagatcgcacaactgttgtgttgtaggagcgagtatgtgctcgttttgtcgcacaaagatgttgtaaggctgagtccaatccttgtcgatcctgactgttgatgccggcggtcggtaccgagcaaactggctccaatgccggtcggtttgattggctggttggtgggcttgccaatcgatctgaggcctagtttgttttgtggtgattaaagtttagtgagtcacttttagtttctaaagaaacaaacatggtaactaaagtggtgtaactaaacttaagttctttagccacaagggagtgactaaaaggactaaagtaggatttctttcttagtgcatcacacatctactaattaataggagaaatgcagtcttattcgcgtcaaaccgtctcgtacaccagcacaaaccgtctcgtataataacaggactacaggagagcaacttcccctcgaaacgtcatgtacgaactacgaactaatggatgag

SEQ ID NO: 81465 - DNA, 1685 bp, Zea Mays
cctctgctaagtttcgtgcacccgctaaccctaggtttgctcgcgtaccctccccggtctatatgttgcctcggtctagaaatcgacgcgttcttctcgcttctcgtctacatctaagcatgcctacacctgcggtttccagatagggtgtttggtacgatcgagcaacggtgaatctcgctctgttatttgtttgttcgaaacgcgtggttttgtttttgagatgatgtgcaggttccgatctgattggtttgattgatgagtggcgaatcggattgaagcgagacgaggctgcatggtttccgtgctccgaggcttctgatctgcgtgtttgctccgagactattggtgcctgacccggcaaattgcaatctgccgaccttcagagccgggtcgttctggcgagatctagacgtcgaagggctattaaagcgtggctggatctctttctgcaccgcgcctctcgatgatgtctctgtgttgataattattggatgaaatttcgataattattagatctgagagatgttggtcggagcgatccgcgcctaaatggcaaggtaagttaaacacatgtaactacagagttgcgtgtgtgaagtcaaaagagggggaaagatactgagaagggaggaaaaaatatgaaagaagtgaggtgtgacatcttgaaggcctttgccattgtgggtgcgctcgcatggcaggccaccataataaagatgctggttttgtgtgctgggtgggagatcgcacggggagttttcatccctgggttctgccacccttttgtgtccctgtgccctgcttacgattcatcacggcgtgtttcaaatgaatggagctacagcgcaacacaaagatttggagctttacgatgaaatcatccttttgcaagcatgcaattgtcacacagacggaccccaaagaatattgaatatgtcataatcagtgggggccagaataaaatagaagattttgatgttgagtctacagagacgggattgaggagttgaggacaggacacatgagatccacttttatctcagatttctggtgactgcattctttgattgcaaaaaaatatctacagttttggttcaagaagaacaaaacaaagtaccaaatctgcatgctccaagagtgttagatagcagcaaagtctctaacaaaaatgaacagcggacaatgatccgactgatggctcaacgggacgcgacgaaaaaggctgcacgcaccgtgccagggatggagattgtcacgctgttcgtaccgtcgcacagtgttttcgcccatagacaacctacgcccaagcgttcgagacttcgggggtggatcccgagcttccgcttgctacggagcagagagccacgacaggggtggatcccgagcttccgcttgctgcggagcagagagccacggcagagcgagctcaacaagagggcccctatcatgccttttgatggaagctatcctccatattgtgctgctaatataacatctagatattttttactgtaagaaccctcagtgtagtctccaagcggtaagcaccactgcagtctgcagttaaaatgcgtgtttcctctacattggttctgcatttatttaagtttggcaatgttgtgctcaacaaatttggttaacatatcagcaacaataccgtttggaagacaatttctgctaat

SEQ ID NO: 81466 - DNA, 1595 bp, Zea Mays
cctaggtttgctcgcgtaccctccccggtctatatgttgcctcggtctagaaatcgacgcgttcttctcgcttctcgtctacatctaagcatgcctacacctgcggtttccagatagggtgtttggtacgatcgagcaacggtgaatctcgctctgttatttgtttgttcgaaacgcgtggttttgtttttgagatgatgtgcaggttccgatctgattggtttgattgatgagtggcgaatcggattgaagcgagacgaggctgcatggtttccgtgctccgaggcttctgatctgcgtgtttgctccgagactattggtgcctgacccggcaaattgcaatctgccgaccttcagagccgggtcgttctggcgagatctagacgtcgaagggctattaaagcgtggctggatctctttctgcaccgcgcctctcgatgatgtctctgtgttgataattattggatgaaatttcgataattattagatctgagagatgttggtcggagcgatccgcgcctaaatggcaaggtaagttaaacacatgtaactacagagttgcgtgtgtgaagtcaaaagagggggaaagatactgagaagggaggaaaaaatatgaaagaagtgaggtgtgacatcttgaaggcctttgccattgtgggtgcgctcgcatggcaggccaccataataaagatgctggttttgtgtgctgggtgggagatcgcacggggagttttcatccctgggttctgccacccttttgtgtccctgtgccctgcttacgattcatcacggcgtgtttcaaatgaatggagctacagcgcaacacaaagatttggagctttacgatgaaatcatccttttgcaagcatgcaattgtcacacagacggaccccaaagaatattgaatatgtcataatcagtgggggccagaataaaatagaagattttgatgttgagtctacagagacgggattgaggagttgaggacaggacacatgagttttggttcaagaagaacaaaacaaagtaccaaatctgcatgctccaagagtgttagatagcagcaaagtctctaacaaaaatgaacagcggacaatgatccgactgatggctcaacgggacgcgacgaaaaaggctgcacgcaccgtgccagggatggagattgtcacgctgttcgtaccgtcgcacagtgttttcgcccatagacaacctacgcccaagcgttcgagacttcgggggtggatcccgagcttccgcttgctacggagcagagagccacgacaggggtggatcccgagcttccgcttgctgcggagcagagagccacggcagagcgagctcaacaagagggcccctatcatgccttttgatggaagctatcctccatattgtgctgctaatataacatctagatattttttactgtaagaaccctcagtgtagtctccaagcggtaagcaccactgcagtctgcagttaaaatgcgtgtttcctctacattggttctgcatttatttaagtttggcaatgttgtgctcaacaaatttggttaacatatcagcaacaataccgtttggaagacaatttctgctaat

SEQ ID NO: 81467 - DNA, 3670 bp, Zea Mays
cctaggtttgctcgcgtaccctccccggtctatatgttgcctcggtctagaaatcgacgcgttcttctcgcttctcgtctacatctaagcatgcctacacctgcggtttccagatagggtgtttggtacgatcgagcaacggtgaatctcgctctgttatttgtttgttcgaaacgcgtggttttgtttttgagatgatgtgcaggttccgatctgattggtttgattgatgagtggcgaatcggattgaagcgagacgaggctgcatggtttccgtgctccgaggcttctgatctgcgtgtttgctccgagactattggtgcctgacccggcaaattgcaatctgccgaccttcagagccgggtcgttctggcgagatctagacgtcgaagggctattaaagcgtggctggatctctttctgcaccgcgcctctcgatgatgtctctgtgttgataattattggatgaaatttcgataattattagatctgagagatgttggtcggagcgatccgcgcctaaatggcaaggtaagttaaacacatgtaactacagagttgcgtgtgtgaagtcaaaagagggggaaagatactgagaagggaggaaaaaatatgaaagaagtgaggtgtgacatcttgaaggcctttgccattgtgggtgcgctcgcatggcaggccaccataataaagatgctggttttgtgtgctgggtgggagatcgcacggggagttttcatccctgggttctgccacccttttgtgtccctgtgccctgcttacgattcatcacggcgtgtttcaaatgaatggagctacagcgcaacacaaaggtacaactggatctaaattttcaattcaattgcaatttagaacgcatatatttatttaaatccatgtatgcacagctgcctgaagttactgaaatcatcatcaatcgttaaaaccgtacacgcctacactgctccttccatgctttttcattcacccaacgttgctctcccaaaggccataaaccactgacacatgagggaggtgttctctatagagtatcgacgacgataacgctgaactgcataaatttggttatatcatctgaaatatagaaatcgggtgcaaatgaaattagttactatttgttcattcaaactatgatgtctgaaaattcaggcaattacagattctcacacgagattatgaggttgtgatccaaatcgacaattatctgttgatttgttcaatgtcttatggctgatcctgttggagtttattgggtttggtccatttactcaacaacttttaaaggccccctctgtttctgaccttaccttgtgcgttgagttcataattgaatccatgaaatcgtggataccgtaaccgaactaaatccatggataccgtgactgagttagtttcagttttctatcttttgtgtctggttattatgagtaatttttctgtgtaaagacgattctctcctcgaaagatatgagaaataaccaacctgctatgtggtatggttttaggcaaaaggagcattcggtgttgtgtgattttaggctcctgtcaacactagtgtgacgacgaaaacagtctttgaaatcttactctgctgaagaacctgaagggttattgcttgtcgagttgtgatttgatgatctgtagtgttacgtcaatggacttgaacaatatcgtgaactcatatttgattgtttggagcaatctctgttgtgagtaataatgattttatcgcttttggttttgttagatacatttaagatagattttactcttatttgctatgcgtggtttatccattgtttatatagtggttgtcttagaaattactttaatccttaaaaaggtgtgcaatcttccaacacatcatgtggactcaaaattactctctagttgatttgtctaaatatactgcagctgttcttgttggtttgtcagctatcatcattcttccattattaattattatcaattaaggtttcacaaggtattatgaaagattgttctttcttagtttgtactctatccattctaaattataagtcattctaatattgtttgagccacaagtttgattaaagctatagagaaaattatgaagattcatatcaaatgtaaaatctaaattaataagaatctagtgacatttagtatcataaatgttattattttaatgtacaacttaggttagacttaatatttctttgactcctcaagaaagttggactgacttaccatttaggatggagtatgatttattattgtcttataaaagcctggatcggtatactctgaatatctgagtacctacatgatgagtatttgtaagatgtgtgaaggtcgactgctaggtatacattgtcagtatgaaatggctatcgtcttcagctttctttcctggtcagtggacagtgaaatatttatacgatgtgttaatgtggactgctctgtataaatcgttggtacaaaatggctatggtcttcagcttcatttcctggtcactggacagtgaactgctcaagcacacttagtagatactaggcacaatcagagcttatcgaacttgtgcgatatagttcgtttcagtactccatggttatgatgttattgatcactattgagctgaagcactacaatctgtgacaaaaaaatttgatacagcagcaaccaccgctgaagcttggcagaagggatgaaattaggaatacgaaacccattaggcctgtttggttgttcggtcgattatgtgtttatgttgattttgaatggattttaccaggtcaattcttatagaagcaagctcagaagctgaaaaaagctgaggcccaatatgccatagatgggagatctgttttctttttgttcccgggcaaatatgctttgctctagatttggagctttacgatgaaatcatccttttgcaagcatgcaattgtcacacagacggaccccaaagaatattgaatatgtcataatcagtgggggccagaataaaatagaagattttgatgttgagtctacagagacgggattgaggagttgaggacaggacacatgagttttggttcaagaagaacaaaacaaagtaccaaatctgcatgctccaagagtgttagatagcagcaaagtctctaacaaaaatgaacagcggacaatgatccgactgatggctcaacgggacgcgacgaaaaaggctgcacgcaccgtgccagggatggagattgtcacgctgttcgtaccgtcgcacagtgttttcgcccatagacaacctacgcccaagcgttcgagacttcgggggtggatcccgagcttccgcttgctacggagcagagagccacgacaggggtggatcccgagcttccgcttgctgcggagcagagagccacggcagagcgagctcaacaagagggcccctatcatgccttttgatggaagctatcctccatattgtgctgctaatataacatctagatattttttactgtaagaaccctcagtgtagtctccaagcggtaagcaccactgcagtctgcagttaaaatgcgtgtttcctctacattggttctgcatttatttaagtttggcaatgttgtgctcaacaaatttggttaacatatcagcaacaataccgtttggaagacaatttctgctaat

SEQ ID NO: 81468 - DNA, 2945 bp, Zea Mays
cctaggtttgctcgcgtaccctccccggtctatatgttgcctcggtctagaaatcgacgcgttcttctcgcttctcgtctacatctaagcatgcctacacctgcggtttccagatagggtgtttggtacgatcgagcaacggtgaatctcgctctgttatttgtttgttcgaaacgcgtggttttgtttttgagatgatgtgcaggttccgatctgattggtttgattgatgagtggcgaatcggattgaagcgagacgaggctgcatggtttccgtgctccgaggcttctgatctgcgtgtttgctccgagactattggtgcctgacccggcaaattgcaatctgccgaccttcagagccgggtcgttctggcgagatctagacgtcgaagggctattaaagcgtggctggatctctttctgcaccgcgcctctcgatgatgtctctgtgttgataattattggatgaaatttcgataattattagatctgagagatgttggtcggagcgatccgcgcctaaatggcaaggtaagttaaacacatgtaactacagagttgcgtgtgtgaagtcaaaagagggggaaagatactgagaagggaggaaaaaatatgaaagaagtgaggtgtgacatcttgaaggcctttgccattgtgggtgcgctcgcatggcaggccaccataataaagatgctggttttgtgtgctgggtgggagatcgcacggggagttttcatccctgggttctgccacccttttgtgtccctgtgccctgcttacgattcatcacggcgtgtttcaaatgaatggagctacagcgcaacacaaagatttggagctttacgatgaaatcatccttttgcaagcatgcaattgtcacacagacggaccccaaagaatattgaatatgtcataatcagtgggggccagaataaaatagaagattttgatgttgagtctacagagacgggattgaggagttgaggacaggacacatgagatttctggtgactgcattctttgattgcaaaaaaatatctacagttttggttcaagaagaacaaaacaaagtaccaaatctgcatgctccaagagtgttagatagcagcaaagtctctaacaaaaatgaacagcggacaatgatccgactgatggctcaacgggacgcgacgaaaaaggctgcacgcaccgtgccagggatggagattgtcacgctgttcgtaccgtcgcacagtgttttcgcccatagacaacctacgcccaagcgttcgagacttcgggggtggatcccgagcttccgcttgctacggagcagagagccacgacaggggtggatcccgagcttccgcttgctgcggagcagagagccacggcagagcgagctcaacaagagggcccctatcatgccttttgatggaagctatcctccatattgtgctgctaatataacatctagatattttttactgtaagaaccctcagtgtagtctccaagcgaacactggagatggctacctgaacttatgatgagaatcaagaatgtttgagtgcagtggagcatgattctctattttgtgctgtgacaactgtcaattatggtgaagcaaagttttctttagtaactcgtcttttggtcgatatattgtattgctaccataaacttgttaaaatattttacatgttgttaagaaatggattgtgttcatcaacctttttggtactcttagcctgttcagttcaaaaaccaatacacaaatttcctatattctctagcatttgtttactttgttagggaatggttgcctctcccaaacattattcgttctatatcaagctttagagttcaagttcacaaacagtcatgacgtatgcattggactgtcccattgatctaaaattcatactactctctgtttctgcttattatataaactgtctaatttactatacattagcttctatcttcggtcactatagggcgcccgacgggcccctcatgttctagttcactaaatggatcggaaactttgctgtctgaaggtatatatatgattattaataacacaatttttacttgtcttgttgctttctgaataccgctgatagcagccatttgttactgatactattcatcaaggcgcgtagaaaattgcttgtgcaatttgatttcgtatttgacagcacaattctatcttatataagaattaaattatttaaaaaatggttttagattttgatcagcgaagtgtagatacgctattagtcatgtatgtctcttaactgtggatcttgtctcaacacggtgaggttctctctggactgttcgttacagtcctggacggaaggtggttcgattccaccaagatcctgtagtccttatttaaataaatacacaagataatataccatcagaggtttgaggaattcagacacatgatgtgcttggaagaattcttagacgtgggttcttggatgttgaagtagattaaagaagaaaacttggagagctagaagcatgttgctcgtccaacaagacaaacaagataagtgcatcatttaaagacaacaatcaagaagacgattgaggtctcttcaagtgaagatgaatcaagcttcaaagttgaggacgagttagacttgttcatgacgaaattcaagaagcacttgaagaaggaagatcttcaattatcaagaagccattttctagacctgttgtatcagaatagtttgtgtgcatctattttggatgtgaacaatgttttttttctattgcaaaaaggtcctaagtattgttttctatttaagaaaaagaataagcttaaaagtaggggtagaaatagtctaaatattttctgaccgtatgattcatattcatttacaagagttcaactgtttcagtatgtttgtatcctgagtccagatattcaatattcgatactgaagac

SEQ ID NO: 81469 - DNA, 1323 bp, Zea Mays
cttttttgtgctttttgtgtgatggcccgtatatctccatctacttgttggttgagcttcgtcggtagccatatgggccgccgatcaaaccctttctttcaagaaaagataaagcaggggaaagccaaagccatgaccaaactttttcccttcgttcagcttcataggcatataaaatatgcagtgcagtgagctttgaagctgtgttagctttcaagggaatcaaatgcatgcacgggtcaggccgagaaggaattcaaggtggaggttgaagccatcggcaaagtgaggcacaagcaccttgtcggtctcatcgggtactgcgcagaaggccctaaacggatgctcctttacgagttcgtcgaaaacgggaacctggagcagtggctgcacggcgacgtcggtccggtcagccctttgacctgggaaatacggatgaagatcgccgtcggaacggccaaaggcatagcgtacctgcacgaaggcctggaaccgaaggtggtgcaccgcgacatcaagtcgagcaacatcctgctggacaagaagtggagccccagggtgtcggacttcggcatggccaaggtgctggggtccgggtccagctacgtgacgacccgcgtgatgggcacgttcgggtacgtggcccccgagtacgcgtccacgggcatgctgaacgagagcagcgacatctacagcttcggcgtgctgctcatggagctcatctccgggcgcagccccgtggactacaaccgccccgccggcgaggtcaacctggtggagtggttcaggggcatggtgggcagccggcgcgtggaggacctggtggacccgcgcatcgccgcgccgccgccgccgcgggtgctcaaccgggtgctgctcgtctgcctccgctgcatcgacgccgacgcgcacaagcggcccaagatggggcagatcgtgcacatgctcgagggcgacgagttccccttccgcacggagcaccgctcgccgagggcgtctcaccggacgtcgatggccacgcggccgtcgcttctgtcggagaacgtaggtgccactgacgactcagacaagtccatgtggagatgaaggatctaaccctgcacgaacacacctggcgcggcatgcgaggagccggagctggggcttgggggatggactgactttttctcaactggtgtaattttttgttgttgatccacggcgggatgagcgttctaatttgctatgctgctcgtttggtttgatggtgtttaccgtaatgtatgatttggcacagacgcacagatcttcttttttgttacataaaaatcaaaagataaaacg

SEQ ID NO: 81470 - DNA, 1576 bp, Zea Mays
gaagctgtgttagctttcaagggaatcaaatgcatgcacgggtcaggccgagaaggaattcaaggtggaggttgaagccatcggcaaagtgaggcacaagcaccttgtcggtctcatcgggtactgcgcagaaggccctaaacggatgctcctttacgagttcgtcgaaaacgggaacctggagcagtggctgcacggcgacgtcggtccggtcagccctttgacctgggaaatacggatgaagatcgccgtcggaacggccaaaggcatagcgtacctgcacgaaggcctggaaccgaaggtggtgcaccgcgacatcaagtcgagcaacatcctgctggacaagaagtggagccccagggtgtcggacttcggcatggccaaggtgctggggtccgggtccagctacgtgacgacccgcgtgatgggcacgttcgggtacgtggcccccgagtacgcgtccacgggcatgctgaacgagagcagcgacatctacagcttcggcgtgctgctcatggagctcatctccgggcgcagccccgtggactacaaccgccccgccggcgaggtcaacctggtggagtggttcaggggcatggtgggcagccggcgcgtggaggacctggtggacccgcgcatcgccgcgccgccgccgccgcgggtgctcaaccgggtgctgctcgtctgcctccgctgcatcgacgccgacgcgcacaagcggcccaagatggggcagatcgtgcacatgctcgagggcgacgagttccccttccgcacggagcaccgctcgccgagggcgtctcaccggacgtcgatggccacgcggccgtcgcttctgtcggagaacgtaggtgccactgacgactcagacaagtccatgtggagatgaaggatctaaccctgcacgaacacacctggcgcggcatgcgaggagccggagctggggcttgggggatggactgactttttctcaactggtgtaattttttgttgttgatccacggcgggatgagcgttctaatttgctatgctgctcgtttggtttgatggtgtttaccgtaatgtatgatttggcacagacgcacagatcttcttttttgttgttcattattactaggctttggcgaccccgcgaagctttcttcgaccggcgccgctcccttggccacatgctcggatagtcggatactcgaatcgcatccgggacgacgagagatcccggtgaacaggaagggcggaaccagggacagagccctaaaaaaatcactatagtatctacattattatgtgtacactaaaaatcttaggtaagactttcgtggagttttataggctcgacagcgatagcaggtgctcgagcctcgtccgctccactgctgcctctaccctaggcggaacaacaatgtactgtttggtttagcaaggcatattcatttagatatacactaatataaaaataatacaccctttgtaccaaaataaaatgtgtttttgttttttagtgggtttatataatacttggtggtgtatatattttatatattgaatatagacataaaaatcaaaagataaaacg

SEQ ID NO: 81471 - DNA, 775 bp, Zea Mays
agtaaatcttatgctaatgggacagctggtgtgcaaatgctagcaatgaatggaaaaaagttaattgggaacaaaaatggtctacaagcatttggccacactatactttgtttttgtctttgatagctctgagaacgagcttgccatgctcgacctcgtacaagtgtttgttgaaacattggacagatgcttcaagaatgtatgcgagcttgacatcgtatttaacttcaacaagctgcacaccattttggatgagatgatatcggggggacaggtgatcgaaacaagttcagaacagataatgaaatctgtggaagagattgaaaggctggagaaacaatcgagcacaaccagcttcatacccaagtcgattacagagcgttttacccgttgagcttccactcgtttccagaacaatgtgacatttaaggtgtgaacagaactgagatatactattcagtctcattttagttctccgataagaccttgtatgcccccgccccccggctgtattctgtaagcctgtaacctggatatgaatgcggcatctgcagtccaataatactgcctgcgttatatgcttgatcgtctgacagtgctcgctaaggtttagacatgccccagtaacaaattagcaatattcttatcctgagaactagtgtatccatggtgtccgagaaagaactagtgtatccatggtgaccagaatagaactcttcggaattaactaccatccttggggcatggtgctatcatcctgagaactattttggtc

SEQ ID NO: 81472 - DNA, 738 bp, Zea Mays
catttgtctccttgtgctaactccccaatgggaacaaaaatggtctacaagcatttggccacactatactttgtttttgtctttgatagctctgagaacgagcttgccatgctcgacctcgtacaagtgtttgttgaaacattggacagatgcttcaagaatgtatgcgagcttgacatcgtatttaacttcaacaagctgcacaccattttggatgagatgatatcggggggacaggtgatcgaaacaagttcagaacagataatgaaatctgtggaagagattgaaaggctggagaaacaatcgagcacaaccagcttcatacccaagtcgattacagagcgttttacccgttgagcttccactcgtttccagaacaatgtgacatttaaggtgtgaacagaactgagatatactattcagtctcattttagttctccgataagaccttgtatgcccccgccccccggctgtattctgtaagcctgtaacctggatatgaatgcggcatctgcagtccaataatactgcctgcgttatatgcttgatcgtctgacagtgctcgctaaggtttagacatgccccagtaacaaattagcaatattcttatcctgagaactagtgtatccatggtgtccgagaaagaactagtgtatccatggtgaccagaatagaactcttcggaattaactaccatccttggggcatggtgctatcatcctgagaactattttggtc

SEQ ID NO: 81473 - DNA, 845 bp, Zea Mays
atcctcacctaatgccacaacaacagctctactgaacattaccgctcatcatcaggtatacagagagatcgaagaaagagagagagagacctatacagagatggcctccggcggtggctccaagcagctgaaggctagtcttctcatggtggtagcagctctgctcctcctcatctgcacctgcactaccagggggcaagcggcaaggccggagccaggatccgagggccacacgccacagcagctgaagagtggctcatcagtggccgtggtggaaatgcgtcgagaagatccggatcaggcggcgagagaatgtgaggacgacgacggagacgacgaacaggagtgcctgatgaggaggacgttgctcgctcacaccgactacatctacacccaggggaagcacaactagctagtcactgctcactagcctgtgctgctggctcatgctcatgtcatgtcgaggaaacaagttcaagggacaaaaacaaaacaaaaaagctcgcatggttcacgagctagcctagccaacctgaagttctacagtgccgtacgtcaactgtgtggattgttttaaaatatatacctagtctttttctttctgcagttctgctagctgtggattattttcatatatatatatatacctcgctaattaccccctgtgatttcccatcggctttctcgagatcatgtacaatatactatctatccatatagatatcatggattagaccttactcttggcctgagaagctaaatggaacttctagaatgttaacgtctctactcgctctgtaaatactactgaatctatgtgtactggttggtatatatgcttcctt

SEQ ID NO: 81474 - DNA, 704 bp, Zea Mays
gttttctcgttcatccaaaaattagtttgcagctgcatcccaatcagctcgaatggactggtcttcatttaccaagggttacttcttgaacagagataccttggttggcgtacttcttcttattgatgccagtattccaccacagaaaattgatctagactgtgctaactggctcggtcgtaacaatattggattgacgtttgtgttcaccaagtgcgacaaagtgaagaaaggtaaaggagggcggcctgacgagaacatcaaggagttccatgaaacgatcagcgggctttatccagatccacccccatggatcatgacaagcagcgttaccggattaggccgcgacgggctactcctccatatgtcgcagctgaggaactactgggataatgaagcagtctaggtagagctacatagatcaagtgccactagcaacggtagcagtacgtgtatgggaacagtcatatggcctaaactttcatcgatagatgtcgcttctcatggggcttcttgttcagttttgcttccgtttttttttttttggccttttgatgtatagttgaaatgcagttgctcctagtttctgtttcactcaccctgtacaatgcccagtctcagcgggagcttcatgacattgttactaagattcacaggtattgaagacagtacaaacaagttacatcctcgtaaaacttatgaaa

SEQ ID NO: 81475 - DNA, 138 bp, Zea Mays
cgtcgcgccacctctgtcacataacacgaaaccattcttctataccaaacaacagatagagcactagagctggtgtcagagaggcaaacacaaatggcgttccacagaacaatggcacggtgcctatgggcaggcaag

SEQ ID NO: 81476 - DNA, 2477 bp, Zea Mays
cccagccttccccaattccggccacacccgctacgcctgtggtgccgcctgccgcctccccttcctcttcgcttcccgtgcaagcttcaccgccgccatctcgtcctctcgttgcgatgcttccctttccgcgccgcggttcctctatccccgccttccctgcccgctccggctcttgcacctgaccaagtccgccaatctgttccccttttccgtacgagggtactatcgccggccatttcgattcggggttgatcggatcagcgtaggctgatgggtcgcgatgctgagaagacctctccgccggtgccatcgtcggaattggaacaggaagaagacgacgactgctacctaagcgatcaggaggacgatgccctagaagagtccgttctccatgtcctcgaggacgagcacctcgaggactgccattggtccgcctcatgcgtgatcaccaaggaatccctcttggcagcgcagaaggaggatcttaggaaggtgatggagctgctagggttgagggagcaccatgcccggacgctcctcatccactaccgctgggacgtggagaggatttttgagcttctcgatcagaagggaagggatagcctcttctcggaggctggtattcctcttcagtacaccaataatgctggtccaacctcctcagcggaggtgacctgcaatgtttgttatgatgatgtgccaccctcgtgtgccttggagatggactgcggccacagctactgcagtgattgttggactgaatatttcattgtgaaaattaatgagggtcagagccggcgtgtcagatgcatggctccaaagtgcaatgctatttgtgatgaagcaataattcggaaactagtcattgcgagacacccagatattgcagaacgttttgaaagatttttgctggaatcatatattgaggataatgatacagttaagtggtgcccaagcacaccacattgtggaaatgctatacgcgtcaaaggtgatatttattgtgaagtggaatgcacatgtggatgccagttttgttttaattgctccttacaaacacactcaccatgttcctgcatgatgtgggagctctggattaagaaatgccatgatgaatcagaaacagtgaattggataactgtaaatactaagccctgtcccaagtgtcacaaacctgtggagaagaatggtggctgcaacctggttgcatgtatatgtggacaagcattctgttggttatgtggtggtgctacgggtagagatcacacgtggtcaagtattagtggccacagttgtggccggttcactaatgatcagactaagaagaccgaacaagcaaggagagacctctatagatatatgcactaccacaacagatacaaggctcacaccgactctcttaagcaggaagcaaagcttaagaatgagatccaagggaagatatccatttcagaaaataaggagtcaaagataaaagattattcttgggtcataaatgggttaaacaggctattcagatcaaggcgtgttctatcctattcgtatccgtttgcattctacatgtttggtgatgagattttcaaggatgagatgactcctcaggagagagaactgaagcagaatttgtttgaggatcagcaacaacaattagaatttaatgttgaaagattgtctggtttccttgagaaagattttcaactttttaccgatgatgaggtcatggatacaatgaagcatgtcatcaatctttccaatgtggttgataggctctgcaaacaaattgcattgagaatgatttgttatatcctctacgcacacctcacaatatcgctccatacaaatctaagggccttgacagggcctcagagctcaatattagctgggatcctgctgaacaaagttcacagtcaacaaaacatagtcaggaggatgaacacaggaaccaaccagcatcgattagtctggggaaacgaactcatgagttgcatggctcgagttctggtaataggggggataatagggggcaccgatctaacaagcgagaccgggtagatgccaatggcggtggtgatgcactttttgatctcaatgtgccagccgaattggtggacaagatctgaagcttcattatctgatgggtgatggcacatccctttgaactgtacagctgacttaagcttcctcaccaacataaaggcaaaaaatactgttcttcttagcccccttgccaccatagagtatacctccatgtcaaaaaaaatttaccctggtgttaggatcccaagatatagagtagcttttaagttctatatgtcgcatttcatgacgtgatttgaagccaatgttcataattctgataaaactagttctactcctcaagcaagatggggatattttggaatgtaacttgaccatgcatgtgttgcggattccagatataatgtatgcagcatggtgaagggaattgtttgttg

SEQ ID NO: 81477 - DNA, 3511 bp, Zea Mays
atggagttggattggatcacaatttctaccgacaggaaaagaggctgcagtggaggtggggttggtggtccgggtttgatcaagttcatcaccctcgtcaggccccagccctcgatcgcactcctcacttgtcctctcacctcacctcacctcacctcgcctcgacctcgagcagcgaaagggaggaactctggaccgagaaacaaaaggcaaaagcaccagcaggtgatcaactcccctcggcaacaactccggcctccactcgctgcggatgtttcactcacctgtgacgtgaggcggcacggcaggtagaggtagacgctgcgtctccctttctagcctctacctgtacccatataccatctgctcgatctcccgtcagttctttatcctccaacgctggcgacagatttcagcgttctttcgcaatatcgcaatggcgacggcctgcttgagctccgtctcagctcagctcccggcggagaagctgtagacctgtagcccccgcccccctgctaaccagccatgtctcgcaaccgctccaagaggtggctcctccctgtttctgccgtgttcagtctgacgaaccttaattaacttcactgtgcttgcaaaaccttgtttggagcgttgccgctgtctcgcgtcacaggaattagtcttagccaagaaagacggggttcttgtgttttagaagcggttccaggctaacgcccttggggattttgcactgcaagcgattgcgattctatcggagcgctcatcaggatggatagcgccgcggactcgtcttcaccgaggtgccaccacggtcagtatcgacaggatgccggagaactcgaggaccagactagcaccagcaagatgccgtccagtgcttctgagcttccatgctccttgaagcgtgaggtccgagtccttgaaaagcgactggatgatcaattcgtcatgcgccgtgctcttgagaaagcactaggttacaagccttgtgctgttcatgcatcaagtgtgaactgcattccagagccgactgaggagctaatcaaggagatcgcagtgctcgagctagaggtcatatgcttggagaaacatctcctgacactataccgaaaggcatttgagcaacaattgtcccctgtgaactctgcttgtgacgcggaaaataacaagcagccagcaaggtctttttcaggcatactatctgaagcttcagtgctcagtttctcgaccccaaggaagcatcagccagtccagtccagtcgaatggtcctggcacgcaagtccacgcctacagcttctacaagcgaggctagcagtgaaaagatcaacatcggacgcagccattcctcgctcctgcaccgttctgtcagggtgtctccatccgcaaacaatcttgctagagctctgaaaccatgtcatacttcacctctatcttttgttgaggtacagaatgatatatctgaaatctctttggttccaaagtacttcaataggtttgctgcagggctgagttagtggtacattctgtcttgaactataagggattattatagctactatgcacctggacagagccgtagtcccttatattttataggatgaaggcagtacatgttgtatggtagtagcaaatttgacgtgctgaaatccatcctaacataatctgggccgatatgagcaggaagggaagtgcatggagcctggagttgtgagcttggcggacatcttggggaccagggttgcggaccatgttcctcaaacgcccaacaagatatccgaggacatgatcagatgcatcgcggccatatacataaggctgagagacgtcccttccgccgccgcgcagcatgccttcttcccctcaccgtgctcgtccttctcttcagcaagcggactgtcttccaaatacactgcagatgtatggagttggagccccaggtgcaggagagagagcttcactgaggcgtggcaggtgcaggacaacgagctaggcctaggcggtggtgaagcaagggactcggggctgcagtacgattctgtgatagaggtgtctgctctttgcaagggcgatcagaggtccgctgacgttaaggacatgctgcgcaagtatatgtcacttgtacagcttctagaaagtgtcgacctcggtggaatgaaaaacgaggagaagcttgctttctggatcaacgtgcataacgcgatgatgatgcatgcccatatagagtacgggatcccacagagcaacagcaaaaggatactgcttaccaaggtatcctacatcgttagtggccagagagtaaacgcggagctgatagagtaccagatcctgtgctgccgagcacactcttctggacaggtctgttccttccgccttctgcctccctctccctcctgtatgatgtttatcctaacacccggtcagtcgattcatgctgtgatttcttctgaatgaaccatacagtggcttcggctgctgctccacccgaaatggaagtccggcagggacagggacgaggagctgcaaggcttcgccgtggatcggcccgagcctctggtgcacttcgcactgtcctccggtagctactcggatccagtggtaggtagcacgtaggcaggcttcatcaaacgcacacccagtagtacggccggtacccaccaaattccaacgagacgcgcacatacatcacgtacggcacgaaaactccgatgcattcatctccttcaatccaactgtacccttccaggtgcggctctacagccccaagagcctgttccagcagctggaggcggcgaaggaggagcacatccgcgccaacgtcgccgtcggcgtgcgcgggcgggggcagcgcaagatcatcctccccagggccctggagctgtacgcgagggacgccgggctgggtgcgcaggaggtggtggccgcggtcgcgtgccacctgcccgacggcctccgggacgccgtgcgccggagcccgccggccgggcgggcgcgcggcggcgtggagtggaagccccacaacctggcgttccggtacctgctggccaaggagctggtcggcgggtcgcccgcgtgcgggcggcagcaacttaagaaatgcggccccccgatcggtgcgccgctgcgtgctgatcggtgatccgtcagcagatcgccgtgggtccgtggccgtgccgagccgagcccgaggtgcggtgcgggggtatcagggtctgtatgtacagagggagatggacaggaagatgatctgaatagtgtgcgctctgctgtagctagtttggatcattctgattggatgggattgaaatgaatatgagtgtatcctaacttgccctcaatcccatgaaaaataagtgtatccaaattagccttcaagtgtgaatagtgccacatgaattcttaccttaggacttgtttaggagctgtttaggagctagaggaatgaagagaattaaaaaggctaaaatcattttgatatttaattttaaataaagagaggattttaatctctct

SEQ ID NO: 81478 - DNA, 2801 bp, Zea Mays
atggagttggattggatcacaatttctaccgacaggaaaagaggctgcagtggaggtggggttggtggtccgggtttgatcaagttcatcaccctcgtcaggccccagccctcgatcgcactcctcacttgtcctctcacctcacctcacctcacctcgcctcgacctcgagcagcgaaagggaggaactctggaccgagaaacaaaaggcaaaagcaccagcaggtgatcaactcccctcggcaacaactccggcctccactcgctgcggatgtttcactcacctgtgacgtgaggcggcacggcaggtagagatttcagcgttctttcgcaatatcgcaatggcgacggcctgcttgagctccgtctcagctcagctcccggcggagaagctgtagacctgtagcccccgcccccctgctaaccagccatgtctcgcaaccgctccaagaggaattagtcttagccaagaaagacggggttcttgtgttttagaagcggttccaggctaacgcccttggggattttgcactgcaagcgattgcgattctatcggagcgctcatcaggatggatagcgccgcggactcgtcttcaccgaggtgccaccacggtcagtatcgacaggatgccggagaactcgaggaccagactagcaccagcaagatgccgtccagtgcttctgagcttccatgctccttgaagcgtgaggtccgagtccttgaaaagcgactggatgatcaattcgtcatgcgccgtgctcttgagaaagcactaggttacaagccttgtgctgttcatgcatcaagtgtgaactgcattccagagccgactgaggagctaatcaaggagatcgcagtgctcgagctagaggtcatatgcttggagaaacatctcctgacactataccgaaaggcatttgagcaacaattgtcccctgtgaactctgcttgtgacgcggaaaataacaagcagccagcaaggtctttttcaggcatactatctgaagcttcagtgctcagtttctcgaccccaaggaagcatcagccagtccagtccagtcgaatggtcctggcacgcaagtccacgcctacagcttctacaagcgaggctagcagtgaaaagatcaacatcggacgcagccattcctcgctcctgcaccgttctgtcagggtgtctccatccgcaaacaatcttgctagagctctgaaaccatgtcatacttcacctctatcttttgttgaggaagggaagtgcatggagcctggagttgtgagcttggcggacatcttggggaccagggttgcggaccatgttcctcaaacgcccaacaagatatccgaggacatgatcagatgcatcgcggccatatacataaggctgagagacgtcccttccgccgccgcgcagcatgccttcttcccctcaccgtgctcgtccttctcttcagcaagcggactgtcttccaaatacactgcagatgtatggagttggagccccaggtgcaggagagagagcttcactgaggcgtggcaggtgcaggacaacgagctaggcctaggcggtggtgaagcaagggactcggggctgcagtacgattctgtgatagaggtgtctgctctttgcaagggcgatcagaggtccgctgacgttaaggacatgctgcgcaagtatatgtcacttgtacagcttctagaaagtgtcgacctcggtggaatgaaaaacgaggagaagcttgctttctggatcaacgtgcataacgcgatgatgatgcatgcccatatagagtacgggatcccacagagcaacagcaaaaggatactgcttaccaaggtatcctacatcgttagtggccagagagtaaacgcggagctgatagagtaccagatcctgtgctgccgagcacactcttctggacagtggcttcggctgctgctccacccgaaatggaagtccggcagggacagggacgaggagctgcaaggcttcgccgtggatcggcccgagcctctggtgcacttcgcactgtcctccggtgcggctctacagccccaagagcctgttccagcagctggaggcggcgaaggaggagcacatccgcgccaacgtcgccgtcggcgtgcgcgggcgggggcagcgcaagatcatcctccccagggccctggagctgtacgcgagggacgccgggctgggtgcgcaggaggtggtggccgcggtcgcgtgccacctgcccgacggcctccgggacgccgtgcgccggagcccgccggccgggcgggcgcgcggcggcgtggagtggaagccccacaacctggcgttccggtacctgctggccaaggagctggtcggcgggtcgcccgcgtgcgggcggcagcaacttaagaaatgcggccccccgatcggtgcgccgctgcgtgctgatcggtgatccgtcagcagatcgccgtgggtccgtggccgtgccgagccgagcccgaggtgcggtgcgggggtatcagggtctgtatgtacagagggagatggacaggaagatgatctgaatagtgtgcgctctgctgtagctagtttggatcattctgattggatgggattgaaatgaatatgagtgtatcctaacttgccctcaatcccatgaaaaataagtgtatccaaattagccttcaagtgtgaatagtgccacatgaattcttaccttaggacttgtttaggagctgtttaggagctagaggaatgaagagaattaaaaaggctaaaatcattttgatatttaattttaaataaagagaggattttaatctctct

SEQ ID NO: 81479 - DNA, 2831 bp, Zea Mays
atggagttggattggatcacaatttctaccgacaggaaaagaggctgcagtggaggtggggttggtggtccgggtttgatcaagttcatcaccctcgtcaggccccagccctcgatcgcactcctcacttgtcctctcacctcacctcacctcacctcgcctcgacctcgagcagcgaaagggaggaactctggaccgagaaacaaaaggcaaaagcaccagcaggtgatcaactcccctcggcaacaactccggcctccactcgctgcggatgtttcactcacctgtgacgtgaggcggcacggcaggtagagcgattgcgattctatcggagcgctcatcaggatggatagcgccgcggactcgtcttcaccgaggtgccaccacggtcagtatcgacaggatgccggagaactcgaggaccagactagcaccagcaagatgccgtccagtgcttctgagcttccatgctccttgaagcgtgaggtccgagtccttgaaaagcgactggatgatcaattcgtcatgcgccgtgctcttgagaaagcactaggttacaagccttgtgctgttcatgcatcaagtgtgaactgcattccagagccgactgaggagctaatcaaggagatcgcagtgctcgagctagaggtcatatgcttggagaaacatctcctgacactataccgaaaggcatttgagcaacaattgtcccctgtgaactctgcttgtgacgcggaaaataacaagcagccagcaaggtctttttcaggcatactatctgaagcttcagtgctcagtttctcgaccccaaggaagcatcagccagtccagtccagtcgaatggtcctggcacgcaagtccacgcctacagcttctacaagcgaggctagcagtgaaaagatcaacatcggacgcagccattcctcgctcctgcaccgttctgtcagggtgtctccatccgcaaacaatcttgctagagctctgaaaccatgtcatacttcacctctatcttttgttgaggtacagaatgatatatctgaaatctctttggttccaaagtacttcaataggtttgctgcagggctgagttagtggtacattctgtcttgaactataagggattattatagctactatgcacctggacagagccgtagtcccttatattttataggatgaaggcagtacatgttgtatggtagtagcaaatttgacgtgctgaaatccatcctaacataatctgggccgatatgagcaggaagggaagtgcatggagcctggagttgtgagcttggcggacatcttggggaccagggttgcggaccatgttcctcaaacgcccaacaagatatccgaggacatgatcagatgcatcgcggccatatacataaggctgagagacgtcccttccgccgccgcgcagcatgccttcttcccctcaccgtgctcgtccttctcttcagcaagcggactgtcttccaaatacactgcagatgtatggagttggagccccaggtgcaggagagagagcttcactgaggcgtggcaggtgcaggacaacgagctaggcctaggcggtggtgaagcaagggactcggggctgcagtacgattctgtgatagaggtgtctgctctttgcaagggcgatcagaggtccgctgacgttaaggacatgctgcgcaagtatatgtcacttgtacagcttctagaaagtgtcgacctcggtggaatgaaaaacgaggagaagcttgctttctggatcaacgtgcataacgcgatgatgatgcccatatagagtacgggatcccacagagcaacagcaaaaggatactgcttaccaaggtatcctacatcgttagtggccagagagtaaacgcggagctgatagagtaccagatcctgtgctgccgagcacactcttctggacagtggcttcggctgctgctccacccgaaatggaagtccggcagggacagggacgaggagctgcaaggcttcgccgtggatcggcccgagcctctggtgcacttcgcactgtcctccggtagctactcggatccagtggtgcggctctacagccccaagagcctgttccagcagctggaggcggcgaaggaggagcacatccgcgccaacgtcgccgtcggcgtgcgcgggcgggggcagcgcaagatcatcctccccagggccctggagctgtacgcgagggacgccgggctgggtgcgcaggaggtggtggccgcggtcgcgtgccacctgcccgacggcctccgggacgccgtgcgccggagcccgccggccgggcgggcgcgcggcggcgtggagtggaagccccacaacctggcgttccggtacctgctggccaaggagctggtcggcgggtcgcccgcgtgcgggcggcagcaacttaagaaatgcggccccccgatcggtgcgccgctgcgtgctgatcggtgatccgtcagcagatcgccgtgggtccgtggccgtgccgagccgagcccgaggtgcggtgcgggggtatcagggtctgtatgtacagagggagatggacaggaagatgatctgaatagtgtgcgctctgctgtagctagtttggatcattctgattggatgggattgaaatgaatatgagtgtatcctaacttgccctcaatcccatgaaaaataagtgtatccaaattagccttcaagtgtgaatagtgccacatgaattcttaccttaggacttgtttaggagctgtttaggagctagaggaatgaagagaattaaaaaggctaaaatcattttgatatttaattttaaataaagagaggattttaatctctct

SEQ ID NO: 81480 - DNA, 2821 bp, Zea Mays
atggagttggattggatcacaatttctaccgacaggaaaagaggctgcagtggaggtggggttggtggtccgggtttgatcaagttcatcaccctcgtcaggccccagccctcgatcgcactcctcacttgtcctctcacctcacctcacctcacctcgcctcgacctcgagcagcgaaagggaggaactctggaccgagaaacaaaaggcaaaagcaccagcaggtgatcaactcccctcggcaacaactccggcctccactcgctgcggatgtttcactcacctgtgacgtgaggcggcacggcaggtagagatttcagcgttctttcgcaatatcgcaatggcgacggcctgcttgagctccgtctcagctcagctcccggcggagaagctgtagacctgtagcccccgcccccctgctaaccagccatgtctcgcaaccgctccaagaggaattagtcttagccaagaaagacggggttcttgtgttttagaagcggttccaggctaacgcccttggggattttgcactgcaagcgattgcgattctatcggagcgctcatcaggatggatagcgccgcggactcgtcttcaccgaggtgccaccacggtcagtatcgacaggatgccggagaactcgaggaccagactagcaccagcaagatgccgtccagtgcttctgagcttccatgctccttgaagcgtgaggtccgagtccttgaaaagcgactggatgatcaattcgtcatgcgccgtgctcttgagaaagcactaggttacaagccttgtgctgttcatgcatcaagtgtgaactgcattccagagccgactgaggagctaatcaaggagatcgcagtgctcgagctagaggtcatatgcttggagaaacatctcctgacactataccgaaaggcatttgagcaacaattgtcccctgtgaactctgcttgtgacgcggaaaataacaagcagccagcaaggtctttttcaggcatactatctgaagcttcagtgctcagtttctcgaccccaaggaagcatcagccagtccagtccagtcgaatggtcctggcacgcaagtccacgcctacagcttctacaagcgaggctagcagtgaaaagatcaacatcggacgcagccattcctcgctcctgcaccgttctgtcagggtgtctccatccgcaaacaatcttgctagagctctgaaaccatgtcatacttcacctctatcttttgttgaggaagggaagtgcatggagcctggagttgtgagcttggcggacatcttggggaccagggttgcggaccatgttcctcaaacgcccaacaagatatccgaggacatgatcagatgcatcgcggccatatacataaggctgagagacgtcccttccgccgccgcgcagcatgccttcttcccctcaccgtgctcgtccttctcttcagcaagcggactgtcttccaaatacactgcagatgtatggagttggagccccaggtgcaggagagagagcttcactgaggcgtggcaggtgcaggacaacgagctaggcctaggcggtggtgaagcaagggactcggggctgcagtacgattctgtgatagaggtgtctgctctttgcaagggcgatcagaggtccgctgacgttaaggacatgctgcgcaagtatatgtcacttgtacagcttctagaaagtgtcgacctcggtggaatgaaaaacgaggagaagcttgctttctggatcaacgtgcataacgcgatgatgatgcatgcccatatagagtacgggatcccacagagcaacagcaaaaggatactgcttaccaaggtatcctacatcgttagtggccagagagtaaacgcggagctgatagagtaccagatcctgtgctgccgagcacactcttctggacagtggcttcggctgctgctccacccgaaatggaagtccggcagggacagggacgaggagctgcaaggcttcgccgtggatcggcccgagcctctggtgcacttcgcactgtcctccggtagctactcggatccagtggtgcggctctacagccccaagagcctgttccagcagctggaggcggcgaaggaggagcacatccgcgccaacgtcgccgtcggcgtgcgcgggcgggggcagcgcaagatcatcctccccagggccctggagctgtacgcgagggacgccgggctgggtgcgcaggaggtggtggccgcggtcgcgtgccacctgcccgacggcctccgggacgccgtgcgccggagcccgccggccgggcgggcgcgcggcggcgtggagtggaagccccacaacctggcgttccggtacctgctggccaaggagctggtcggcgggtcgcccgcgtgcgggcggcagcaacttaagaaatgcggccccccgatcggtgcgccgctgcgtgctgatcggtgatccgtcagcagatcgccgtgggtccgtggccgtgccgagccgagcccgaggtgcggtgcgggggtatcagggtctgtatgtacagagggagatggacaggaagatgatctgaatagtgtgcgctctgctgtagctagtttggatcattctgattggatgggattgaaatgaatatgagtgtatcctaacttgccctcaatcccatgaaaaataagtgtatccaaattagccttcaagtgtgaatagtgccacatgaattcttaccttaggacttgtttaggagctgtttaggagctagaggaatgaagagaattaaaaaggctaaaatcattttgatatttaattttaaataaagagaggattttaatctctct

SEQ ID NO: 81481 - DNA, 890 bp, Zea Mays
caacatcatcagttcgtatcacacccaacctcccactgtaaaaaagagcagcggaacgtgcgtgcatccatccatccatccatttccaatcccaatcccaatcccaccagtgtccagtgctcggggaaccgacacagctcctcagcagagtagccagcacgacaagcccgatcagcagacagcaggcatggcactcgcggaggccgacgacggcgcggtggtcttcggcgaggagcaggaggcgctggtgctcaagtcgtgggccgtcatgaagaaggacgccgccaacctgggcctccgcttctttctcaaggtcttcgagatcgcgccgtcggcgaagcagatgttctcgttcctgcgcgactccgacgtgccgctggagaagaaccccaagctcaagacgcacgccatgtccgtcttcgtcatgacctgcgaggcggcggcgcagcttcgcaaggccgggaaggtcaccgtgagggagaccacgctcaagaggctgggcgccacgcacttgaggtgacggggttcgcgctgcttgagacgatcaaggaggcgctccccgctgacatgtggagcctcgagatgaagaaagcctgggccgaggcctacagccagctggtggcggccatcaagcgggagatgaagcccgatgcctagtagtggcgattgcgaccagtgtttaacccatgacgcagcgccgtcacagatgtcccgtgtggtcttgcgctttagcaatttctctctggagggagcgtgtattgttatcttgtgatcgagagcctgtgtgctgcctttgcttcttgtgattatatagctactgaataaagatgtagcgttcttcagcctgttacatcgaattcaaaaagattctatttcgttactagaacaaa

SEQ ID NO: 81482 - DNA, 1365 bp, Zea Mays
atttgaaacttcactccaacctaaagttttttgtctatgactagcttcttgcacatatatactaaataccataatttgaggtactttatttccaaacaaatattgctaacaatgctgtaaaaaatactatagtttactttatttccaaacaaatctttactaactattaagaaggtaacatagaccacttttgtgcccccgcctccccctctgctcgactcaattgcgtgcaccctcgcctgtcccagcgtccccgcccctgtctcctgaagtcgtccgcgaccgccgccatgctcccctcgccccgtgccgcgtccgtcgtgacagggatccgagaacaccccatggatgtgtctgggattcgaggcctcccccctcccttcccctcccccacccccatcggcgatgcctggatccgcgaccgccaccgtccaaccccggcctccgtctatgaccgctccgtcgtggcgcaagcgctggaggcatccacagggggctactgatggctgggacgggttcgtgctcaccaccgatgactgggacgtccatcgggggaccttcctagcgtggatggtgtcttcacaaggaaacggcagctcgctggtgctgctgaacacccgtccgggtccggctgcggacagcgcaggcatggcagagcacctgaagctgcacctggggcaggtgagcctacggacctggtcgagttccgctggctgctgggtggcccgctggaccttcccgtccgactacagatccagcgccttcttctgcgaccgttttggcgtttgcacgagcaccggcacgtgtgcctgcgtcgacgaattcgagccttcgaaaccctgcgagtggcagcgcgggtactttgtggacgggtgcaccaccaggtctcacccgctgagctgcaccgcagacgatagtggccgccgcccgacgacggagcaggacgactcgttcctgctcctggacaacctgcgagggctcccttacagttccatcccccagcggagggccacggctggccgcgcttcttcacggcggccgcggcgtggggaggcatcagctggatctggtggtggatgaagagcggaggggcccgacgccgcgtcctctgctcctcgccgcttgactgtctcgctttctacaacaacattattgccaagaacatttttgatgatgtactgcattccatagcagcattattgtccgtagcagatgatggcaattcgctgctagcactagctgaagcttccttaacttgagcgggaatatcaatcttaactgaaggtctgattgctcgaattggagctgccagtgattcctttgggccttgggtttgcgcatccttcatctaaactgggatcacag

SEQ ID NO: 81483 - DNA, 1427 bp, Zea Mays
atttgaaacttcactccaacctaaagttttttgtctatgactagcttcttgcacatatatactaaataccataatttgaggtactttatttccaaacaaatattgctaacaatgctgtaaaaaatactatagtttactttatttccaaacaaatctttactaactattaagaaggtaacatagaccacttttgtgcccccgcctccccctctgctcgactcaattgcgtgcaccctcgcctgtcccagcgtccccgcccctgtctcctgaagtcgtccgcgaccgccgccatgctcccctcgccccgtgccgcgtccgtcgtgacagggatccgagaacaccccatggatgtgtctgggattcgaggcctcccccctcccttcccctcccccacccccatcggcgatgcctggatccgcgaccgccaccgtccaaccccggcctccgtctatgaccgctccgtcgtggcgcaagcgctggaggcatccacagggggctactgatggctgggacgggttcgtgctcaccaccgatgactgggacgtccatcgggggaccttcctagcgtggatggtgtcttcacaaggaaacggcagctcgctggtgctgctgaacacccgtccgggtccggctgcggacagcgcaggcatggcagagcacctgaagctgcacctggggcaggtgagcctacggacctggtcgagttccgctggctgctgggtggcccgctggaccttcccgtccgactacagatccagcgccttcttctgcgaccgttttggcgtttgcacgagcaccggcacgtgtgcctgcgtcgacgaattcgagccttcgaaaccctgcgagtggcagcgcgggtactttgtggacgggtgcaccaccaggtctcacccgctgagctgcaccgcagacgatagtggccgccgcccgacgacggagcaggacgactcgttcctgctcctggacaacctgcgagggctcccttacagttccatcccccagcggagggccacggctggccgcgcttcttcacggcggccgcggcgtggggaggcatcagctggatctggtggtggatgaagagcggaggggcccgacgccgcgtcctctgctcctcgccgcttgactgtctcgctttctacaacaacattattgccaagaacatttttgatgatgtactgcattccatagcagcattattgtccgtagcagatgatggcaattcgctgctagcactagctgaagcttccttaacttgagcgggaatatcaatcttaactgaaggtctgattgctcgaattggagctgccagtgattcctttgggccttgggtttgcgcatccttcatctaaactgatggaactgcttccttccttgattgatcttgcatgcccgtgtgcgccgtggagggcaggccggagtcttgg

SEQ ID NO: 81484 - DNA, 1872 bp, Zea Mays
ctcccctccgcatacaccatgcgtgtcgtttcgtatatatattttatactattattttacttccgtgacaacgcacgggcacatatctagtagtattgattaaaatgctgtaaaaaataccatagtttaaaatactttggtgcccacgccgcagcccgtaggcagttgccggtgccactgccagtgcgacacggatcacgcaatgcctcccaccatgctcgcgccggtgcccaccaggccgcgctccaaccccttccgccggcgcagaggagctgctccgctgcttctcgatcagacttcggcgaagcggcccgctgagtcgtccacctcagcctcatcctgcttctacagtgaggtgatctccaactcctccacatccctcgccccgtatcagcgcctggagaagaggcatcgacgccaggacacagacgcgggcgaggcgcggccggctggctccgagtgctcggaggtgatcggcggcgcgagggtgcgccccgccgaggtcgaggtctccgaatcgtcctgccctgtctccgtgctcgagtccgacctcgcctgcccgaagcagctcgccgacgacgctgaggcgatcgagaaatcctccgcgtgcgatgagctgaccccgtcgtcggagcccgatgaggaggaggtgctcagtgatcccagccactcggggtactcccccagtcccctgatcagctccccattgaccgaagatgacagcgacgacgcgccctctgcgaccttctccctctttctcgacttcgccaagcagttcgtcccctgcttgcaccccaaaccgtgcaccgtcaccagttccactctcgatctcctgacggggaggcggtttgaggacttggacgacgaggagagctacgagcgcttccggcggcgcgagcgacgcgaggcagttgcgcgcgacttcactgaggtgtgcagctccacctccatacccgacagctaccgccctctcgtcgtggagcaacgtgtcatcatggtgaactggatcatccagcattcacgtctgatgaagctccagccagttacaatgttcatgggaattggattgatggaccgcttcttgacacaagggtatatgaagggtttgagaaaccttcagttgttgggcattgcctgcatcaccttggctacacgcatcgaagagaaccagtcatacaattgcgttcttcgaaagacttttcaagttgggatcaatatctacagccagagtgaggttgttgccatggagtggctggttcaggaggtcctcaacttcaagtgttttgtcacaacaacccatcatttcctatggttctatctgaaggctgcaaatgctgatgacagggtagcggacctggcaaactacctggccttcatctcacttcggaaccatgagcagctctccttctggccctcgactgtggcagctgcagtggtagttcttgcttgccttgccacaaacaaggagtcctcatgccatttggtgacggagactcacatcaggacgcaggatgatgatctaccagaatgcctaatgagcctcgagtggctgatcaagtacgtctcgtgatacccagagctcccaggagcacgacaaggacgaggaatttggtattgagcttggcctttaggaataactgaacttctgtatcgggggatgtctatctttacatcggttagtcgctctttttagaaggacggctaaggctgggcgttgttgtactcgttgatctatttgtttaaccaatgtattgctgatggatgatataccactgaaatctgttgttctggtgtgacaagcggcatgatcttttgatcccagaagatggtcacgtatcaggtttctgtggtgtctggtaagcagaatactat

SEQ ID NO: 81485 - DNA, 2082 bp, Zea Mays
gccggtgccactgccagtgcgacacggatcacgcaatgcctcccaccatgctcgcgccggtgcccaccaggccgcgctccaaccccttccgccggcgcagaggagctgctccgctgcttctcgatcagacttcggcgaagcggcccgctgagtcgtccacctcagcctcatcctgcttctacagtgaggtgatctccaactcctccacatccctcgccccgtatcagcgcctggagaagaggcatcgacgccaggacacagacgcgggcgaggcgcggccggctggctccgagtgctcggaggtgatcggcggcgcgagggtgcgccccgccgaggtcgaggtctccgaatcgtcctgccctgtctccgtgctcgagtccgacctcgcctgcccgaagcagctcgccgacgacgctgaggcgatcgagaaatcctccgcgtgcgatgagctgaccccgtcgtcggagcccgatgaggaggaggtgctcagtgatcccagccactcggggtactcccccagtcccctgatcagctccccattgaccgaagatgacagcgacgacgcgccctctgcgaccttctccctctttctcgacttcgccaagcagttcgtcccctgcttgcaccccaaaccgtgcaccgtcaccagttccactctcgatctcctgacggggaggcggtttgaggacttggacgacgaggagagctacgagcgcttccggcggcgcgagcgacgcgaggcagttgcgcgcgacttcactgaggtgtgcagctccacctccatacccgacagctaccgccctctcgtcgtggagcaacgtgtcatcatggtgaactggatcatccagcattcacgtctgatgaagctccagccagttacaatgttcatgggaattggattgatggaccgcttcttgacacaagggtatatgaagggtttgagaaaccttcagttgttgggcattgcctgcatcaccttggctacacgcatcgaagagaaccagtcatacaattgcgttcttcgaaagacttttcaagttgggatcaatatctacagccagagtgaggttgttgccatggagtggctggttcaggaggtcctcaacttcaagtgttttgtcacaacaacccatcatttcctatggttctatctgaaggctgcaaatgctgatgacagggtagcggacctggcaaactacctggccttcatctcacttcggaaccatgagcagctctccttctggccctcgactgtggcagctgcagtggtagttcttgcttgccttgccacaaacaaggagtcctcatgccatttggtgacggagactcacatcaggacgcaggatgatgatctaccagaatgcctaatggtacacattctcttatttttctcttcttttttgggaatacactggtgggcatgaatcatgattcatgcatgctacagtttgcaaggctgttaactttacatttaggaggtgtttgaatgcactagagctaatatttagtggctaagattagtactagcaaatttttagccaaccaactattagctctagtgcattcaaacactcctttattctcctacacaatctgtttcatgcagagcctcgagtggctgatcaagtacgtctcgtgatacccagagctcccaggtgatagcagtgttttcacttttttctgtatggggacgtgaaatcttagcattgacaaatagtctgcctgtagtgtagataagatagccatgcggcatgaaacgtagcttgtggattttgattttgcagctttctgattaggagcacgacaaggacgaggaatttggtattgagcttggcctttaggaataactgaacttctgtatcgggggatgtctatctttacatcggttagtcgctctttttagaaggacggctaaggctgggcgttgttgtactcgttgatctatttgtttaaccaatgtattgctgatggatgatataccactgaaatctgttgttctggtgtgacaagcggcatgatcttttgatcccagaagatggtcacgtatcaggtttctgtggtgtctggtaagcagaatactat

SEQ ID NO: 81486 - DNA, 2524 bp, Zea Mays
gccggtgccactgccagtgcgacacggatcacgcaatgcctcccaccatgctcgcgccggtgcccaccaggccgcgctccaaccccttccgccggcgcagaggagctgctccgctgcttctcgatcagacttcggcgaagcggcccgctgagtcgtccacctcagcctcatcctgcttctacagtgaggtgatctccaactcctccacatccctcgccccgtatcagcgcctggagaagaggcatcgacgccaggacacagacgcgggcgaggcgcggccggctggctccgagtgctcggaggtgatcggcggcgcgagggtgcgccccgccgaggtcgaggtctccgaatcgtcctgccctgtctccgtgctcgagtccgacctcgcctgcccgaagcagctcgccgacgacgctgaggcgatcgagaaatcctccgcgtgcgatgagctgaccccgtcgtcggagcccgatgaggaggaggtgctcagtgatcccagccactcggggtactcccccagtcccctgatcagctccccattgaccgaagatgacagcgacgacgcgccctctgcgaccttctccctctttctcgacttcgccaagcagttcgtcccctgcttgcaccccaaaccgtgcaccgtcaccagttccactctcgatctcctgacggggaggcggtttgaggacttggacgacgaggagagctacgagcgcttccggcggcgcgagcgacgcgaggcagttgcgcgcgacttcactgaggtgtgcagctccacctccatacccgacagctaccgccctctcgtcgtggagcaacgtgtcatcatggtgaactggatcatccagcattcacgtctgatgaagctccagccagttacaatgttcatgggaattggattgatggaccgcttcttgacacaagggtatatgaagggtttgagaaaccttcagttgttgggcattgcctgcatcaccttggctacacgcatcgaagagaaccagtcatacaattgatatcgacgggattaatattcagcagcaactggtgcctaatcagtagcatctgagtctgtgtgagctcctcctttaatttatgttggttccataagctatatttttatccatttgcatcactaaagctgcaatatgccttgggtctttgacaacctttagcggggcaaatgagatggttttgatttagtaaaactattttaccatttaatcatattatgaatatgaaacatatctgcatgtggcaatgctttccatggtatttccatttgtaatctttttttgagcaaaaccatctgtcatttgttcctttcaatacttagtatctgtgcaatttgcgtttagaagtgttcacaaggttaacatttcagaagtttattttttccaggacataaatttgggtttcctgattgtgctgttatctatgataaaggcatttgaccctactagttagcattgttttagttgacttgatgcttttatctatttgatttgatatatattactacaattcacatttggaagacatgtaagagaagtatatttagctgaaactgcactggagcatgacctttgttcttcagataattttttcttttcatattccttttccttgtttctgttaagctcaatgtacaacattaatttcactgcttgatccctttcagcgttcttcgaaagacttttcaagttgggatcaatatctacagccagagtgaggttgttgccatggagtggctggttcaggaggtcctcaacttcaagtgttttgtcacaacaacccatcatttcctatggttctatctgaaggctgcaaatgctgatgacagggtagcggacctggcaaactacctggccttcatctcacttcggaaccatgagcagctctccttctggccctcgactgtggcagctgcagtggtagttcttgcttgccttgccacaaacaaggagtcctcatgccatttggtgacggaggtgaacacccagactcacatcaggacgcaggatgatgatctaccagaatgcctaatgagcctcgagtggctgatcaagtacgtctcgtgatacccagagctcccaggtgatagcagtgttttcacttttttctgtatggggacgtgaaatcttagcattgacaaatagtctgcctgtagtgtagataagatagccatgcggcatgaaacgtagcttgtggattttgattttgcagctttctgattaggagcacgacaaggacgaggaatttggtattgagcttggcctttaggaataactgaacttctgtatcgggggatgtctatctttacatcggttagtcgctctttttagaaggacggctaaggctgggcgttgttgtactcgttgatctatttgtttaaccaatgtattgctgatggatgatataccactgaaatctgttgttctggtgtgacaagcggcatgatcttttgatcccagaagatggtcacgtatcaggtttctgtggtgtctggtaagcagaatactat

SEQ ID NO: 81487 - DNA, 1729 bp, Zea Mays
gccggtgccactgccagtgcgacacggatcacgcaatgcctcccaccatgctcgcgccggtgcccaccaggccgcgctccaaccccttccgccggcgcagaggagctgctccgctgcttctcgatcagacttcggcgaagcggcccgctgagtcgtccacctcagcctcatcctgcttctacagtgaggtgatctccaactcctccacatccctcgccccgtatcagcgcctggagaagaggcatcgacgccaggacacagacgcgggcgaggcgcggccggctggctccgagtgctcggaggtgatcggcggcgcgagggtgcgccccgccgaggtcgaggtctccgaatcgtcctgccctgtctccgtgctcgagtccgacctcgcctgcccgaagcagctcgccgacgacgctgaggcgatcgagaaatcctccgcgtgcgatgagctgaccccgtcgtcggagcccgatgaggaggaggtgctcagtgatcccagccactcggggtactcccccagtcccctgatcagctccccattgaccgaagatgacagcgacgacgcgccctctgcgaccttctccctctttctcgacttcgccaagcagttcgtcccctgcttgcaccccaaaccgtgcaccgtcaccagttccactctcgatctcctgacggggaggcggtttgaggacttggacgacgaggagagctacgagcgcttccggcggcgcgagcgacgcgaggcagttgcgcgcgacttcactgaggtgtgcagctccacctccatacccgacagctaccgccctctcgtcgtggagcaacgtgtcatcatggtgaactggatcatccagcattcacgtctgatgaagctccagccagttacaatgttcatgggaattggattgatggaccgcttcttgacacaagggtatatgaagggtttgagaaaccttcagttgttgggcattgcctgcatcaccttggctacacgcatcgaagagaaccagtcatacaattgcgttcttcgaaagacttttcaagttgggatcaatatctacagccagagtgaggttgttgccatggagtggctggttcaggaggtcctcaacttcaagtgttttgtcacaacaacccatcatttcctatggttctatctgaaggctgcaaatgctgatgacagggtagcggacctggcaaactacctggccttcatctcacttcggaaccatgagcagctctccttctggccctcgactgtggcagctgcagtggtagttcttgcttgccttgccacaaacaaggagtcctcatgccatttggtgacggaggtgaacacccagactcacatcaggacgcaggatgatgatctaccagaatgcctaatgagcctcgagtggctgatcaagtacgtctcgtgatacccagagctcccagctttctgattaggagcacgacaaggacgaggaatttggtattgagcttggcctttaggaataactgaacttctgtatcgggggatgtctatctttacatcggttagtcgctctttttagaaggacggctaaggctgggcgttgttgtactcgttgatctatttgtttaaccaatgtattgctgatggatgatataccactgaaatctgttgttctggtgtgacaagcggcatgatcttttgatcccagaagatggtcacgtatcaggtttctgtggtgtctggtaagcagaatactat

SEQ ID NO: 81488 - DNA, 1031 bp, Zea Mays
tcaccatttttccatctgaagcattcacgtctgatgaagctccagccagttacaatgttcatgggaattggattgatggaccgcttcttgacacaagggtatatgaagggtttgagaaaccttcagttgttgggcattgcctgcatcaccttggctacacgcatcgaagagaaccagtcatacaattgcgttcttcgaaagacttttcaagttgggatcaatatctacagccagagtgaggttgttgccatggagtggctggttcaggaggtcctcaacttcaagtgttttgtcacaacaacccatcatttcctatggttctatctgaaggctgcaaatgctgatgacagggtagcggacctggcaaactacctggccttcatctcacttcggaaccatgagcagctctccttctggccctcgactgtggcagctgcagtggtagttcttgcttgccttgccacaaacaaggagtcctcatgccatttggtgacggaggtgaacacccagactcacatcaggacgcaggatgatgatctaccagaatgcctaatgagcctcgagtggctgatcaagtacgtctcgtgatacccagagctcccaggtgatagcagtgttttcacttttttctgtatggggacgtgaaatcttagcattgacaaatagtctgcctgtagtgtagataagatagccatgcggcatgaaacgtagcttgtggattttgattttgcagctttctgattaggagcacgacaaggacgaggaatttggtattgagcttggcctttaggaataactgaacttctgtatcgggggatgtctatctttacatcggttagtcgctctttttagaaggacggctaaggctgggcgttgttgtactcgttgatctatttgtttaaccaatgtattgctgatggatgatataccactgaaatctgttgttctggtgtgacaagcggcatgatcttttgatcccagaagatggtcacgtatcaggtttctgtggtgtctggtaagcagaatactat

SEQ ID NO: 81489 - DNA, 696 bp, Zea Mays
gttcattccacacgaaatggaccaagctggcgaggaggagcaatggcgcagccatttgaggaattgattgatccaagttgtctacttcgaataatgttgtactgtatggttggcaagtgaagaacattgtgtagctttagttttactatgatgtaggtacacacggttttgacactcttatttttggtatgcaactgctatgatgcctctcaaatcccaatgttgtgtcttttaaagatttatctaaaatatgttgaaattactaccaagagtactaagtttttcatcatttgtctgaaacatgttgaaattgctactaagagtagtgagtgttgcatcatagcctctcaaatcaatggtgtctttaaagaatggtatgacatgtgtagaaattgctactacaattgaggtcctagtgcaccagtattgatggtaactttgtcaaattgattgagatgcggacgtttgtgttagcatggtgccatggtttgctcaatgaaagttgttgcagttactagtaagttcaccttgtgttaaattctgaaaattaacagtcacagtactaaatctatcatgtaaaacctgcttgaagccttgaaccatttcctatttatattagtgtgtcatggttttgtcactttagtattcatcagaattttctaaggccttaatatctgctaacttcatggggctaac

SEQ ID NO: 81490 - DNA, 163 bp, Zea Mays
gactgttgagtgatctttttgatgagggagtcagatgaacttggacatgagattcaagtttttttcaagtaagaactttgctctacaatccagaaagttgcctagtgcagatcatgtgaaagatgacaacttttatgagctccagcctgctgattactacaac

SEQ ID NO: 81491 - DNA, 225 bp, Zea Mays
ggggaagtagtgctcacaccatttcttgtccattgacatcagcgctccacgcctgcgcccccgaattcccaaatcctgcggcgcctccgccccaaccccgctcgtcgactcctctcttccgaacacgccggaggaatccttctccgactcgtcttccacctctctgccgggctggcgtggattggtctcttcttctgctggtacgattcgattgatgacctcatc

SEQ ID NO: 81492 - DNA, 2260 bp, Zea Mays
gtagtgctcacaccatttcttgtccattgacatcagcgctccacgcctgcgcccccgaattcccaaatcctgcggcgcctccgccccaaccccgctcgtcgactcctctcttccgaacacgccggaggaatccttctccgactcgtcttccacctctctgccgggctggcgtggattggtctcttcttctgctgtggatttcctttcctagcatcaccacatgtaaaacaggggagatttaagatccaacacatcagcgaagtggcgcccttgctgacacaagaatacgtccaggtctcgtagaacacctaacgctggattgtgcagtgatctagggattgcgtattaggatattgaggatgggattttcacaaattgctatagtccaattattttcttcccttctaccctgatacatgccagatcatctgttataatggtgtttgctgctggaggcacatcccgattcgtcgatagggctgagtgcacctgcctcattcacaagataaacgacgctccgcgtcagcatcctccccgttcgcgattggctcgagcggcaccgatggagcgacgactctgtttcccagaaggcgaaaggacgatgagatcgacagacgattcgtgccgatcgcacaccggtaggcggtggcgagccgcgtgagatctctcgcgtcctcccggttctcagggaccacgacgtccgcgccgacgcgcacctctacaacgcgctaatgaaggcgaacgtcgcggcggacgaccccggtgccgtcctcagggtgttccggcaggtttcagttactggtacattcttggtgaataaagaacatgtggaaagtcacaggtggtcatgtatgtttggggatgttgaagtaccagctgaggttttgaccgatggcacgctacgctgctatgcaccagcacaccaatcaggaagagttccattttatgtgacctgttcaaacatggtggcttgtagtgaagtgcgagaatttgagtatcgtgattctgaagctcattacatggagacttctcgttcccaagccaatggtgtaaatgaaatgcatctacacattcgtcttgagaagctactcactttggggccagatgaccatcaaatgcttgctataaattccttaatgcttgatgggaaatggtcaaatcaagaatcttctgtcaaggaagtagtttccactgctagggtccaaagtttaaagaaactggtgaaagagaagctgcatcaatggctcatctgcaaagtaaacgatgatggaaagggtcccaatgttctgtgcaaggaaggacagggtgtgattcatttagtagcagcactgggttatgattgggctataagaccgataataattgctggtgtcaatgtgaacttccgggatgctcatggatggactacactccactgggttgcgtctttgggaagagagcggacagttagtgttctcatagcaaatggacacaagatcccgatgcggcagtggcggacagcaacgggcgctcaacgccatcgcgcctcctgcgaacccatggtgagatgtgtggtctcgatctagagtcgaaggacttccccaacaccctttcctccatcggcgcgacatcggccagctcatctgcgacgatgaggcatcttcgaccgacttcccaacaccccatcctccatcaatgcggctccagtaccccttcctccatcggcgcgacagcatccagttcatattgaatttcctctcaattgtttttaactttctaatttattaatcgctggtgttagaacaggtaggtggcggctaagaaaaatgaagatggtggcagctaagaaactctaaagccacttctgattcacatatgatgcgaccacagaaattgaagatgtcgtgacctgggaatagattcggcagaagtggattatttgcatgctcaatctatgttcattgctgaagttacctttcaaattcaaattctcgggtagagccacctttaattgtgatgtacagagatatcagtatcattatctaaaatattatcacagaactgaggaaggagaaaaaagaggtcccgccggtcccactcgcaccacgacggctccgacggacgctgatgggaggctctcatccatcacctacctttcctcgacatggatccacaggtctagactgtaaaagagtaaactggactggaattttacattctaggtgatacaatttacttttattggatctactaggagaatttcatataggacttgtaaaat

SEQ ID NO: 81493 - DNA, 1759 bp, Zea Mays
cttagcttcacacctgcaataacgggtactttgttatttgtgtaccatatttgaataactattcaaacactggccggatttttatgtctgtcagcaccaaggccaaggcacaagatgaacagacgctgacacaagagaatgcttcgggcgaagggcgccaacaggaagatgaaggaaggcacgtgagaatcaaacgtcacaacattcgtttgagcgggccgaagtgggtcgtgtaattgttatgggccaggctgcgtccgcccagtagttcggtagccttttatatacttgtagcgtgaactggagaggtatcacctaatagaactgataaacaacatccctaccgtatcttcttctccaatcttcctctacctcttctccacgccaaatcgtggtcgcgttagtcatctcgtcggcgaggtcgccaacacctggtatcagaatcggcatcctagatccgctcagagctattccccgtcgaccccgatccactgccatgggaacacctacgctgccacacgcaaggtgctcgaagaaatacagctcatggaagctcgcctcacggagagggttgcgggctgttgccacgatattcaacaacgggtggagcaacggtgcgatgaaattcaccaacatttcacacatcgttgcgacaccagccatcaacaggtcgacctcgccgcgctgcgcggtgaggaacgacttctgtcactggaactgattaagactgacatcaacatcttgaagccagaggtcatgaagaaggtggaggacttatcgctggagatggcaagggttggcaagttcctggaacgggaatttcgacctctcgtcttcaaccagtcgggcatctttggtccatacccgtcggcgtccgcgcgtccgcctgcctgattccaccatgctgacggaccgtttggacgtcgccctgaactgcatcatcgggatcgtgagtccaggtcgcaaggagccctgactcatatcccggtcaagggtggcttctctgaagagctataggcatgcgaggggcctatgcgatcgttgtgccgagaagtggttcccaggccacaaatgcccaagtacaatggagttacaagtaattgaaggtttgggatatgttagaggaagagcaggtggctgaaccagcagtggaatcatgagagcagacattgatggctttgtcaattgcagcttggataagtgagaaatggcgaccaatgttgttgggcgttcaatagttatcatggaggctagcagtcaaagtggcaaatgatcaaatgttacattgtgtccatcaattgaccaaggctaaatggtatatgtctgactacaaatttagattggatctcatctttttgccgctgctatcagttgatctcgtggtgggcatggactgattgcaagcttatagtccaatgaaggttgattggtataacaaatggatggccatccataccaaggtcacactgtatatgtttacaaggcgtccagtcgtccttacctacaagacctatgtttgagctacgtttgtcaatgggtaattctaggactggacaaaattaggtcagtaaggaggaaacaatcgacccacgcattcagccacattcgtttgagcgggccgaagtgggtcgtgtaattgttatgggccaggctgcgtccgcccagtagttcggtagcattttatatacttatagcgtgaactggagaggtatcgcataatagaactgataaacaacatccctaccgtatcttcttctcc

SEQ ID NO: 81494 - DNA, 1347 bp, Zea Mays
atcacctaatagaactgataaacaacatccctaccgtatcttcttctccaatcttcctctacctcttctccacgccaaatcgtggtcgcgttagtcatctcgtcggcgaggtcgccaacacctggtatcagaatcggcatcctagatccgctcagagctattccccgtcgaccccgatccactgccatgggaacacctacgctgccacacgcaaggtgctcgaagaaatacagctcatggaagctcgcctcacggagagggttgcgggctgttgccacgatattcaacaacgggtggagcaacgaggtcatgaagaaggtggaggacttatcgctggagatggcaagggttggcaagttcctggaacgggaatttcgacctctcgtcttcaaccagtcgggcatctttggtccatacccgtcggcgtccgcgcgtccgcctgcctgattccaccatgctgacggaccgtttggacgtcgccctgaactgcatcatcgggatcgtgagtccaggtcgcaaggagccctgactcatatcccggtcaagggaggaggcatttaacctgacacatcatcgcgcatggtggcttctctgaagagctataggcatgcgaggggcctatgcgatcgttgtgccgagaagtggttcccaggccacaaatgcccaagtacaatggagttacaagtaattgaaggtttgggatatgttagaggaagagcaggtggctgaaccagcagtggaatcatgagagcagacattgatggctttgtcaattgcagcttggataagtgagaaatggcgaccaatgttgttgggcgttcaatagttatcatggaggctagcagtcaaagtggcaaatgatcaaatgttacattgtgtccatcaattgaccaaggctaaatggtatatgtctgactacaaatttagattggatctcatctttttgccgctgctatcagttgatctcgtggtgggcatggactgattgcaagcttatagtccaatgaaggttgattggtataacaaatggatggccatccataccaaggtcacactgtatatgtttacaaggcgtccagtcgtccttacctacaagacctatgtttgagctacgtttgtcaatgggtaattctaggactggacaaaattaggtcagtaaggaggaaacaatcgacccacgcattcagccacattcgtttgagcgggccgaagtgggtcgtgtaattgttatgggccaggctgcgtccgcccagtagttcggtagcattttatatacttatagcgtgaactggagaggtatcgcataatagaactgataaacaacatccctaccgtatcttcttctcc

SEQ ID NO: 81495 - DNA, 5077 bp, Zea Mays
ccgagctccctacgactacgaggctacaccgcagtcggtccggaagcccggcccaacttgccaggctggcctccgccgtggaccatcatcacccacgggaaacaggcgccgtgttaatggccgccacaacggtaaacgttacccttgccgaagagaagggaaaatagcagtagcgcccggatcccctctccttccctccagatcacaccactgccgcctccgcctgcaaatccatttctagactcaagctgttgctgcgagcgagctagggttggtgctcaggtctccagggtttcgcctccccgctcccggtgcccatcgccttggaccttggcctgccgggttagggttgggtcgcagctgcgggggccgtggggcggggatgcggccgatgcggcgatcgcgggcgatcgggaggctgtagcggcggcggggcagggtatctcttgggtggattctccggcgatggccgcagacgcactatccatcatcccgggcgccgtgcttcgcaacctctctgacaagctctacgagaagcggaagaacgccgcgcttgagattgagggaattgtgaagcagcttgcaacgtttggggagcatgagaagatatcagcggttatctcgctgctcaccaacgatttcacatattcgccacaggcgaaccatcgaaagggtgggttgattggccttgcagcagttactgttggactcaccagtgaggcagctcagcatctcgagcaaattgtacctcctgtgcttacttctttcctggaccaagatagtagagtgcgttactatgcttgtgaagcgctatacaacatagcaaaagtggtaagaggggatttcatcatctacttcaacaaaatttttgatgctttatgcaagctttctgcagattccgatgctaatgttcaaagtgccgctcaccttcttgataagcttgtcaagataattatttatccaccaggatatcgtaactgagagtgatcagttcagcatagaagaattcataccgctcttgagagagcgcatgaatgtgttgaacccttatgtaagacaatttttggttgggtggataacagtgttagatagtgttcctgatattgacatgcttggttttcttcctgattttcttgacggtttgttcaatatgctgagtgattccagtcatgagataaggcagcaagctgatgcagcactttctgagtttcttcaggagataaagaactcaccagtaaggctgctgctctatactgttagccatttaacagcttagacgttaaaaacattgtgggatgcttattcctttagttatccttttttattttctgtatactcttaaaggttgtgagatgttagtttggaaggtggaatgatacctttcggtatttagtatcaatgctatagagagacggggatattgatgaacatgttagccatagaatcaaagcagagtggatgaagttgtgtcaagctcaagcatttgacattctatgacaagagggtaccattttttttccctctcgaacacgcaggagagatgcacatctttatatattagagagaacgaaagaaggtcttacaagaagggagaaaaaacctgctatgcaggaatccccagaaaaacacagacccttagagctattacatgtttgttacataattttctccgaccacactaagggcttcggctaagcctaagctttcgggatgtttggttccagctagcacccagcgcgccaactcatctaagaaacctctctggaccttgccgatggaggagaatcaccctcaaaaaccacccggttacgctacagccataaacaccatgcacctagtataatggcactattaaggcctttcttgtctttatgcactcggttacaaactcttctccaccaatcaacaaaagcgatatcctctacatcaggggagagatgaccaagcccgaaaggagataagaagctgtgccaaaattgctttcggatgtgggaggcctcaaaagctaaaaggcgagttttataggatgacgattagacatgctatgttgcttgatgtagaatgttggcctaaaaaaagacgacaggttcagtatataagtgttacagaatgcttatgttacgttggatttatggccatacaagaagggatcaagtctagaacgacgatatatgtgataggctaggggtagcaccaattgaagaaacgtttgtccaacattggttgagatggtttggacatgtcttcatgagagaccttcagaggcaccagtgtatcctaacttcctaaggcatgatagtaatgggaagagaggaaggggaaggccgacgttgacatgggaagaggcagtgaaaggagacttgaaatgatggaatatatccgaagatttaaccttgaataggagtgcatggaaaacaactatcaacgttcctgaatcttgacttgtggcttctgttgggtttcaactctagtctaacctaacttgtttgacactaaaaggctttgttgttttatacttttaaaggctgcgcatgtcaagaaaacctatggccattacattaagaagaagacctcacgtaagtcgagaaaacccttgaacccttgccccatccatacacagtgacactatagtccatgtgagaatgaccgcgactggggccgggccttagacctatgctttggcgtgggacagacgatgggattttttaaccttagtctaaaattcgctcccatgggcagtcgaactcaggacactgaggagtgctactcagaccacaaccaaaaccaagtcagccctttcgctatactcttaaaggttttcttcattttttgttttcaatgctgattatcatacctaaaatgaaaagaatgtagattatggtcgtatggctgaaatactcgttcggagggcaggctctactgatgaattcactcggttgacatctatcacatggatcaacgagtttgtgaagcttggtggggaacaacttgttccctactatgcagatatattgggcgctgtcttaccatgcatatctgacgaggaggagaaaatccgagtggttgcacgcgaaacaaatgaggaactccgtgctataaaagctgatccagctgagggatttgatatcggagcaattctttcaatcgcaaaaagagaattgaacagtgaacatgaggccactcgaatcgaagcattgcattggttcttcactttgctggatcgatattgtgctgagttcttggcttacctgaacgatatttttgatccactcctaaatgcactttctgatccttcggacgcggttgtcctattagtattggaggttcatgcacgcatagctgaagaatctcaccacttccatcatcttgtatcctacctgatccgcaccttccacaacaaccattttgtactggagaagtgctgaaaaagtatatcgagagttctccactattcttgagagtgaagttgatcttgatttcgcatccgtcatggttcaggttttgaatttgattttgctcacatcaactgaacttggtgagctccgctctcctcttaagaagtcgttagtggattcttgtggcaaggacttgtttcagtctttatatgcttcatggcgccactctccgatggctacgataagtttatgtttacttgctcaggcatacaatcacgcaagctgtgttattcagtcactgggagaagaagacataaatgtgaattttttggttcaattagataaattgatccgtctcttagagactccagtatttgcttacttgcgtttacaggtaacttggtctgataatccgttcctgcaaatttatctttctgtttctcaggcacatttgaattccgaaacttggagagttctacctggcttttttaatttgatttctagtgctacattaatggcatgataagcctggaccaatctttgtctcatgctgtttatctgtagttctgtacatttactgtatgctcgccttttggtacaatgtttccagactattgctatcccctaatgattccacattcagtttggatgctgtaaaactaacatgttggggtttatgtgacgcaacatgatatgaaaactgtgatgacttgttggcaaaaaaaaactctagtacagagacttttgttgttatatcttcttactgatcattttggcatggaaattccacaacatgctcttaaaaatctgcagcttctcgagcctggaaaacacacttggcttctgaaaactctttacggtctcctgatgcttttgcctcagcaaagtgcggccttcaagatcttgaggactcgactgaagactgtgccattcagtgaaaatcttaagcgcacatcttcagcgaatccatactctcagattctgcaagtgacggaagatggcaatagaaaccaagatatgcagaactacagtgcaatcaatttcccattccttctccagcaatttgagaacatgcagctgcagcatcgtaaccatttgaaggatcaactgcaatcccgagatacaaagatacgaagaagcgcattcctcatcgctgtcagagattaacaggcccccttcaagaacatccaaaggcattttatgatgcatttgttcttgcgatgtatgatatatttgccggaagcatcaccacatatatgttggggctttggttagtctcctcgttttttttcaaaggaggttgcatagggtacatagtgtaatcttttctatttcgttcctagattttgtcaagagatggcaattatttgttggagaaagctcgttgccacattctagtcattcttttcttagtggtttcactgctcatctggtttctgtaatttttcaattgaaggccaaatgagcaaagtagtaattggagatagaaatatgttactactgtcctatctatcgatctccaataaattagcgttgcaatgtaaattcctgttggctcgtatgatatatttattatattatttatatgccttatctttacccccattttatattattacaatatcgcatttgggtcatgaacaaatttgcgttttgagtctctttttagtaggaactatcag

SEQ ID NO: 81496 - DNA, 5183 bp, Zea Mays
ccgagctccctacgactacgaggctacaccgcagtcggtccggaagcccggcccaacttgccaggctggcctccgccgtggaccatcatcacccacgggaaacaggcgccgtgttaatggccgccacaacggtaaacgttacccttgccgaagagaagggaaaatagcagtagcgcccggatcccctctccttccctccagatcacaccactgccgcctccgcctgcaaatccatttctagactcaagctgttgctgcgagcgagctagggttggtgctcaggtctccagggtttcgcctccccgctcccggtgcccatcgccttggaccttggcctgccgggttagggttgggtcgcagctgcgggggccgtggggcggggatgcggccgatgcggcgatcgcgggcgatcgggaggctgtagcggcggcggggcagggtatctcttgggtggattctccggcgatggccgcagacgcactatccatcatcccgggcgccgtgcttcgcaacctctctgacaagctctacgagaagcggaagaacgccgcgcttgagattgagggaattgtgaagcagcttgcaacgtttggggagcatgagaagatatcagcggttatctcgctgctcaccaacgatttcacatattcgccacaggcgaaccatcgaaagggtgggttgattggccttgcagcagttactgttggactcaccagtgaggcagctcagcatctcgagcaaattgtacctcctgtgcttacttctttcctggaccaagatagtagagtgcgttactatgcttgtgaagcgctatacaacatagcaaaagtggtaagaggggatttcatcatctacttcaacaaaatttttgatgctttatgcaagctttctgcagattccgatgctaatgttcaaagtgccgctcaccttcttgataagcttgtcaaggatatcgtaactgagagtgatcagttcaggtatgctgtgtattatttgccttttccttattaacgtgttgcttgttttaatgtctgtgttgattcctgatttggttttgctcttcagcatagaagaattcataccgctcttgagagagcgcatgaatgtgttgaacccttatgtaagacaatttttggttgggtggataacagtgttagatagtgttcctgatattgacatgcttggttttcttcctgattttcttgacggtttgttcaatatgctgagtgattccagtcatgagataaggcagcaagctgatgcagcactttctgagtttcttcaggagataaagaactcaccagtaaggctgctgctctatactgttagccatttaacagcttagacgttaaaaacattgtgggatgcttattcctttagttatccttttttattttctgtatactcttaaaggttgtgagatgttagtttggaaggtggaatgatacctttcggtatttagtatcaatgctatagagagacggggatattgatgaacatgttagccatagaatcaaagcagagtggatgaagttgtgtcaagctcaagcatttgacattctatgacaagagggtaccattttttttccctctcgaacacgcaggagagatgcacatctttatatattagagagaacgaaagaaggtcttacaagaagggagaaaaaacctgctatgcaggaatccccagaaaaacacagacccttagagctattacatgtttgttacataattttctccgaccacactaagggcttcggctaagcctaagctttcgggatgtttggttccagctagcacccagcgcgccaactcatctaagaaacctctctggaccttgccgatggaggagaatcaccctcaaaaaccacccggttacgctacagccataaacaccatgcacctagtataatggcactattaaggcctttcttgtctttatgcactcggttacaaactcttctccaccaatcaacaaaagcgatatcctctacatcaggggagagatgaccaagcccgaaaggagataagaagctgtgccaaaattgctttcggatgtgggaggcctcaaaagctaaaaggcgagttttataggatgacgattagacatgctatgttgcttgatgtagaatgttggcctaaaaaaagacgacaggttcagtatataagtgttacagaatgcttatgttacgttggatttatggccatacaagaagggatcaagtctagaacgacgatatatgtgataggctaggggtagcaccaattgaagaaacgtttgtccaacattggttgagatggtttggacatgtcttcatgagagaccttcagaggcaccagtgtatcctaacttcctaaggcatgatagtaatgggaagagaggaaggggaaggccgacgttgacatgggaagaggcagtgaaaggagacttgaaatgatggaatatatccgaagatttaaccttgaataggagtgcatggaaaacaactatcaacgttcctgaatcttgacttgtggcttctgttgggtttcaactctagtctaacctaacttgtttgacactaaaaggctttgttgttttatacttttaaaggctgcgcatgtcaagaaaacctatggccattacattaagaagaagacctcacgtaagtcgagaaaacccttgaacccttgccccatccatacacagtgacactatagtccatgtgagaatgaccgcgactggggccgggccttagacctatgctttggcgtgggacagacgatgggattttttaaccttagtctaaaattcgctcccatgggcagtcgaactcaggacactgaggagtgctactcagaccacaaccaaaaccaagtcagccctttcgctatactcttaaaggttttcttcattttttgttttcaatgctgattatcatacctaaaatgaaaagaatgtagattatggtcgtatggctgaaatactcgttcggagggcaggctctactgatgaattcactcggttgacatctatcacatggtgcagatcaacgagtttgtgaagcttggtggggaacaacttgttccctactatgcagatatattgggcgctgtcttaccatgcatatctgacgaggaggagaaaatccgagtggttgcacgcgaaacaaatgaggaactccgtgctataaaagctgatccagctgagggatttgatatcggagcaattctttcaatcgcaaaaagagaattgaacagtgaacatgaggccactcgaatcgaagcattgcattggttcttcactttgctggatcgatattgtgctgagttcttggcttacctgaacgatatttttgatccactcctaaatgcactttctgatccttcggacgcggttgtcctattagtattggaggttcatgcacgcatagctgaagaatctcaccacttccatcatcttgtatcctacctgatccgcaccttccacaacaaccattttgtactggagaagtgctgaaaaagtatatcgagagttctccactattcttgagagtgaagttgatcttgatttcgcatccgtcatggttcaggttttgaatttgattttgctcacatcaactgaacttggtgagctccgctctcctcttaagaagtcgttagtggattcttgtggcaaggacttgtttcagtctttatatgcttcatggcgccactctccgatggctacgataagtttatgtttacttgctcaggcatacaatcacgcaagctgtgttattcagtcactgggagaagaagacataaatgtgaattttttggttcaattagataaattgatccgtctcttagagactccagtatttgcttacttgcgtttacaggtaacttggtctgataatccgttcctgcaaatttatctttctgtttctcaggcacatttgaattccgaaacttggagagttctacctggcttttttaatttgatttctagtgctacattaatggcatgataagcctggaccaatctttgtctcatgctgtttatctgtagttctgtacatttactgtatgctcgccttttggtacaatgtttccagactattgctatcccctaatgattccacattcagtttggatgctgtaaaactaacatgttggggtttatgtgacgcaacatgatatgaaaactgtgatgacttgttggcaaaaaaaaactctagtacagagacttttgttgttatatcttcttactgatcattttggcatggaaattccacaacatgctcttaaaaatctgcagcttctcgagcctggaaaacacacttggcttctgaaaactctttacggtctcctgatgcttttgcctcagcaaagtgcggccttcaagatcttgaggactcgactgaagactgtgccattcagtgaaaatcttaagcgcacatcttcagcgaatccatactctcagattctgcaagtgacggaagatggcaatagaaaccaagatatgcagaactacagtgcaatcaatttcccattccttctccagcaatttgagaacatgcagctgcagcatcgtaaccatttgaaggatcaactgcaatcccgtaaatctgcttcgactttaacattatctcaggagatacaaagatacgaagaagcgcattcctcatcgctgtcagagattaacaggcccccttcaagaacatccaaaggcattttatgatgcatttgttcttgcgatgtatgatatatttgccggaagcatcaccacatatatgttggggctttggttagtctcctcgttttttttcaaaggaggttgcatagggtacatagtgtaatcttttctatttcgttcctagattttgtcaagagatggcaattatttgttggagaaagctcgttgccacattctagtcattcttttcttagtggtttcactgctcatctggtttctgtaatttttcaattgaaggccaaatgagcaaagtagtaattggagatagaaatatgttactactgtcctatctatcgatctccaataaattagcgttgcaatgtaaattcctgttggctcgtatgatatatttattatattatttatatgccttatctttacccccattttatattattacaatatcgcatttgggtcatgaacaaatttgcgttttgagtctctttttagtaggaactatcag

SEQ ID NO: 81497 - DNA, 5077 bp, Zea Mays
cctacgactacgaggctacaccgcagtcggtccggaagcccggcccaacttgccaggctggcctccgccgtggaccatcatcacccacgggaaacaggcgccgtgttaatggccgccacaacggtaaacgttacccttgccgaagagaagggaaaatagcagtagcgcccggatcccctctccttccctccagatcacaccactgccgcctccgcctgcaaatccatttctagactcaagctgttgctgcgagcgagctagggttggtgctcaggtctccagggtttcgcctccccgctcccggtgcccatcgccttggaccttggcctgccgggttagggttgggtcgcagctgcgggggccgtggggcggggatgcggccgatgcggcgatcgcgggcgatcgggaggctgtagcggcggcggggcagggtatctcttgggtggattctccggcgatggccgcagacgcactatccatcatcccgggcgccgtgcttcgcaacctctctgacaagctctacgagaagcggaagaacgccgcgcttgagattgagggaattgtgaagcagcttgcaacgtttggggagcatgagaagatatcagcggttatctcgctgctcaccaacgatttcacatattcgccacaggcgaaccatcgaaagggtgggttgattggccttgcagcagttactgttggactcaccagtgaggcagctcagcatctcgagcaaattgtacctcctgtgcttacttctttcctggaccaagatagtagagtgcgttactatgcttgtgaagcgctatacaacatagcaaaagtggtaagaggggatttcatcatctacttcaacaaaatttttgatgctttatgcaagctttctgcagattccgatgctaatgttcaaagtgccgctcaccttcttgataagcttgtcaaggatatcgtaactgagagtgatcagttcagcatagaagaattcataccgctcttgagagagcgcatgaatgtgttgaacccttatgtaagacaatttttggttgggtggataacagtgttagatagtgttcctgatattgacatgcttggttttcttcctgattttcttgacggtttgttcaatatgctgagtgattccagtcatgagataaggcagcaagctgatgcagcactttctgagtttcttcaggagataaagaactcaccagtaaggctgctgctctatactgttagccatttaacagcttagacgttaaaaacattgtgggatgcttattcctttagttatccttttttattttctgtatactcttaaaggttgtgagatgttagtttggaaggtggaatgatacctttcggtatttagtatcaatgctatagagagacggggatattgatgaacatgttagccatagaatcaaagcagagtggatgaagttgtgtcaagctcaagcatttgacattctatgacaagagggtaccattttttttccctctcgaacacgcaggagagatgcacatctttatatattagagagaacgaaagaaggtcttacaagaagggagaaaaaacctgctatgcaggaatccccagaaaaacacagacccttagagctattacatgtttgttacataattttctccgaccacactaagggcttcggctaagcctaagctttcgggatgtttggttccagctagcacccagcgcgccaactcatctaagaaacctctctggaccttgccgatggaggagaatcaccctcaaaaaccacccggttacgctacagccataaacaccatgcacctagtataatggcactattaaggcctttcttgtctttatgcactcggttacaaactcttctccaccaatcaacaaaagcgatatcctctacatcaggggagagatgaccaagcccgaaaggagataagaagctgtgccaaaattgctttcggatgtgggaggcctcaaaagctaaaaggcgagttttataggatgacgattagacatgctatgttgcttgatgtagaatgttggcctaaaaaaagacgacaggttcagtatataagtgttacagaatgcttatgttacgttggatttatggccatacaagaagggatcaagtctagaacgacgatatatgtgataggctaggggtagcaccaattgaagaaacgtttgtccaacattggttgagatggtttggacatgtcttcatgagagaccttcagaggcaccagtgtatcctaacttcctaaggcatgatagtaatgggaagagaggaaggggaaggccgacgttgacatgggaagaggcagtgaaaggagacttgaaatgatggaatatatccgaagatttaaccttgaataggagtgcatggaaaacaactatcaacgttcctgaatcttgacttgtggcttctgttgggtttcaactctagtctaacctaacttgtttgacactaaaaggctttgttgttttatacttttaaaggctgcgcatgtcaagaaaacctatggccattacattaagaagaagacctcacgtaagtcgagaaaacccttgaacccttgccccatccatacacagtgacactatagtccatgtgagaatgaccgcgactggggccgggccttagacctatgctttggcgtgggacagacgatgggattttttaaccttagtctaaaattcgctcccatgggcagtcgaactcaggacactgaggagtgctactcagaccacaaccaaaaccaaaatgtagattatggtcgtatggctgaaatactcgttcggagggcaggctctactgatgaattcactcggttgacatctatcacatggatcaacgagtttgtgaagcttggtggggaacaacttgttccctactatgcagatatattgggcgctgtcttaccatgcatatctgacgaggaggagaaaatccgagtggttgcacgcgaaacaaatgaggaactccgtgctataaaagctgatccagctgagggatttgatatcggagcaattctttcaatcgcaaaaagagaattgaacagtgaacatgaggccactcgaatcgaagcattgcattggttcttcactttgctggatcgatattgtgctgagttcttggcttacctgaacgatatttttgatccactcctaaatgcactttctgatccttcggacgcggttgtcctattagtattggaggttcatgcacgcatagctgaagaatctcaccacttccatcatcttgtatcctacctgatccgcaccttccacaacaaccattttgtactggagaaacgtggtgctttgatagtccgtcggctctgtgttcttctaggtgctgaaaaagtatatcgagagttctccactattcttgagagtgaagttgatcttgatttcgcatccgtcatggttcaggttttgaatttgattttgctcacatcaactgaacttggtgagctccgctctcctcttaagaagtcgttagtggattcttgtggcaaggacttgtttcagtctttatatgcttcatggcgccactctccgatggctacgataagtttatgtttacttgctcaggcatacaatcacgcaagctgtgttattcagtcactgggagaagaagacataaatgtgaattttttggttcaattagataaattgatccgtctcttagagactccagtatttgcttacttgcgtttacaggtaacttggtctgataatccgttcctgcaaatttatctttctgtttctcaggcacatttgaattccgaaacttggagagttctacctggcttttttaatttgatttctagtgctacattaatggcatgataagcctggaccaatctttgtctcatgctgtttatctgtagttctgtacatttactgtatgctcgccttttggtacaatgtttccagactattgctatcccctaatgattccacattcagtttggatgctgtaaaactaacatgttggggtttatgtgacgcaacatgatatgaaaactgtgatgacttgttggcaaaaaaaaactctagtacagagacttttgttgttatatcttcttactgatcattttggcatggaaattccacaacatgctcttaaaaatctgcagcttctcgagcctggaaaacacacttggcttctgaaaactctttacggtctcctgatgcttttgcctcaggtcaaacttctaaccagactctgttgggagagattatacatcgtggggtttatatgtttacacagcaaagtgcggccttcaagatcttgaggactcgactgaagactgtgccattcagtgaaaatcttaagcgcacatcttcagcgaatccatactctcagattctgcaagtgacggaagatggcaatagaaaccaagatatgcagaactacagtgcaatcaatttcccattccttctccagcaatttgagaacatgcagctgcagcatcgtaaccatttgaaggatcaactgcaatcccgagatacaaagatacgaagaagcgcattcctcatcgctgtcagagattaacaggcccccttcaagaacatccaaaggcattttatgatgcatttgttcttgcgatgtatgatatatttgccggaagcatcaccacatatatgttggggctttggttagtctcctcgttttttttcaaaggaggttgcatagggtacatagtgtaatcttttctatttcgttcctagattttgtcaagagatggcaattatttgttggagaaagctcgttgccacattctagtcattcttttcttagtggtttcactgctcatctggtttctgtaatttttcaattgaaggccaaatgagcaaagtagtaattggagatagaaatatgttactactgtcctatctatcgatctccaataaattagcgttgcaatgtaaattcctgttggctcgtatgatatatttattatattatttatatgccttatctttacccccattttatattattacaatatcgcatttgggtcatgaacaaatttgcgttttgagtctctttttagtaggaactatcag

SEQ ID NO: 81498 - DNA, 3474 bp, Zea Mays
tacaccgcagtcggtccggaagcccggcccaacttgccaggctggcctccgccgtggaccatcatcacccacgggaaacaggcgccgtgttaatggccgccacaacggtaaacgttacccttgccgaagagaagggaaaatagcagtagcgcccggatcccctctccttccctccagatcacaccactgccgcctccgcctgcaaatccatttctagactcaagctgttgctgcgagcgagctagggttggtgctcaggtctccagggtttcgcctccccgctcccggtgcccatcgccttggaccttggcctgccgggttagggttgggtcgcagctgcgggggccgtggggcggggatgcggccgatgcggcgatcgcgggcgatcgggaggctgtagcggcggcggggcagggtatctcttgggtggattctccggcgatggccgcagacgcactatccatcatcccgggcgccgtgcttcgcaacctctctgacaagctctacgagaagcggaagaacgccgcgcttgagattgagggaattgtgaagcagcttgcaacgtttggggagcatgagaagatatcagcggttatctcgctgctcaccaacgatttcacatattcgccacaggcgaaccatcgaaagggtgggttgattggccttgcagcagttactgttggactcaccagtgaggcagctcagcatctcgagcaaattgtacctcctgtgcttacttctttcctggaccaagatagtagagtgcgttactatgcttgtgaagcgctatacaacatagcaaaagtggtaagaggggatttcatcatctacttcaacaaaatttttgatgctttatgcaagctttctgcagattccgatgctaatgttcaaagtgccgctcaccttcttgataagcttgtcaaggatatcgtaactgagagtgatcagttcagcatagaagaattcataccgctcttgagagagcgcatgaatgtgttgaacccttatgtaagacaatttttggttgggtggataacagtgttagatagtgttcctgatattgacatgcttggttttcttcctgattttcttgacggtttgttcaatatgctgagtgattccagtcatgagataaggcagcaagctgatgcagcactttctgagtttcttcaggagataaagaactcaccaaatgtagattatggtcgtatggctgaaatactcgttcggagggcaggctctactgatgaattcactcggttgacatctatcacatggatcaacgagtttgtgaagcttggtggggaacaacttgttccctactatgcagatatattgggcgctgtcttaccatgcatatctgacgaggaggagaaaatccgagtggttgcacgcgaaacaaatgaggaactccgtgctataaaagctgatccagctgagggatttgatatcggagcaattctttcaatcgcaaaaagagaattgaacagtgaacatgaggccactcgaatcgaagcattgcattggttcttcactttgctggatcgatattgtgctgagttcttggcttacctgaacgatatttttgatccactcctaaatgcactttctgatccttcggacgcggttgtcctattagtattggaggttcatgcacgcatagctgaagaatctcaccacttccatcatcttgtatcctacctgatccgcaccttccacaacaaccattttgtactggagaaacgtggtgctttgatagtccgtcggctctgtgttcttctaggtgctgaaaaagtatatcgagagttctccactattcttgagagtgaagttgatcttgatttcgcatccgtcatggttcaggttttgaatttgattttgctcacatcaactgaacttggtgagctccgctctcctcttaagaagtcgttagtggattcttgtggcaaggacttgtttcagtctttatatgcttcatggcgccactctccgatggctacgataagtttatgtttacttgctcaggcatacaatcacgcaagctgtgttattcagtcactgggagaagaagacataaatgtgaattttttggttcaattagataaattgatccgtctcttagagactccagtatttgcttacttgcgtttacaggtaacttggtctgataatccgttcctgcaaatttatctttctgtttctcaggcacatttgaattccgaaacttggagagttctacctggcttttttaatttgatttctagtgctacattaatggcatgataagcctggaccaatctttgtctcatgctgtttatctgtagttctgtacatttactgtatgctcgccttttggtacaatgtttccagactattgctatcccctaatgattccacattcagtttggatgctgtaaaactaacatgttggggtttatgtgacgcaacatgatatgaaaactgtgatgacttgttggcaaaaaaaaactctagtacagagacttttgttgttatatcttcttactgatcattttggcatggaaattccacaacatgctcttaaaaatctgcagcttctcgagcctggaaaacacacttggcttctgaaaactctttacggtctcctgatgcttttgcctcagcaaagtgcggccttcaagatcttgaggactcgactgaagactgtgccattcagtgaaaatcttaagcgcacatcttcagcgaatccatactctcagattctgcaagtgacggaagatggcaatagaaaccaagatatgcagaactacagtgcaatcaatttcccattccttctccagcaatttgagaacatgcagctgcagcatcgtaaccatttgaaggatcaactgcaatcccgtaaatctgcttcgactttaacattatctcaggagatacaaagatacgaagaagcgcattcctcatcgctgtcagagattaacaggcccccttcaagaacatccaaaggcattttatgatgcatttgttcttgcgatgtatgatatatttgccggaagcatcaccacatatatgttggggctttggttagtctcctcgttttttttcaaaggaggttgcatagggtacatagtgtaatcttttctatttcgttcctagattttgtcaagagatggcaattatttgttggagaaagctcgttgccacattctagtcattcttttcttagtggtttcactgctcatctggtttctgtaatttttcaattgaaggccaaatgagcaaagtagtaattggagatagaaatatgttactactgtcctatctatcgatctccaataaattagcgttgcaatgtaaattcctgttggctcgtatgatatatttattatattatttatatgccttatctttacccccattttatattattacaatatcgcatttgggtcatgaacaaatttgcgttttgagtctctttttagtaggaactatcag

SEQ ID NO: 81499 - DNA, 2973 bp, Zea Mays
gtcggtccggaagcccggcccaacttgccaggctggcctccgccgtggaccatcatcacccacgggaaacaggcgccgtgttaatggccgccacaacggtaaacgttacccttgccgaagagaagggaaaatagcagtagcgcccggatcccctctccttccctccagatcacaccactgccgcctccgcctgcaaatccatttctagactcaagctgttgctgcgagcgagctagggttggtgctcaggtctccagggtttcgcctccccgctcccggtgcccatcgccttggaccttggcctgccgggttagggttgggtcgcagctgcgggggccgtggggcggggatgcggccgatgcggcgatcgcgggcgatcgggaggctgtagcggcggcggggcagggtatctcttgggtggattctccggcgatggccgcagacgcactatccatcatcccgggcgccgtgcttcgcaacctctctgacaagctctacgagaagcggaagaacgccgcgcttgagattgagggaattgtgaagcagcttgcaacgtttggggagcatgagaagatatcagcggttatctcgctgctcaccaacgatttcacatattcgccacaggcgaaccatcgaaagggtgggttgattggccttgcagcagttactgttggactcaccagtgaggcagctcagcatctcgagcaaattgtacctcctgtgcttacttctttcctggaccaagatagtagagtgcgttactatgcttgtgaagcgctatacaacatagcaaaagtggtaagaggggatttcatcatctacttcaacaaaatttttgatgctttatgcaagctttctgcagattccgatgctaatgttcaaagtgccgctcaccttcttgataagcttgtcaaggatatcgtaactgagagtgatcagttcagcatagaagaattcataccgctcttgagagagcgcatgaatgtgttgaacccttatgtaagacaatttttggttgggtggataacagtgttagatagtgttcctgatattgacatgcttggttttcttcctgattttcttgacggtttgttcaatatgctgagtgattccagtcatgagataaggcagcaagctgatgcagcactttctgagtttcttcaggagataaagaactcaccaaatgtagattatggtcgtatggctgaaatactcgttcggagggcaggctctactgatgaattcactcggttgacatctatcacatggatcaacgagtttgtgaagcttggtggggaacaacttgttccctactatgcagatatattgggcgctgtcttaccatgcatatctgacgaggaggagaaaatccgagtggttgcacgcgaaacaaatgaggaactccgtgctataaaagctgatccagctgagggatttgatatcggagcaattctttcaatcgcaaaaagagaattgaacagtgaacatgaggccactcgaatcgaagcattgcattggttcttcactttgctggatcgatattgtgctgagttcttggcttacctgaacgatatttttgatccactcctaaatgcactttctgatccttcggacgcggttgtcctattagtattggaggttcatgcacgcatagctgaagaatctcaccacttccatcatcttgtatcctacctgatccgcaccttccacaacaaccattttgtactggagaaacgtggtgctttgatagtccgtcggctctgtgttcttctaggtgctgaaaaagtatatcgagagttctccactattcttgagagtgaagttgatcttgatttcgcatccgtcatggttcaggttttgaatttgattttgctcacatcaactgaacttggtgagctccgctctcctcttaagaagtcgttagtggattcttgtggcaaggacttgtttcagtctttatatgcttcatggcgccactctccgatggctacgataagtttatgtttacttgctcaggcatacaatcacgcaagctgtgttattcagtcactgggagaagaagacataaatgtgaattttttggttcaattagataaattgatccgtctcttagagactccagtatttgcttacttgcgtttacagcttctcgagcctggaaaacacacttggcttctgaaaactctttacggtctcctgatgcttttgcctcagcaaagtgcggccttcaagatcttgaggactcgactgaagactgtgccattcagtgaaaatcttaagcgcacatcttcagcgaatccatactctcagattctgcaagtgacggaagatggcaatagaaaccaagatatgcagaactacagtgcaatcaatttcccattccttctccagcaatttgagaacatgcagctgcagcatcgtaaccatttgaaggatcaactgcaatcccgtaaatctgcttcgactttaacattatctcaggagatacaaagatacgaagaagcgcattcctcatcgctgtcagagattaacaggcccccttcaagaacatccaaaggcattttatgatgcatttgttcttgcgatgtatgatatatttgccggaagcatcaccacatatatgttggggctttgattttgtcaagagatggcaattatttgttggagaaagctcgttgccacattctagtcattcttttcttagtggtttcactgctcatctggtttctgtaatttttcaattgaaggccaaatgagcaaagtagtaattggagatagaaatatgttactactgtcctatctatcgatctccaataaattagcgttgcaatgtaaattcctgttggctcgtatgatatatttattatattatttatatgccttatctttacccccattttatattattacaatatcgcatttgggtcatgaacaaatttgcgttttgagtctctttttagtaggaactatcag

SEQ ID NO: 81500 - DNA, 2939 bp, Zea Mays
caacttgccaggctggcctccgccgtggaccatcatcacccacgggaaacaggcgccgtgttaatggccgccacaacggtaaacgttacccttgccgaagagaagggaaaatagcagtagcgcccggatcccctctccttccctccagatcacaccactgccgcctccgcctgcaaatccatttctagactcaagctgttgctgcgagcgagctagggttggtgctcaggtctccagggtttcgcctccccgctcccggtgcccatcgccttggaccttggcctgccgggttagggttgggtcgcagctgcgggggccgtggggcggggatgcggccgatgcggcgatcgcgggcgatcgggaggctgtagcggcggcggggcagggtatctcttgggtggattctccggcgatggccgcagacgcactatccatcatcccgggcgccgtgcttcgcaacctctctgacaagctctacgagaagcggaagaacgccgcgcttgagattgagggaattgtgaagcagcttgcaacgtttggggagcatgagaagatatcagcggttatctcgctgctcaccaacgatttcacatattcgccacaggcgaaccatcgaaagggtgggttgattggccttgcagcagttactgttggactcaccagtgaggcagctcagcatctcgagcaaattgtacctcctgtgcttacttctttcctggaccaagatagtagagtgcgttactatgcttgtgaagcgctatacaacatagcaaaagtggtaagaggggatttcatcatctacttcaacaaaatttttgatgctttatgcaagctttctgcagattccgatgctaatgttcaaagtgccgctcaccttcttgataagcttgtcaaggatatcgtaactgagagtgatcagttcagcatagaagaattcataccgctcttgagagagcgcatgaatgtgttgaacccttatgtaagacaatttttggttgggtggataacagtgttagatagtgttcctgatattgacatgcttggttttcttcctgattttcttgacggtttgttcaatatgctgagtgattccagtcatgagataaggcagcaagctgatgcagcactttctgagtttcttcaggagataaagaactcaccaatcaacgagtttgtgaagcttggtggggaacaacttgttccctactatgcagatatattgggcgctgtcttaccatgcatatctgacgaggaggagaaaatccgagtggttgcacgcgaaacaaatgaggaactccgtgctataaaagctgatccagctgagggatttgatatcggagcaattctttcaatcgcaaaaagagaattgaacagtgaacatgaggccactcgaatcgaagcattgcattggttcttcactttgctggatcgatattgtgctgagttcttggcttacctgaacgatatttttgatccactcctaaatgcactttctgatccttcggacgcggttgtcctattagtattggaggttcatgcacgcatagctgaagaatctcaccacttccatcatcttgtatcctacctgatccgcaccttccacaacaaccattttgtactggagaaacgtggtgctttgatagtccgtcggctctgtgttcttctaggtgctgaaaaagtatatcgagagttctccactattcttgagagtgaagttgatcttgatttcgcatccgtcatggttcaggttttgaatttgattttgctcacatcaactgaacttggtgagctccgctctcctcttaagaagtcgttagtggattcttgtggcaaggacttgtttcagtctttatatgcttcatggcgccactctccgatggctacgataagtttatgtttacttgctcaggcatacaatcacgcaagctgtgttattcagtcactgggagaagaagacataaatgtgaattttttggttcaattagataaattgatccgtctcttagagactccagtatttgcttacttgcgtttacagcttctcgagcctggaaaacacacttggcttctgaaaactctttacggtctcctgatgcttttgcctcagcaaagtgcggccttcaagatcttgaggactcgactgaagactgtgccattcagtgaaaatcttaagcgcacatcttcagcgaatccatactctcagattctgcaagtgacggaagatggcaatagaaaccaagatatgcagaactacagtgcaatcaatttcccattccttctccagcaatttgagaacatgcagctgcagcatcgtaaccatttgaaggatcaactgcaatcccgtaaatctgcttcgactttaacattatctcaggagatacaaagatacgaagaagcgcattcctcatcgctgtcagagattaacaggcccccttcaagaacatccaaaggcattttatgatgcatttgttcttgcgatgtatgatatatttgccggaagcatcaccacatatatgttggggctttggttagtctcctcgttttttttcaaaggaggttgcatagggtacatagtgtaatcttttctatttcgttcctagattttgtcaagagatggcaattatttgttggagaaagctcgttgccacattctagtcattcttttcttagtggtttcactgctcatctggtttctgtaatttttcaattgaaggccaaatgagcaaagtagtaattggagatagaaatatgttactactgtcctatctatcgatctccaataaattagcgttgcaatgtaaattcctgttggctcgtatgatatatttattatattatttatatgccttatctttacccccattttatattattacaatatcgcatttgggtcatgaacaaatttgcgttttgagtctctttttagtaggaactatcag

SEQ ID NO: 81501 - DNA, 3498 bp, Zea Mays
ctggcctccgccgtggaccatcatcacccacgggaaacaggcgccgtgttaatggccgccacaacggtaaacgttacccttgccgaagagaagggaaaatagcagtagcgcccggatcccctctccttccctccagatcacaccactgccgcctccgcctgcaaatccatttctagactcaagctgttgctgcgagcgagctagggttggtgctcaggtctccagggtttcgcctccccgctcccggtgcccatcgccttggaccttggcctgccgggttagggttgggtcgcagctgcgggggccgtggggcggggatgcggccgatgcggcgatcgcgggcgatcgggaggctgtagcggcggcggggcagggtatctcttgggtggattctccggcgatggccgcagacgcactatccatcatcccgggcgccgtgcttcgcaacctctctgacaagctctacgagaagcggaagaacgccgcgcttgagattgagggaattgtgaagcagcttgcaacgtttggggagcatgagaagatatcagcggttatctcgctgctcaccaacgatttcacatattcgccacaggcgaaccatcgaaagggtgggttgattggccttgcagcagttactgttggactcaccagtgaggcagctcagcatctcgagcaaattgtacctcctgtgcttacttctttcctggaccaagatagtagagtgcgttactatgcttgtgaagcgctatacaacatagcaaaagtggtaagaggggatttcatcatctacttcaacaaaatttttgatgctttatgcaagctttctgcagattccgatgctaatgttcaaagtgccgctcaccttcttgataagcttgtcaaggatatcgtaactgagagtgatcagttcagcatagaagaattcataccgctcttgagagagcgcatgaatgtgttgaacccttatgtaagacaatttttggttgggtggataacagtgttagatagtgttcctgatattgacatgcttggttttcttcctgattttcttgacggtttgttcaatatgctgagtgattccagtcatgagataaggcagcaagctgatgcagcactttctgagtttcttcaggagataaagaactcaccaaatgtagattatggtcgtatggctgaaatactcgttcggagggcaggctctactgatgaattcactcggttgacatctatcacatggatcaacgagtttgtgaagcttggtggggaacaacttgttccctactatgcagatatattgggcgctgtcttaccatgcatatctgacgaggaggagaaaatccgagtggttgcacgcgaaacaaatgaggaactccgtgctataaaagctgatccagctgagggatttgatatcggagcaattctttcaatcgcaaaaagagaattgaacagtgaacatgaggccactcgaatcgaagcattgcattggttcttcactttgctggatcgatattgtgctgagttcttggcttacctgaacgatatttttgatccactcctaaatgcactttctgatccttcggacgcggttgtcctattagtattggaggttcatgcacgcatagctgaagaatctcaccacttccatcatcttgtatcctacctgatccgcaccttccacaacaaccattttgtactggagaaacgtggtgctttgatagtccgtcggctctgtgttcttctaggtgctgaaaaagtatatcgagagttctccactattcttgagagtgaagttgatcttgatttcgcatccgtcatggttcaggttttgaatttgattttgctcacatcaactgaacttggtgagctccgctctcctcttaagaagtcgttagtggattcttgtggcaaggacttgtttcagtctttatatgcttcatggcgccactctccgatggctacgataagtttatgtttacttgctcaggcatacaatcacgcaagctgtgttattcagtcactgggagaagaagacataaatgtgaattttttggttcaattagataaattgatccgtctcttagagactccagtatttgcttacttgcgtttacaggtaacttggtctgataatccgttcctgcaaatttatctttctgtttctcaggcacatttgaattccgaaacttggagagttctacctggcttttttaatttgatttctagtgctacattaatggcatgataagcctggaccaatctttgtctcatgctgtttatctgtagttctgtacatttactgtatgctcgccttttggtacaatgtttccagactattgctatcccctaatgattccacattcagtttggatgctgtaaaactaacatgttggggtttatgtgacgcaacatgatatgaaaactgtgatgacttgttggcaaaaaaaaactctagtacagagacttttgttgttatatcttcttactgatcattttggcatggaaattccacaacatgctcttaaaaatctgcagcttctcgagcctggaaaacacacttggcttctgaaaactctttacggtctcctgatgcttttgcctcaggtcaaacttctaaccagactctgttgggagagattatacatcgtggggtttatatgtttacacagcaaagtgcggccttcaagatcttgaggactcgactgaagactgtgccattcagtgaaaatcttaagcgcacatcttcagcgaatccatactctcagattctgcaagtgacggaagatggcaatagaaaccaagatatgcagaactacagtgcaatcaatttcccattccttctccagcaatttgagaacatgcagctgcagcatcgtaaccatttgaaggatcaactgcaatcccgtaaatctgcttcgactttaacattatctcaggagatacaaagatacgaagaagcgcattcctcatcgctgtcagagattaacaggcccccttcaagaacatccaaaggcattttatgatgcatttgttcttgcgatgtatgatatatttgccggaagcatcaccacatatatgttggggctttggttagtctcctcgttttttttcaaaggaggttgcatagggtacatagtgtaatcttttctatttcgttcctagattttgtcaagagatggcaattatttgttggagaaagctcgttgccacattctagtcattcttttcttagtggtttcactgctcatctggtttctgtaatttttcaattgaaggccaaatgagcaaagtagtaattggagatagaaatatgttactactgtcctatctatcgatctccaataaattagcgttgcaatgtaaattcctgttggctcgtatgatatatttattatattatttatatgccttatctttacccccattttatattattacaatatcgcatttgggtcatgaacaaatttgcgttttgagtctctttttagtaggaactatcag

SEQ ID NO: 81502 - DNA, 2861 bp, Zea Mays
ctggcctccgccgtggaccatcatcacccacgggaaacaggcgccgtgttaatggccgccacaacggtaaacgttacccttgccgaagagaagggaaaatagcagtagcgcccggatcccctctccttccctccagatcacaccactgccgcctccgcctgcaaatccatttctagactcaagctgttgctgcgagcgagctagggttggtgctcaggtctccagggtttcgcctccccgctcccggtgcccatcgccttggaccttggcctgccgggttagggttgggtcgcagctgcgggggccgtggggcggggatgcggccgatgcggcgatcgcgggcgatcgggaggctgtagcggcggcggggcagggtatctcttgggtggattctccggcgatggccgcagacgcactatccatcatcccgggcgccgtgcttcgcaacctctctgacaagctctacgagaagcggaagaacgccgcgcttgagattgagggaattgtgaagcagcttgcaacgtttggggagcatgagaagatatcagcggttatctcgctgctcaccaacgatttcacatattcgccacaggcgaaccatcgaaagggtgggttgattggccttgcagcagttactgttggactcaccagtgaggcagctcagcatctcgagcaaattgtacctcctgtgcttacttctttcctggaccaagatagtagagtgcgttactatgcttgtgaagcgctatacaacatagcaaaagtggtaagaggggatttcatcatctacttcaacaaaatttttgatgctttatgcaagctttctgcagattccgatgctaatgttcaaagtgccgctcaccttcttgataagcttgtcaaggatatcgtaactgagagtgatcagttcagcatagaagaattcataccgctcttgagagagcgcatgaatgtgttgaacccttatgtaagacaatttttggttgggtggataacagtgttagatagtgttcctgatattgacatgcttggttttcttcctgattttcttgacggtttgttcaatatgctgagtgattccagtcatgagataaggcagcaagctgatgcagcactttctgagtttcttcaggagataaagaactcaccaatcaacgagtttgtgaagcttggtggggaacaacttgttccctactatgcagatatattgggcgctgtcttaccatgcatatctgacgaggaggagaaaatccgagtggttgcacgcgaaacaaatgaggaactccgtgctataaaagctgatccagctgagggatttgatatcggagcaattctttcaatcgcaaaaagagaattgaacagtgaacatgaggccactcgaatcgaagcattgcattggttcttcactttgctggatcgatattgtgctgaggttgtcctattagtattggaggttcatgcacgcatagctgaagaatctcaccacttccatcatcttgtatcctacctgatccgcaccttccacaacaaccattttgtactggagaaacgtggtgctttgatagtccgtcggctctgtgttcttctaggtgctgaaaaagtatatcgagagttctccactattcttgagagtgaagttgatcttgatttcgcatccgtcatggttcaggttttgaatttgattttgctcacatcaactgaacttggtgagctccgctctcctcttaagaagtcgttagtggattcttgtggcaaggacttgtttcagtctttatatgcttcatggcgccactctccgatggctacgataagtttatgtttacttgctcaggcatacaatcacgcaagctgtgttattcagtcactgggagaagaagacataaatgtgaattttttggttcaattagataaattgatccgtctcttagagactccagtatttgcttacttgcgtttacagcttctcgagcctggaaaacacacttggcttctgaaaactctttacggtctcctgatgcttttgcctcagcaaagtgcggccttcaagatcttgaggactcgactgaagactgtgccattcagtgaaaatcttaagcgcacatcttcagcgaatccatactctcagattctgcaagtgacggaagatggcaatagaaaccaagatatgcagaactacagtgcaatcaatttcccattccttctccagcaatttgagaacatgcagctgcagcatcgtaaccatttgaaggatcaactgcaatcccgtaaatctgcttcgactttaacattatctcaggagatacaaagatacgaagaagcgcattcctcatcgctgtcagagattaacaggcccccttcaagaacatccaaaggcattttatgatgcatttgttcttgcgatgtatgatatatttgccggaagcatcaccacatatatgttggggctttggttagtctcctcgttttttttcaaaggaggttgcatagggtacatagtgtaatcttttctatttcgttcctagattttgtcaagagatggcaattatttgttggagaaagctcgttgccacattctagtcattcttttcttagtggtttcactgctcatctggtttctgtaatttttcaattgaaggccaaatgagcaaagtagtaattggagatagaaatatgttactactgtcctatctatcgatctccaataaattagcgttgcaatgtaaattcctgttggctcgtatgatatatttattatattatttatatgccttatctttacccccattttatattattacaatatcgcatttgggtcatgaacaaatttgcgttttgagtctctttttagtaggaactatcag

SEQ ID NO: 81503 - DNA, 4948 bp, Zea Mays
ctggcctccgccgtggaccatcatcacccacgggaaacaggcgccgtgttaatggccgccacaacggtaaacgttacccttgccgaagagaagggaaaatagcagtagcgcccggatcccctctccttccctccagatcacaccactgccgcctccgcctgcaaatccatttctagactcaagctgttgctgcgagcgagctagggttggtgctcaggtctccagggtttcgcctccccgctcccggtgcccatcgccttggaccttggcctgccgggttagggttgggtcgcagctgcgggggccgtggggcggggatgcggccgatgcggcgatcgcgggcgatcgggaggctgtagcggcggcggggcagggtatctcttgggtggattctccggcgatggccgcagacgcactatccatcatcccgggcgccgtgcttcgcaacctctctgacaagctctacgagaagcggaagaacgccgcgcttgagattgagggaattgtgaagcagcttgcaacgtttggggagcatgagaagatatcagcggttatctcgctgctcaccaacgatttcacatattcgccacaggcgaaccatcgaaagggtgggttgattggccttgcagcagttactgttggactcaccagtgaggcagctcagcatctcgagcaaattgtacctcctgtgcttacttctttcctggaccaagatagtagagtgcgttactatgcttgtgaagcgctatacaacatagcaaaagtggtaagaggggatttcatcatctacttcaacaaaatttttgatgctttatgcaagctttctgcagattccgatgctaatgttcaaagtgccgctcaccttcttgataagcttgtcaaggatatcgtaactgagagtgatcagttcagcatagaagaattcataccgctcttgagagagcgcatgaatgtgttgaacccttatgtaagacaatttttggttgggtggataacagtgttagatagtgttcctgatattgacatgcttggttttcttcctgattttcttgacggtttgttcaatatgctgagtgattccagtcatgagataaggcagcaagctgatgcagcactttctgagtttcttcaggagataaagaactcaccagttgtgagatgttagtttggaaggtggaatgatacctttcggtatttagtatcaatgctatagagagacggggatattgatgaacatgttagccatagaatcaaagcagagtggatgaagttgtgtcaagctcaagcatttgacattctatgacaagagggtaccattttttttccctctcgaacacgcaggagagatgcacatctttatatattagagagaacgaaagaaggtcttacaagaagggagaaaaaacctgctatgcaggaatccccagaaaaacacagacccttagagctattacatgtttgttacataattttctccgaccacactaagggcttcggctaagcctaagctttcgggatgtttggttccagctagcacccagcgcgccaactcatctaagaaacctctctggaccttgccgatggaggagaatcaccctcaaaaaccacccggttacgctacagccataaacaccatgcacctagtataatggcactattaaggcctttcttgtctttatgcactcggttacaaactcttctccaccaatcaacaaaagcgatatcctctacatcaggggagagatgaccaagcccgaaaggagataagaagctgtgccaaaattgctttcggatgtgggaggcctcaaaagctaaaaggcgagttttataggatgacgattagacatgctatgttgcttgatgtagaatgttggcctaaaaaaagacgacaggttcagtatataagtgttacagaatgcttatgttacgttggatttatggccatacaagaagggatcaagtctagaacgacgatatatgtgataggctaggggtagcaccaattgaagaaacgtttgtccaacattggttgagatggtttggacatgtcttcatgagagaccttcagaggcaccagtgtatcctaacttcctaaggcatgatagtaatgggaagagaggaaggggaaggccgacgttgacatgggaagaggcagtgaaaggagacttgaaatgatggaatatatccgaagatttaaccttgaataggagtgcatggaaaacaactatcaacgttcctgaatcttgacttgtggcttctgttgggtttcaactctagtctaacctaacttgtttgacactaaaaggctttgttgttttatacttttaaaggctgcgcatgtcaagaaaacctatggccattacattaagaagaagacctcacgtaagtcgagaaaacccttgaacccttgccccatccatacacagtgacactatagtccatgtgagaatgaccgcgactggggccgggccttagacctatgctttggcgtgggacagacgatgggattttttaaccttagtctaaaattcgctcccatgggcagtcgaactcaggacactgaggagtgctactcagaccacaaccaaaaccaagtcagccctttcgctatactcttaaaggttttcttcattttttgttttcaatgctgattatcatacctaaaatgaaaagaatgtagattatggtcgtatggctgaaatactcgttcggagggcaggctctactgatgaattcactcggttgacatctatcacatggatcaacgagtttgtgaagcttggtggggaacaacttgttccctactatgcagatatattgggcgctgtcttaccatgcatatctgacgaggaggagaaaatccgagtggttgcacgcgaaacaaatgaggaactccgtgctataaaagctgatccagctgagggatttgatatcggagcaattctttcaatcgcaaaaagagaattgaacagtgaacatgaggccactcgaatcgaagcattgcattggttcttcactttgctggatcgatattgtgctgagttcttggcttacctgaacgatatttttgatccactcctaaatgcactttctgatccttcggacgcggttgtcctattagtattggaggttcatgcacgcatagctgaagaatctcaccacttccatcatcttgtatcctacctgatccgcaccttccacaacaaccattttgtactggagaaacgtggtgctttgatagtccgtcggctctgtgttcttctaggtgctgaaaaagtatatcgagagttctccactattcttgagagtgaagttgatcttgatttcgcatccgtcatggttcaggttttgaatttgattttgctcacatcaactgaacttggtgagctccgctctcctcttaagaagtcgttagtggattcttgtggcaaggacttgtttcagtctttatatgcttcatggcgccactctccgatggctacgataagtttatgtttacttgctcaggcatacaatcacgcaagctgtgttattcagtcactgggagaagaagacataaatgtgaattttttggttcaattagataaattgatccgtctcttagagactccagtatttgcttacttgcgtttacaggtaacttggtctgataatccgttcctgcaaatttatctttctgtttctcaggcacatttgaattccgaaacttggagagttctacctggcttttttaatttgatttctagtgctacattaatggcatgataagcctggaccaatctttgtctcatgctgtttatctgtagttctgtacatttactgtatgctcgccttttggtacaatgtttccagactattgctatcccctaatgattccacattcagtttggatgctgtaaaactaacatgttggggtttatgtgacgcaacatgatatgaaaactgtgatgacttgttggcaaaaaaaaactctagtacagagacttttgttgttatatcttcttactgatcattttggcatggaaattccacaacatgctcttaaaaatctgcagcttctcgagcctggaaaacacacttggcttctgaaaactctttacggtctcctgatgcttttgcctcaggtcaaacttctaaccagactctgttgggagagattatacatcgtggggtttatatgtttacacagcaaagtgcggccttcaagatcttgaggactcgactgaagactgtgccattcagtgaaaatcttaagcgcacatcttcagcgaatccatactctcagattctgcaagtgacggaagatggcaatagaaaccaagatatgcagaactacagtgcaatcaatttcccattccttctccagcaatttgagaacatgcagctgcagcatcgtaaccatttgaaggatcaactgcaatcccgtaaatctgcttcgactttaacattatctcaggagatacaaagatacgaagaagcgcattcctcatcgctgtcagagattaacaggcccccttcaagaacatccaaaggcattttatgatgcatttgttcttgcgatgtatgatatatttgccggaagcatcaccacatatatgttggggctttgattttgtcaagagatggcaattatttgttggagaaagctcgttgccacattctagtcattcttttcttagtggtttcactgctcatctggtttctgtaatttttcaattgaaggccaaatgagcaaagtagtaattggagatagaaatatgttactactgtcctatctatcgatctccaataaattagcgttgcaatgtaaattcctgttggctcgtatgatatatttattatattatttatatgccttatctttacccccattttatattattacaatatcgcatttgggtcatgaacaaatttgcgttttgagtctctttttagtaggaactatcag

SEQ ID NO: 81504 - DNA, 5033 bp, Zea Mays
ccgtggaccatcatcacccacgggaaacaggcgccgtgttaatggccgccacaacggtaaacgttacccttgccgaagagaagggaaaatagcagtagcgcccggatcccctctccttccctccagatcacaccactgccgcctccgcctgcaaatccatttctagactcaagctgttgctgcgagcgagctagggttggtgctcaggtctccagggtttcgcctccccgctcccggtgcccatcgccttggaccttggcctgccgggttagggttgggtcgcagctgcgggggccgtggggcggggatgcggccgatgcggcgatcgcgggcgatcgggaggctgtagcggcggcggggcagggtatctcttgggtggattctccggcgatggccgcagacgcactatccatcatcccgggcgccgtgcttcgcaacctctctgacaagctctacgagaagcggaagaacgccgcgcttgagattgagggaattgtgaagcagcttgcaacgtttggggagcatgagaagatatcagcggttatctcgctgctcaccaacgatttcacatattcgccacaggcgaaccatcgaaagcaaattgtacctcctgtgcttacttctttcctggaccaagatagtagagtgcgttactatgcttgtgaagcgctatacaacatagcaaaagtggtaagaggggatttcatcatctacttcaacaaaatttttgatgctttatgcaagctttctgcagattccgatgctaatgttcaaagtgccgctcaccttcttgataagcttgtcaagataattatttatccaccaggatatcgtaactgagagtgatcagttcagcatagaagaattcataccgctcttgagagagcgcatgaatgtgttgaacccttatgtaagacaatttttggttgggtggataacagtgttagatagtgttcctgatattgacatgcttggttttcttcctgattttcttgacggtttgttcaatatgctgagtgattccagtcatgagataaggcagcaagctgatgcagcactttctgagtttcttcaggagataaagaactcaccagtaaggctgctgctctatactgttagccatttaacagcttagacgttaaaaacattgtgggatgcttattcctttagttatccttttttattttctgtatactcttaaaggttgtgagatgttagtttggaaggtggaatgatacctttcggtatttagtatcaatgctatagagagacggggatattgatgaacatgttagccatagaatcaaagcagagtggatgaagttgtgtcaagctcaagcatttgacattctatgacaagagggtaccattttttttccctctcgaacacgcaggagagatgcacatctttatatattagagagaacgaaagaaggtcttacaagaagggagaaaaaacctgctatgcaggaatccccagaaaaacacagacccttagagctattacatgtttgttacataattttctccgaccacactaagggcttcggctaagcctaagctttcgggatgtttggttccagctagcacccagcgcgccaactcatctaagaaacctctctggaccttgccgatggaggagaatcaccctcaaaaaccacccggttacgctacagccataaacaccatgcacctagtataatggcactattaaggcctttcttgtctttatgcactcggttacaaactcttctccaccaatcaacaaaagcgatatcctctacatcaggggagagatgaccaagcccgaaaggagataagaagctgtgccaaaattgctttcggatgtgggaggcctcaaaagctaaaaggcgagttttataggatgacgattagacatgctatgttgcttgatgtagaatgttggcctaaaaaaagacgacaggttcagtatataagtgttacagaatgcttatgttacgttggatttatggccatacaagaagggatcaagtctagaacgacgatatatgtgataggctaggggtagcaccaattgaagaaacgtttgtccaacattggttgagatggtttggacatgtcttcatgagagaccttcagaggcaccagtgtatcctaacttcctaaggcatgatagtaatgggaagagaggaaggggaaggccgacgttgacatgggaagaggcagtgaaaggagacttgaaatgatggaatatatccgaagatttaaccttgaataggagtgcatggaaaacaactatcaacgttcctgaatcttgacttgtggcttctgttgggtttcaactctagtctaacctaacttgtttgacactaaaaggctttgttgttttatacttttaaaggctgcgcatgtcaagaaaacctatggccattacattaagaagaagacctcacgtaagtcgagaaaacccttgaacccttgccccatccatacacagtgacactatagtccatgtgagaatgaccgcgactggggccgggccttagacctatgctttggcgtgggacagacgatgggattttttaaccttagtctaaaattcgctcccatgggcagtcgaactcaggacactgaggagtgctactcagaccacaaccaaaaccaagtcagccctttcgctatactcttaaaggttttcttcattttttgttttcaatgctgattatcatacctaaaatgaaaagaatgtagattatggtcgtatggctgaaatactcgttcggagggcaggctctactgatgaattcactcggttgacatctatcacatggatcaacgagtttgtgaagcttggtggggaacaacttgttccctactatgcagatatattgggcgctgtcttaccatgcatatctgacgaggaggagaaaatccgagtggttgcacgcgaaacaaatgaggaactccgtgctataaaagctgatccagctgagggatttgatatcggagcaattctttcaatcgcaaaaagagaattgaacagtgaacatgaggccactcgaatcgaagcattgcattggttcttcactttgctggatcgatattgtgctgagttcttggcttacctgaacgatatttttgatccactcctaaatgcactttctgatccttcggacgcggttgtcctattagtattggaggttcatgcacgcatagctgaagaatctcaccacttccatcatcttgtatcctacctgatccgcaccttccacaacaaccattttgtactggagaagtgctgaaaaagtatatcgagagttctccactattcttgagagtgaagttgatcttgatttcgcatccgtcatggttcaggttttgaatttgattttgctcacatcaactgaacttggtgagctccgctctcctcttaagaagtcgttagtggattcttgtggcaaggacttgtttcagtctttatatgcttcatggcgccactctccgatggctacgataagtttatgtttacttgctcaggcatacaatcacgcaagctgtgttattcagtcactgggagaagaagacataaatgtgaattttttggttcaattagataaattgatccgtctcttagagactccagtatttgcttacttgcgtttacaggtaacttggtctgataatccgttcctgcaaatttatctttctgtttctcaggcacatttgaattccgaaacttggagagttctacctggcttttttaatttgatttctagtgctacattaatggcatgataagcctggaccaatctttgtctcatgctgtttatctgtagttctgtacatttactgtatgctcgccttttggtacaatgtttccagactattgctatcccctaatgattccacattcagtttggatgctgtaaaactaacatgttggggtttatgtgacgcaacatgatatgaaaactgtgatgacttgttggcaaaaaaaaactctagtacagagacttttgttgttatatcttcttactgatcattttggcatggaaattccacaacatgctcttaaaaatctgcagcttctcgagcctggaaaacacacttggcttctgaaaactctttacggtctcctgatgcttttgcctcaggtcaaacttctaaccagactctgttgggagagattatacatcgtggggtttatatgtttacacagcaaagtgcggccttcaagatcttgaggactcgactgaagactgtgccattcagtgaaaatcttaagcgcacatcttcagcgaatccatactctcagattctgcaagtgacggaagatggcaatagaaaccaagatatgcagaactacagtgcaatcaatttcccattccttctccagcaatttgagaacatgcagctgcagcatcgtaaccatttgaaggatcaactgcaatcccgtaaatctgcttcgactttaacattatctcaggagatacaaagatacgaagaagcgcattcctcatcgctgtcagagattaacaggcccccttcaagaacatccaaaggcattttatgatgcatttgttcttgcgatgtatgatatatttgccggaagcatcaccacatatatgttggggctttggttagtctcctcgttttttttcaaaggaggttgcatagggtacatagtgtaatcttttctatttcgttcctagattttgtcaagagatggcaattatttgttggagaaagctcgttgccacattctagtcattcttttcttagtggtttcactgctcatctggtttctgtaatttttcaattgaaggccaaatgagcaaagtagtaattggagatagaaatatgttactactgtcctatctatcgatctccaataaattagcgttgcaatgtaaattcctgttggctcgtatgatatatttattatattatttatatgccttatctttacccccattttatattattacaatatcgcatttgggtcatgaacaaatttgcgttttgagtctctttttagtaggaactatcag

SEQ ID NO: 81505 - DNA, 4616 bp, Zea Mays
gggaaacaggcgccgtgttaatggccgccacaacggtaaacgttacccttgccgaagagaagggaaaatagcagtagcgcccggatcccctctccttccctccagatcacaccactgccgcctccgcctgcaaatccatttctagactcaagctgttgctgcgagcgagctagggttggtgctcaggtctccagggtttcgcctccccgctcccggtgcccatcgccttggaccttggcctgccgggttagggttgggtcgcagctgcgggggccgtggggcggggatgcggccgatgcggcgatcgcgggcgatcgggaggctgtagcggcggcggggcagggtatctcttgggtggattctccggcgatggccgcagacgcactatccatcatcccgggcgccgtgcttcgcaacctctctgacaagctctacgagaagcggaagaacgccgcgcttgagattgagggaattgtgaagcagcttgcaacgtttggggagcatgagaagatatcagcggttatctcgctgctcaccaacgatttcacatattcgccacaggcgaaccatcgaaagggtgggttgattggccttgcagcagttactgttggactcaccagtgaggcagctcagcatctcgagcaaattgtacctcctgtgcttacttctttcctggaccaagatagtagagtgcgttactatgcttgtgaagcgctatacaacatagcaaaagtggtaagaggggatttcatcatctacttcaacaaaatttttgatgctttatgcaagctttctgcagattccgatgctaatgttcaaagtgccgctcaccttcttgataagcttgtcaaggatatcgtaactgagagtgatcagttcagcatagaagaattcataccgctcttgagagagcgcatgaatgtgttgaacccttatgtaagacaatttttggttgggtggataacagtgttagatagtgttcctgatattgacatgcttggttttcttcctgattttcttgacggtttgttcaatatgctgagtgattccagtcatgagataaggcagcaagctgatgcagcactttctgagtttcttcaggagataaagaactcaccagtaaggctgctgctctatactgttagccatttaacagcttagacgttaaaaacattgtgggatgcttattcctttagttatccttttttattttctgtatactcttaaaggttgtgagatgttagtttggaaggtggaatgatacctttcggtatttagtatcaatgctatagagagacggggatattgatgaacatgttagccatagaatcaaagcagagtggatgaagttgtgtcaagctcaagcatttgacattctatgacaagagggtaccattttttttccctctcgaacacgcaggagagatgcacatctttatatattagagagaacgaaagaaggtcttacaagaagggagaaaaaacctgctatgcaggaatccccagaaaaacacagacccttagagctattacatgtttgttacataattttctccgaccacactaagggcttcggctaagcctaagctttcgggatgtttggttccagctagcacccagcgcgccaactcatctaagaaacctctctggaccttgccgatggaggagaatcaccctcaaaaaccacccggttacgctacagccataaacaccatgcacctagtataatggcactattaaggcctttcttgtctttatgcactcggttacaaactcttctccaccaatcaacaaaagcgatatcctctacatcaggggagagatgaccaagcccgaaaggagataagaagctgtgccaaaattgctttcggatgtgggaggcctcaaaagctaaaaggcgagttttataggatgacgattagacatgctatgttgcttgatgtagaatgttggcctaaaaaaagacgacaggttcagtatataagtgttacagaatgcttatgttacgttggatttatggccatacaagaagggatcaagtctagaacgacgatatatgtgataggctaggggtagcaccaattgaagaaacgtttgtccaacattggttgagatggtttggacatgtcttcatgagagaccttcagaggcaccagtgtatcctaacttcctaaggcatgatagtaatgggaagagaggaaggggaaggccgacgttgacatgggaagaggcagtgaaaggagacttgaaatgatggaatatatccgaagatttaaccttgaataggagtgcatggaaaacaactatcaacgttcctgaatcttgacttgtggcttctgttgggtttcaactctagtctaacctaacttgtttgacactaaaaggctttgttgttttatacttttaaaggctgcgcatgtcaagaaaacctatggccattacattaagaagaagacctcacgtaagtcgagaaaacccttgaacccttgccccatccatacacagtgacactatagtccatgtgagaatgaccgcgactggggccgggccttagacctatgctttggcgtgggacagacgatgggattttttaaccttagtctaaaattcgctcccatgggcagtcgaactcaggacactgaggagtgctactcagaccacaaccaaaaccaagtcagccctttcgctatactcttaaaggttttcttcattttttgttttcaatgctgattatcatacctaaaatgaaaagaatgtagattatggtcgtatggctgaaatactcgttcggagggcaggctctactgatgaattcactcggttgacatctatcacatggatcaacgagtttgtgaagcttggtggggaacaacttgttccctactatgcagatatattgggcgctgtcttaccatgcatatctgacgaggaggagaaaatccgagtggttgcacgcgaaacaaatgaggaactccgtgctataaaagctgatccagctgagggatttgatatcggagcaattctttcaatcgcaaaaagagaattgaacagtgaacatgaggccactcgaatcgaagcattgcattggttcttcactttgctggatcgatattgtgctgagttcttggcttacctgaacgatatttttgatccactcctaaatgcactttctgatccttcggacgcggttgtcctattagtattggaggttcatgcacgcatagctgaagaatctcaccacttccatcatcttgtatcctacctgatccgcaccttccacaacaaccattttgtactggagaaacgtggtgctttgatagtccgtcggctctgtgttcttctaggtgctgaaaaagtatatcgagagttctccactattcttgagagtgaagttgatcttgatttcgcatccgtcatggttcaggttttgaatttgattttgctcacatcaactgaacttggtgagctccgctctcctcttaagaagtcgttagtggattcttgtggcaaggacttgtttcagtctttatatgcttcatggcgccactctccgatggctacgataagtttatgtttacttgctcaggcatacaatcacgcaagctgtgttattcagtcactgggagaagaagacataaatgtgaattttttggttcaattagataaattgatccgtctcttagagactccagtatttgcttacttgcgtttacagcttctcgagcctggaaaacacacttggcttctgaaaactctttacggtctcctgatgcttttgcctcagcaaagtgcggccttcaagatcttgaggactcgactgaagactgtgccattcagtgaaaatcttaagcgcacatcttcagcgaatccatactctcagattctgcaagtgacggaagatggcaatagaaaccaagatatgcagaactacagtgcaatcaatttcccattccttctccagcaatttgagaacatgcagctgcagcatcgtaaccatttgaaggatcaactgcaatcccgtaaatctgcttcgactttaacattatctcaggagatacaaagatacgaagaagcgcattcctcatcgctgtcagagattaacaggcccccttcaagaacatccaaaggcattttatgatgcatttgttcttgcgatgtatgatatatttgccggaagcatcaccacatatatgttggggctttggttagtctcctcgttttttttcaaaggaggttgcatagggtacatagtgtaatcttttctatttcgttcctagattttgtcaagagatggcaattatttgttggagaaagctcgttgccacattctagtcattcttttcttagtggtttcactgctcatctggtttctgtaatttttcaattgaaggccaaatgagcaaagtagtaattggagatagaaatatgttactactgtcctatctatcgatctccaataaattagcgttgcaatgtaaattcctgttggctcgtatgatatatttattatattatttatatgccttatctttacccccattttatattattacaatatcgcatttgggtcatgaacaaatttgcgttttgagtctctttttagtaggaactatcag

SEQ ID NO: 81506 - DNA, 3356 bp, Zea Mays
ccgccacaacggtaaacgttacccttgccgaagagaagggaaaatagcagtagcgcccggatcccctctccttccctccagatcacaccactgccgcctccgcctgcaaatccatttctagactcaagctgttgctgcgagcgagctagggttggtgctcaggtctccagggtttcgcctccccgctcccggtgcccatcgccttggaccttggcctgccgggttagggttgggtcgcagctgcgggggccgtggggcggggatgcggccgatgcggcgatcgcgggcgatcgggaggctgtagcggcggcggggcagggtatctcttgggtggattctccggcgatggccgcagacgcactatccatcatcccgggcgccgtgcttcgcaacctctctgacaagctctacgagaagcggaagaacgccgcgcttgagattgagggaattgtgaagcagcttgcaacgtttggggagcatgagaagatatcagcggttatctcgctgctcaccaacgatttcacatattcgccacaggcgaaccatcgaaagggtgggttgattggccttgcagcagttactgttggactcaccagtgaggcagctcagcatctcgagcaaattgtacctcctgtgcttacttctttcctggaccaagatagtagagtgcgttactatgcttgtgaagcgctatacaacatagcaaaagtggtaagaggggatttcatcatctacttcaacaaaatttttgatgctttatgcaagctttctgcagattccgatgctaatgttcaaagtgccgctcaccttcttgataagcttgtcaaggatatcgtaactgagagtgatcagttcagcatagaagaattcataccgctcttgagagagcgcatgaatgtgttgaacccttatgtaagacaatttttggttgggtggataacagtgttagatagtgttcctgatattgacatgcttggttttcttcctgattttcttgacggtttgttcaatatgctgagtgattccagtcatgagataaggcagcaagctgatgcagcactttctgagtttcttcaggagataaagaactcaccaatcaacgagtttgtgaagcttggtggggaacaacttgttccctactatgcagatatattgggcgctgtcttaccatgcatatctgacgaggaggagaaaatccgagtggttgcacgcgaaacaaatgaggaactccgtgctataaaagctgatccagctgagggatttgatatcggagcaattctttcaatcgcaaaaagagaattgaacagtgaacatgaggccactcgaatcgaagcattgcattggttcttcactttgctggatcgatattgtgctgagttcttggcttacctgaacgatatttttgatccactcctaaatgcactttctgatccttcggacgcggttgtcctattagtattggaggttcatgcacgcatagctgaagaatctcaccacttccatcatcttgtatcctacctgatccgcaccttccacaacaaccattttgtactggagaaacgtggtgctttgatagtccgtcggctctgtgttcttctaggtgctgaaaaagtatatcgagagttctccactattcttgagagtgaagttgatcttgatttcgcatccgtcatggttcaggttttgaatttgattttgctcacatcaactgaacttggtgagctccgctctcctcttaagaagtcgttagtggattcttgtggcaaggacttgtttcagtctttatatgcttcatggcgccactctccgatggctacgataagtttatgtttacttgctcaggcatacaatcacgcaagctgtgttattcagtcactgggagaagaagacataaatgtgaattttttggttcaattagataaattgatccgtctcttagagactccagtatttgcttacttgcgtttacaggtaacttggtctgataatccgttcctgcaaatttatctttctgtttctcaggcacatttgaattccgaaacttggagagttctacctggcttttttaatttgatttctagtgctacattaatggcatgataagcctggaccaatctttgtctcatgctgtttatctgtagttctgtacatttactgtatgctcgccttttggtacaatgtttccagactattgctatcccctaatgattccacattcagtttggatgctgtaaaactaacatgttggggtttatgtgacgcaacatgatatgaaaactgtgatgacttgttggcaaaaaaaaactctagtacagagacttttgttgttatatcttcttactgatcattttggcatggaaattccacaacatgctcttaaaaatctgcagcttctcgagcctggaaaacacacttggcttctgaaaactctttacggtctcctgatgcttttgcctcaggtcaaacttctaaccagactctgttgggagagattatacatcgtggggtttatatgtttacacagcaaagtgcggccttcaagatcttgaggactcgactgaagactgtgccattcagtgaaaatcttaagcgcacatcttcagcgaatccatactctcagattctgcaagtgacggaagatggcaatagaaaccaagatatgcagaactacagtgcaatcaatttcccattccttctccagcaatttgagaacatgcagctgcagcatcgtaaccatttgaaggatcaactgcaatcccgtaaatctgcttcgactttaacattatctcaggagatacaaagatacgaagaagcgcattcctcatcgctgtcagagattaacaggcccccttcaagaacatccaaaggcattttatgatgcatttgttcttgcgatgtatgatatatttgccggaagcatcaccacatatatgttggggctttggttagtctcctcgttttttttcaaaggaggttgcatagggtacatagtgtaatcttttctatttcgttcctagattttgtcaagagatggcaattatttgttggagaaagctcgttgccacattctagtcattcttttcttagtggtttcactgctcatctggtttctgtaatttttcaattgaaggccaaatgagcaaagtagtaattggagatagaaatatgttactactgtcctatctatcgatctccaataaattagcgttgcaatgtaaattcctgttggctcgtatgatatatttattatattatttatatgccttatctttacccccattttatattattacaatatcgcatttgggtcatgaacaaatttgcgttttgagtctctttttagtaggaactatcag

SEQ ID NO: 81507 - DNA, 3024 bp, Zea Mays
ccgccacaacggtaaacgttacccttgccgaagagaagggaaaatagcagtagcgcccggatcccctctccttccctccagatcacaccactgccgcctccgcctgcaaatccatttctagactcaagctgttgctgcgagcgagctagggttggtgctcaggtctccagggtttcgcctccccgctcccggtgcccatcgccttggaccttggcctgccgggttagggttgggtcgcagctgcgggggccgtggggcggggatgcggccgatgcggcgatcgcgggcgatcgggaggctgtagcggcggcggggcagggtatctcttgggtggattctccggcgatggccgcagacgcactatccatcatcccgggcgccgtgcttcgcaacctctctgacaagctctacgagaagcggaagaacgccgcgcttgagattgagggaattgtgaagcagcttgcaacgtttggggagcatgagaagatatcagcggttatctcgctgctcaccaacgatttcacatattcgccacaggcgaaccatcgaaagggtgggttgattggccttgcagcagttactgttggactcaccagtgaggcagctcagcatctcgagcaaattgtacctcctgtgcttacttctttcctggaccaagatagtagagtgcgttactatgcttgtgaagcgctatacaacatagcaaaagtggtaagaggggatttcatcatctacttcaacaaaatttttgatgctttatgcaagctttctgcagattccgatgctaatgttcaaagtgccgctcaccttcttgataagcttgtcaaggatatcgtaactgagagtgatcagttcagcatagaagaattcataccgctcttgagagagcgcatgaatgtgttgaacccttatgtaagacaatttttggttgggtggataacagtgttagatagtgttcctgatattgacatgcttggttttcttcctgattttcttgacggtttgttcaatatgctgagtgattccagtcatgagataaggcagcaagctgatgcagcactttctgagtttcttcaggagataaagaactcaccaaatgtagattatggtcgtatggctgaaatactcgttcggagggcaggctctactgatgaattcactcggttgacatctatcacatggatcaacgagtttgtgaagcttggtggggaacaacttgttccctactatgcagatatattgggcgctgtcttaccatgcatatctgacgaggaggagaaaatccgagtggttgcacgcgaaacaaatgaggaactccgtgctataaaagctgatccagctgagggatttgatatcggagcaattctttcaatcgcaaaaagagaattgaacagtgaacatgaggccactcgaatcgaagcattgcattggttcttcactttgctggatcgatattgtgctgagttcttggcttacctgaacgatatttttgatccactcctaaatgcactttctgatccttcggacgcggttgtcctattagtattggaggttcatgcacgcatagctgaagaatctcaccacttccatcatcttgtatcctacctgatccgcaccttccacaacaaccattttgtactggagaaacgtggtgctttgatagtccgtcggctctgtgttcttctaggtgctgaaaaagtatatcgagagttctccactattcttgagagtgaagttgatcttgatttcgcatccgtcatggttcaggttttgaatttgattttgctcacatcaactgaacttggtgagctccgctctcctcttaagaagtcgttagtggattcttgtggcaaggacttgtttcagtctttatatgcttcatggcgccactctccgatggctacgataagtttatgtttacttgctcaggcatacaatcacgcaagctgtgttattcagtcactgggagaagaagacataaatgtgaattttttggttcaattagataaattgatccgtctcttagagactccagtatttgcttacttgcgtttacagcttctcgagcctggaaaacacacttggcttctgaaaactctttacggtctcctgatgcttttgcctcaggtcaaacttctaaccagactctgttgggagagattatacatcgtggggtttatatgtttacacagcaaagtgcggccttcaagatcttgaggactcgactgaagactgtgccattcagtgaaaatcttaagcgcacatcttcagcgaatccatactctcagattctgcaagtgacggaagatggcaatagaaaccaagatatgcagaactacagtgcaatcaatttcccattccttctccagcaatttgagaacatgcagctgcagcatcgtaaccatttgaaggatcaactgcaatcccgtaaatctgcttcgactttaacattatctcaggagatacaaagatacgaagaagcgcattcctcatcgctgtcagagattaacaggcccccttcaagaacatccaaaggcattttatgatgcatttgttcttgcgatgtatgatatatttgccggaagcatcaccacatatatgttggggctttggttagtctcctcgttttttttcaaaggaggttgcatagggtacatagtgtaatcttttctatttcgttcctagattttgtcaagagatggcaattatttgttggagaaagctcgttgccacattctagtcattcttttcttagtggtttcactgctcatctggtttctgtaatttttcaattgaaggccaaatgagcaaagtagtaattggagatagaaatatgttactactgtcctatctatcgatctccaataaattagcgttgcaatgtaaattcctgttggctcgtatgatatatttattatattatttatatgccttatctttacccccattttatattattacaatatcgcatttgggtcatgaacaaatttgcgttttgagtctctttttagtaggaactatcag

SEQ ID NO: 81508 - DNA, 3007 bp, Zea Mays
ccgccacaacggtaaacgttacccttgccgaagagaagggaaaatagcagtagcgcccggatcccctctccttccctccagatcacaccactgccgcctccgcctgcaaatccatttctagactcaagctgttgctgcgagcgagctagggttggtgctcaggtctccagggtttcgcctccccgctcccggtgcccatcgccttggaccttggcctgccgggttagggttgggtcgcagctgcgggggccgtggggcggggatgcggccgatgcggcgatcgcgggcgatcgggaggctgtagcggcggcggggcagggtatctcttgggtggattctccggcgatggccgcagacgcactatccatcatcccgggcgccgtgcttcgcaacctctctgacaagctctacgagaagcggaagaacgccgcgcttgagattgagggaattgtgaagcagcttgcaacgtttggggagcatgagaagatatcagcggttatctcgctgctcaccaacgatttcacatattcgccacaggcgaaccatcgaaagggtgggttgattggccttgcagcagttactgttggactcaccagtgaggcagctcagcatctcgagcaaattgtacctcctgtgcttacttctttcctggaccaagatagtagagtgcgttactatgcttgtgaagcgctatacaacatagcaaaagtggtaagaggggatttcatcatctacttcaacaaaatttttgatgctttatgcaagctttctgcagattccgatgctaatgttcaaagtgccgctcaccttcttgataagcttgtcaaggatatcgtaactgagagtgatcagttcagcatagaagaattcataccgctcttgagagagcgcatgaatgtgttgaacccttatgtaagacaatttttggttgggtggataacagtgttagatagtgttcctgatattgacatgcttggttttcttcctgattttcttgacggtttgttcaatatgctgagtgattccagtcatgagataaggcagcaagctgatgcagcactttctgagtttcttcaggagataaagaactcaccaaatgtagattatggtcgtatggctgaaatactcgttcggagggcaggctctactgatgaattcactcggttgacatctatcacatggatcaacgagtttgtgaagcttggtggggaacaacttgttccctactatgcagatatattgggcgctgtcttaccatgcatatctgacgaggaggagaaaatccgagtggttgcacgcgaaacaaatgaggaactccgtgctataaaagctgatccagctgagggatttgatatcggagcaattctttcaatcgcaaaaagagaattgaacagtgaacatgaggccactcgaatcgaagcattgcattggttcttcactttgctggatcgatattgtgctgagttcttggcttacctgaacgatatttttgatccactcctaaatgcactttctgatccttcggacgcggttgtcctattagtattggaggttcatgcacgcatagctgaagaatctcaccacttccatcatcttgtatcctacctgatccgcaccttccacaacaaccattttgtactggagaaacgtggtgctttgatagtccgtcggctctgtgttcttctaggtgctgaaaaagtatatcgagagttctccactattcttgagagtgaagttgatcttgatttcgcatccgtcatggttcaggttttgaatttgattttgctcacatcaactgaacttggtgagctccgctctcctcttaagaagtcgttagtggattcttgtggcaaggacttgtttcagtctttatatgcttcatggcgccactctccgatggctacgataagtttatgtttacttgctcaggcatacaatcacgcaagctgtgttattcagtcactgggagaagaagacataaatgtgaattttttggttcaattagataaattgatccgtctcttagagactccagtatttgcttacttgcgtttacagcttctcgagcctggaaaacacacttggcttctgaaaactctttacggtctcctgatgcttttgcctcagactctgttgggagagattatacatcgtggggtttatatgtttacacagcaaagtgcggccttcaagatcttgaggactcgactgaagactgtgccattcagtgaaaatcttaagcgcacatcttcagcgaatccatactctcagattctgcaagtgacggaagatggcaatagaaaccaagatatgcagaactacagtgcaatcaatttcccattccttctccagcaatttgagaacatgcagctgcagcatcgtaaccatttgaaggatcaactgcaatcccgtaaatctgcttcgactttaacattatctcaggagatacaaagatacgaagaagcgcattcctcatcgctgtcagagattaacaggcccccttcaagaacatccaaaggcattttatgatgcatttgttcttgcgatgtatgatatatttgccggaagcatcaccacatatatgttggggctttggttagtctcctcgttttttttcaaaggaggttgcatagggtacatagtgtaatcttttctatttcgttcctagattttgtcaagagatggcaattatttgttggagaaagctcgttgccacattctagtcattcttttcttagtggtttcactgctcatctggtttctgtaatttttcaattgaaggccaaatgagcaaagtagtaattggagatagaaatatgttactactgtcctatctatcgatctccaataaattagcgttgcaatgtaaattcctgttggctcgtatgatatatttattatattatttatatgccttatctttacccccattttatattattacaatatcgcatttgggtcatgaacaaatttgcgttttgagtctctttttagtaggaactatcag

SEQ ID NO: 81509 - DNA, 2927 bp, Zea Mays
ccgccacaacggtaaacgttacccttgccgaagagaagggaaaatagcagtagcgcccggatcccctctccttccctccagatcacaccactgccgcctccgcctgcaaatccatttctagactcaagctgttgctgcgagcgagctagggttggtgctcaggtctccagggtttcgcctccccgctcccggtgcccatcgccttggaccttggcctgccgggttagggttgggtcgcagctgcgggggccgtggggcggggatgcggccgatgcggcgatcgcgggcgatcgggaggctgtagcggcggcggggcagggtatctcttgggtggattctccggcgatggccgcagacgcactatccatcatcccgggcgccgtgcttcgcaacctctctgacaagctctacgagaagcggaagaacgccgcgcttgagattgagggaattgtgaagcagcttgcaacgtttggggagcatgagaagatatcagcggttatctcgctgctcaccaacgatttcacatattcgccacaggcgaaccatcgaaagggtgggttgattggccttgcagcagttactgttggactcaccagtgaggcagctcagcatctcgagcaaattgtacctcctgtgcttacttctttcctggaccaagatagtagagtgcgttactatgcttgtgaagcgctatacaacatagcaaaagtggtaagaggggatttcatcatctacttcaacaaaatttttgatgctttatgcaagctttctgcagattccgatgctaatgttcaaagtgccgctcaccttcttgataagcttgtcaaggatatcgtaactgagagtgatcagttcagcatagaagaattcataccgctcttgagagagcgcatgaatgtgttgaacccttatgtaagacaatttttggttgggtggataacagtgttagatagtgttcctgatattgacatgcttggttttcttcctgattttcttgacggtttgttcaatatgctgagtgattccagtcatgagataaggcagcaagctgatgcagcactttctgagtttcttcaggagataaagaactcaccaaatgtagattatggtcgtatggctgaaatactcgttcggagggcaggctctactgatgaattcactcggttgacatctatcacatggatcaacgagtttgtgaagcttggtggggaacaacttgttccctactatgcagatatattgggcgctgtcttaccatgcatatctgacgaggaggagaaaatccgagtggttgcacgcgaaacaaatgaggaactccgtgctataaaagctgatccagctgagggatttgatatcggagcaattctttcaatcgcaaaaagagaattgaacagtgaacatgaggccactcgaatcgaagcattgcattggttcttcactttgctggatcgatattgtgctgagttcttggcttacctgaacgatatttttgatccactcctaaatgcactttctgatccttcggacgcggttgtcctattagtattggaggttcatgcacgcatagctgaagaatctcaccacttccatcatcttgtatcctacctgatccgcaccttccacaacaaccattttgtactggagaaacgtggtgctttgatagtccgtcggctctgtgttcttctaggtgctgaaaaagtatatcgagagttctccactattcttgagagtgaagttgatcttgatttcgcatccgtcatggttcaggttttgaatttgattttgctcacatcaactgaacttggtgagctccgctctcctcttaagaagtcgttagtggattcttgtggcaaggacttgtttcagtctttatatgcttcatggcgccactctccgatggctacgataagtttatgtttacttgctcaggcatacaatcacgcaagctgtgttattcagtcactgggagaagaagacataaatgtgaattttttggttcaattagataaattgatccgtctcttagagactccagtatttgcttacttgcgtttacagcttctcgagcctggaaaacacacttggcttctgaaaactctttacggtctcctgatgcttttgcctcagcaaagtgcggccttcaagatcttgaggactcgactgaagactgtgccattcagtgaaaatcttaagcgcacatcttcagcgaatccatactctcagattctgcaagtgacggaagatggcaatagaaaccaagatatgcagaactacagtgcaatcaatttcccattccttctccagcaatttgagaacatgcagctgcagcatcgtaaccatttgaaggatcaactgcaatcccgagatacaaagatacgaagaagcgcattcctcatcgctgtcagagattaacaggcccccttcaagaacatccaaaggcattttatgatgcatttgttcttgcgatgtatgatatatttgccggaagcatcaccacatatatgttggggctttggttagtctcctcgttttttttcaaaggaggttgcatagggtacatagtgtaatcttttctatttcgttcctagattttgtcaagagatggcaattatttgttggagaaagctcgttgccacattctagtcattcttttcttagtggtttcactgctcatctggtttctgtaatttttcaattgaaggccaaatgagcaaagtagtaattggagatagaaatatgttactactgtcctatctatcgatctccaataaattagcgttgcaatgtaaattcctgttggctcgtatgatatatttattatattatttatatgccttatctttacccccattttatattattacaatatcgcatttgggtcatgaacaaatttgcgttttgagtctctttttagtaggaactatcag

SEQ ID NO: 81510 - DNA, 2831 bp, Zea Mays
ccgccacaacggtaaacgttacccttgccgaagagaagggaaaatagcagtagcgcccggatcccctctccttccctccagatcacaccactgccgcctccgcctgcaaatccatttctagactcaagctgttgctgcgagcgagctagggttggtgctcaggtctccagggtttcgcctccccgctcccggtgcccatcgccttggaccttggcctgccgggttagggttgggtcgcagctgcgggggccgtggggcggggatgcggccgatgcggcgatcgcgggcgatcgggaggctgtagcggcggcggggcagggtatctcttgggtggattctccggcgatggccgcagacgcactatccatcatcccgggcgccgtgcttcgcaacctctctgacaagctctacgagaagcggaagaacgccgcgcttgagattgagggaattgtgaagcagcttgcaacgtttggggagcatgagaagatatcagcggttatctcgctgctcaccaacgatttcacatattcgccacaggcgaaccatcgaaagggtgggttgattggccttgcagcagttactgttggactcaccagtgaggcagctcagcatctcgagcaaattgtacctcctgtgcttacttctttcctggaccaagatagtagagtgcgttactatgcttgtgaagcgctatacaacatagcaaaagtggtaagaggggatttcatcatctacttcaacaaaatttttgatgctttatgcaagctttctgcagattccgatgctaatgttcaaagtgccgctcaccttcttgataagcttgtcaaggatatcgtaactgagagtgatcagttcagcatagaagaattcataccgctcttgagagagcgcatgaatgtgttgaacccttatgtaagacaatttttggttgggtggataacagtgttagatagtgttcctgatattgacatgcttggttttcttcctgattttcttgacggtttgttcaatatgctgagtgattccagtcatgagataaggcagcaagctgatgcagcactttctgagtttcttcaggagataaagaactcaccaatcaacgagtttgtgaagcttggtggggaacaacttgttccctactatgcagatatattgggcgctgtcttaccatgcatatctgacgaggaggagaaaatccgagtggttgcacgcgaaacaaatgaggaactccgtgctataaaagctgatccagctgagggatttgatatcggagcaattctttcaatcgcaaaaagagaattgaacagtgaacatgaggccactcgaatcgaagcattgcattggttcttcactttgctggatcgatattgtgctgagttcttggcttacctgaacgatatttttgatccactcctaaatgcactttctgatccttcggacgcggttgtcctattagtattggaggttcatgcacgcatagctgaagaatctcaccacttccatcatcttgtatcctacctgatccgcaccttccacaacaaccattttgtactggagaagtgctgaaaaagtatatcgagagttctccactattcttgagagtgaagttgatcttgatttcgcatccgtcatggttcaggttttgaatttgattttgctcacatcaactgaacttggtgagctccgctctcctcttaagaagtcgttagtggattcttgtggcaaggacttgtttcagtctttatatgcttcatggcgccactctccgatggctacgataagtttatgtttacttgctcaggcatacaatcacgcaagctgtgttattcagtcactgggagaagaagacataaatgtgaattttttggttcaattagataaattgatccgtctcttagagactccagtatttgcttacttgcgtttacagcttctcgagcctggaaaacacacttggcttctgaaaactctttacggtctcctgatgcttttgcctcagcaaagtgcggccttcaagatcttgaggactcgactgaagactgtgccattcagtgaaaatcttaagcgcacatcttcagcgaatccatactctcagattctgcaagtgacggaagatggcaatagaaaccaagatatgcagaactacagtgcaatcaatttcccattccttctccagcaatttgagaacatgcagctgcagcatcgtaaccatttgaaggatcaactgcaatcccgtaaatctgcttcgactttaacattatctcaggagatacaaagatacgaagaagcgcattcctcatcgctgtcagagattaacaggcccccttcaagaacatccaaaggcattttatgatgcatttgttcttgcgatgtatgatatatttgccggaagcatcaccacatatatgttggggctttggttagtctcctcgttttttttcaaaggaggttgcatagggtacatagtgtaatcttttctatttcgttcctagattttgtcaagagatggcaattatttgttggagaaagctcgttgccacattctagtcattcttttcttagtggtttcactgctcatctggtttctgtaatttttcaattgaaggccaaatgagcaaagtagtaattggagatagaaatatgttactactgtcctatctatcgatctccaataaattagcgttgcaatgtaaattcctgttggctcgtatgatatatttattatattatttatatgccttatctttacccccattttatattattacaatatcgcatttgggtcatgaacaaatttgcgttttgagtctctttttagtaggaactatcag

SEQ ID NO: 81511 - DNA, 3250 bp, Zea Mays
ccgccacaacggtaaacgttacccttgccgaagagaagggaaaatagcagtagcgcccggatcccctctccttccctccagatcacaccactgccgcctccgcctgcaaatccatttctagactcaagctgttgctgcgagcgagctagggttggtgctcaggtctccagggtttcgcctccccgctcccggtgcccatcgccttggaccttggcctgccgggttagggttgggtcgcagctgcgggggccgtggggcggggatgcggccgatgcggcgatcgcgggcgatcgggaggctgtagcggcggcggggcagggtatctcttgggtggattctccggcgatggccgcagacgcactatccatcatcccgggcgccgtgcttcgcaacctctctgacaagctctacgagaagcggaagaacgccgcgcttgagattgagggaattgtgaagcagcttgcaacgtttggggagcatgagaagatatcagcggttatctcgctgctcaccaacgatttcacatattcgccacaggcgaaccatcgaaagggtgggttgattggccttgcagcagttactgttggactcaccagtgaggcagctcagcatctcgagcaaattgtacctcctgtgcttacttctttcctggaccaagatagtagagtgcgttactatgcttgtgaagcgctatacaacatagcaaaagtggtaagaggggatttcatcatctacttcaacaaaatttttgatgctttatgcaagctttctgcagattccgatgctaatgttcaaagtgccgctcaccttcttgataagcttgtcaaggatatcgtaactgagagtgatcagttcagcatagaagaattcataccgctcttgagagagcgcatgaatgtgttgaacccttatgtaagacaatttttggttgggtggataacagtgttagatagtgttcctgatattgacatgcttggttttcttcctgattttcttgacggtttgttcaatatgctgagtgattccagtcatgagataaggcagcaagctgatgcagcactttctgagtttcttcaggagataaagaactcaccaatcaacgagtttgtgaagcttggtggggaacaacttgttccctactatgcagatatattgggcgctgtcttaccatgcatatctgacgaggaggagaaaatccgagtggttgcacgcgaaacaaatgaggaactccgtgctataaaagctgatccagctgagggatttgatatcggagcaattctttcaatcgcaaaaagagaattgaacagtgaacatgaggccactcgaatcgaagcattgcattggttcttcactttgctggatcgatattgtgctgagttcttggcttacctgaacgatatttttgatccactcctaaatgcactttctgatccttcggacgcggttgtcctattagtattggaggttcatgcacgcatagctgaagaatctcaccacttccatcatcttgtatcctacctgatccgcaccttccacaacaaccattttgtactggagaagtgctgaaaaagtatatcgagagttctccactattcttgagagtgaagttgatcttgatttcgcatccgtcatggttcaggttttgaatttgattttgctcacatcaactgaacttggtgagctccgctctcctcttaagaagtcgttagtggattcttgtggcaaggacttgtttcagtctttatatgcttcatggcgccactctccgatggctacgataagtttatgtttacttgctcaggcatacaatcacgcaagctgtgttattcagtcactgggagaagaagacataaatgtgaattttttggttcaattagataaattgatccgtctcttagagactccagtatttgcttacttgcgtttacaggtaacttggtctgataatccgttcctgcaaatttatctttctgtttctcaggcacatttgaattccgaaacttggagagttctacctggcttttttaatttgatttctagtgctacattaatggcatgataagcctggaccaatctttgtctcatgctgtttatctgtagttctgtacatttactgtatgctcgccttttggtacaatgtttccagactattgctatcccctaatgattccacattcagtttggatgctgtaaaactaacatgttggggtttatgtgacgcaacatgatatgaaaactgtgatgacttgttggcaaaaaaaaactctagtacagagacttttgttgttatatcttcttactgatcattttggcatggaaattccacaacatgctcttaaaaatctgcagcttctcgagcctggaaaacacacttggcttctgaaaactctttacggtctcctgatgcttttgcctcagcaaagtgcggccttcaagatcttgaggactcgactgaagactgtgccattcagtgaaaatcttaagcgcacatcttcagcgaatccatactctcagattctgcaagtgacggaagatggcaatagaaaccaagatatgcagaactacagtgcaatcaatttcccattccttctccagcaatttgagaacatgcagctgcagcatcgtaaccatttgaaggatcaactgcaatcccgtaaatctgcttcgactttaacattatctcaggagatacaaagatacgaagaagcgcattcctcatcgctgtcagagattaacaggcccccttcaagaacatccaaaggcattttatgatgcatttgttcttgcgatgtatgatatatttgccggaagcatcaccacatatatgttggggctttggttagtctcctcgttttttttcaaaggaggttgcatagggtacatagtgtaatcttttctatttcgttcctagattttgtcaagagatggcaattatttgttggagaaagctcgttgccacattctagtcattcttttcttagtggtttcactgctcatctggtttctgtaatttttcaattgaaggccaaatgagcaaagtagtaattggagatagaaatatgttactactgtcctatctatcgatctccaataaattagcgttgcaatgtaaattcctgttggctcgtatgatatatttattatattatttatatgccttatctttacccccattttatattattacaatatcgcatttgggtcatgaacaaatttgcgttttgagtctctttttagtaggaactatcag

SEQ ID NO: 81512 - DNA, 3402 bp, Zea Mays
ccgccacaacggtaaacgttacccttgccgaagagaagggaaaatagcagtagcgcccggatcccctctccttccctccagatcacaccactgccgcctccgcctgcaaatccatttctagactcaagctgttgctgcgagcgagctagggttggtgctcaggtctccagggtttcgcctccccgctcccggtgcccatcgccttggaccttggcctgccgggttagggttgggtcgcagctgcgggggccgtggggcggggatgcggccgatgcggcgatcgcgggcgatcgggaggctgtagcggcggcggggcagggtatctcttgggtggattctccggcgatggccgcagacgcactatccatcatcccgggcgccgtgcttcgcaacctctctgacaagctctacgagaagcggaagaacgccgcgcttgagattgagggaattgtgaagcagcttgcaacgtttggggagcatgagaagatatcagcggttatctcgctgctcaccaacgatttcacatattcgccacaggcgaaccatcgaaagggtgggttgattggccttgcagcagttactgttggactcaccagtgaggcagctcagcatctcgagcaaattgtacctcctgtgcttacttctttcctggaccaagatagtagagtgcgttactatgcttgtgaagcgctatacaacatagcaaaagtggtaagaggggatttcatcatctacttcaacaaaatttttgatgctttatgcaagctttctgcagattccgatgctaatgttcaaagtgccgctcaccttcttgataagcttgtcaaggatatcgtaactgagagtgatcagttcagcatagaagaattcataccgctcttgagagagcgcatgaatgtgttgaacccttatgtaagacaatttttggttgggtggataacagtgttagatagtgttcctgatattgacatgcttggttttcttcctgattttcttgacggtttgttcaatatgctgagtgattccagtcatgagataaggcagcaagctgatgcagcactttctgagtttcttcaggagataaagaactcaccaaatgtagattatggtcgtatggctgaaatactcgttcggagggcaggctctactgatgaattcactcggttgacatctatcacatggatcaacgagtttgtgaagcttggtggggaacaacttgttccctactatgcagatatattgggcgctgtcttaccatgcatatctgacgaggaggagaaaatccgagtggttgcacgcgaaacaaatgaggaactccgtgctataaaagctgatccagctgagggatttgatatcggagcaattctttcaatcgcaaaaagagaattgaacagtgaacatgaggccactcgaatcgaagcattgcattggttcttcactttgctggatcgatattgtgctgagttcttggcttacctgaacgatatttttgatccactcctaaatgcactttctgatccttcggacgcggttgtcctattagtattggaggttcatgcacgcatagctgaagaatctcaccacttccatcatcttgtatcctacctgatccgcaccttccacaacaaccattttgtactggagaagtgctgaaaaagtatatcgagagttctccactattcttgagagtgaagttgatcttgatttcgcatccgtcatggttcaggttttgaatttgattttgctcacatcaactgaacttggtgagctccgctctcctcttaagaagtcgttagtggattcttgtggcaaggacttgtttcagtctttatatgcttcatggcgccactctccgatggctacgataagtttatgtttacttgctcaggcatacaatcacgcaagctgtgttattcagtcactgggagaagaagacataaatgtgaattttttggttcaattagataaattgatccgtctcttagagactccagtatttgcttacttgcgtttacaggtaacttggtctgataatccgttcctgcaaatttatctttctgtttctcaggcacatttgaattccgaaacttggagagttctacctggcttttttaatttgatttctagtgctacattaatggcatgataagcctggaccaatctttgtctcatgctgtttatctgtagttctgtacatttactgtatgctcgccttttggtacaatgtttccagactattgctatcccctaatgattccacattcagtttggatgctgtaaaactaacatgttggggtttatgtgacgcaacatgatatgaaaactgtgatgacttgttggcaaaaaaaaactctagtacagagacttttgttgttatatcttcttactgatcattttggcatggaaattccacaacatgctcttaaaaatctgcagcttctcgagcctggaaaacacacttggcttctgaaaactctttacggtctcctgatgcttttgcctcaggtcaaacttctaaccagactctgttgggagagattatacatcgtggggtttatatgtttacacagcaaagtgcggccttcaagatcttgaggactcgactgaagactgtgccattcagtgaaaatcttaagcgcacatcttcagcgaatccatactctcagattctgcaagtgacggaagatggcaatagaaaccaagatatgcagaactacagtgcaatcaatttcccattccttctccagcaatttgagaacatgcagctgcagcatcgtaaccatttgaaggatcaactgcaatcccgtaaatctgcttcgactttaacattatctcaggagatacaaagatacgaagaagcgcattcctcatcgctgtcagagattaacaggcccccttcaagaacatccaaaggcattttatgatgcatttgttcttgcgatgtatgatatatttgccggaagcatcaccacatatatgttggggctttggttagtctcctcgttttttttcaaaggaggttgcatagggtacatagtgtaatcttttctatttcgttcctagattttgtcaagagatggcaattatttgttggagaaagctcgttgccacattctagtcattcttttcttagtggtttcactgctcatctggtttctgtaatttttcaattgaaggccaaatgagcaaagtagtaattggagatagaaatatgttactactgtcctatctatcgatctccaataaattagcgttgcaatgtaaattcctgttggctcgtatgatatatttattatattatttatatgccttatctttacccccattttatattattacaatatcgcatttgggtcatgaacaaatttgcgttttgagtctctttttagtaggaactatcag

SEQ ID NO: 81513 - DNA, 2370 bp, Zea Mays
ggagattgcaaatatttttcattgatatgcaaattgtacctcctgtgcttacttctttcctggaccaagatagtagagtgcgttactatgcttgtgaagcgctatacaacatagcaaaagtggtaagaggggatttcatcatctacttcaacaaaatttttgatgctttatgcaagctttctgcagattccgatgctaatgttcaaagtgccgctcaccttcttgataagcttgtcaaggatatcgtaactgagagtgatcagttcagcatagaagaattcataccgctcttgagagagcgcatgaatgtgttgaacccttatgtaagacaatttttggttgggtggataacagtgttagatagtgttcctgatattgacatgcttggttttcttcctgattttcttgacggtttgttcaatatgctgagtgattccagtcatgagataaggcagcaagctgatgcagcactttctgagtttcttcaggagataaagaactcaccaaatgtagattatggtcgtatggctgaaatactcgttcggagggcaggctctactgatgaattcactcggttgacatctatcacatggatcaacgagtttgtgaagcttggtggggaacaacttgttccctactatgcagatatattgggcgctgtcttaccatgcatatctgacgaggaggagaaaatccgagtggttgcacgcgaaacaaatgaggaactccgtgctataaaagctgatccagctgagggatttgatatcggagcaattctttcaatcgcaaaaagagaattgaacagtgaacatgaggccactcgaatcgaagcattgcattggttcttcactttgctggatcgatattgtgctgagttcttggcttacctgaacgatatttttgatccactcctaaatgcactttctgatccttcggacgcggttgtcctattagtattggaggttcatgcacgcatagctgaagaatctcaccacttccatcatcttgtatcctacctgatccgcaccttccacaacaaccattttgtactggagaaacgtggtgctttgatagtccgtcggctctgtgttcttctaggtgctgaaaaagtatatcgagagttctccactattcttgagagtgaagttgatcttgatttcgcatccgtcatggttcaggttttgaatttgattttgctcacatcaactgaacttggtgagctccgctctcctcttaagaagtcgttagtggattcttgtggcaaggacttgtttcagtctttatatgcttcatggcgccactctccgatggctacgataagtttatgtttacttgctcaggcatacaatcacgcaagctgtgttattcagtcactgggagaagaagacataaatgtgaattttttggttcaattagataaattgatccgtctcttagagactccagtatttgcttacttgcgtttacagcttctcgagcctggaaaacacacttggcttctgaaaactctttacggtctcctgatgcttttgcctcagcaaagtgcggccttcaagatcttgaggactcgactgaagactgtgccattcagtgaaaatcttaagcgcacatcttcagcgaatccatactctcagattctgcaagtgacggaagatggcaatagaaaccaagatatgcagaactacagtgcaatcaatttcccattccttctccagcaatttgagaacatgcagctgcagcatcgtaaccatttgaaggatcaactgcaatcccgtaaatctgcttcgactttaacattatctcaggagatacaaagatacgaagaagcgcattcctcatcgctgtcagagattaacaggcccccttcaagaacatccaaaggcattttatgatgcatttgttcttgcgatgtatgatatatttgccggaagcatcaccacatatatgttggggctttggttagtctcctcgttttttttcaaaggaggttgcatagggtacatagtgtaatcttttctatttcgttcctagattttgtcaagagatggcaattatttgttggagaaagctcgttgccacattctagtcattcttttcttagtggtttcactgctcatctggtttctgtaatttttcaattgaaggccaaatgagcaaagtagtaattggagatagaaatatgttactactgtcctatctatcgatctccaataaattagcgttgcaatgtaaattcctgttggctcgtatgatatatttattatattatttatatgccttatctttacccccattttatattattacaatatcgcatttgggtcatgaacaaatttgcgttttgagtctctttttagtaggaactatcag

SEQ ID NO: 81514 - DNA, 4485 bp, Zea Mays
atttttcattgatatgcaaattgtacctcctgtgcttacttctttcctggaccaagatagtagagtgcgttactatgcttgtgaagcgctatacaacatagcaaaagtaagcatttagtttagtgatggaacataaattgtatgtttgctttacactaattgaatttctctctttaggtggtaagaggggatttcatcatctacttcaacaaaatttttgatgctttatgcaagctttctgcagattccgatgctaatgttcaaagtgccgctcaccttcttgataagcttgtcaagataattatttatccaccaggatatcgtaactgagagtgatcagttcagcatagaagaattcataccgctcttgagagagcgcatgaatgtgttgaacccttatgtaagacaatttttggttgggtggataacagtgttagatagtgttcctgatattgacatgcttggttttcttcctgattttcttgacggtttgttcaatatgctgagtgattccagtcatgagataaggcagcaagctgatgcagcactttctgagtttcttcaggagataaagaactcaccagtaaggctgctgctctatactgttagccatttaacagcttagacgttaaaaacattgtgggatgcttattcctttagttatccttttttattttctgtatactcttaaaggttgtgagatgttagtttggaaggtggaatgatacctttcggtatttagtatcaatgctatagagagacggggatattgatgaacatgttagccatagaatcaaagcagagtggatgaagttgtgtcaagctcaagcatttgacattctatgacaagagggtaccattttttttccctctcgaacacgcaggagagatgcacatctttatatattagagagaacgaaagaaggtcttacaagaagggagaaaaaacctgctatgcaggaatccccagaaaaacacagacccttagagctattacatgtttgttacataattttctccgaccacactaagggcttcggctaagcctaagctttcgggatgtttggttccagctagcacccagcgcgccaactcatctaagaaacctctctggaccttgccgatggaggagaatcaccctcaaaaaccacccggttacgctacagccataaacaccatgcacctagtataatggcactattaaggcctttcttgtctttatgcactcggttacaaactcttctccaccaatcaacaaaagcgatatcctctacatcaggggagagatgaccaagcccgaaaggagataagaagctgtgccaaaattgctttcggatgtgggaggcctcaaaagctaaaaggcgagttttataggatgacgattagacatgctatgttgcttgatgtagaatgttggcctaaaaaaagacgacaggttcagtatataagtgttacagaatgcttatgttacgttggatttatggccatacaagaagggatcaagtctagaacgacgatatatgtgataggctaggggtagcaccaattgaagaaacgtttgtccaacattggttgagatggtttggacatgtcttcatgagagaccttcagaggcaccagtgtatcctaacttcctaaggcatgatagtaatgggaagagaggaaggggaaggccgacgttgacatgggaagaggcagtgaaaggagacttgaaatgatggaatatatccgaagatttaaccttgaataggagtgcatggaaaacaactatcaacgttcctgaatcttgacttgtggcttctgttgggtttcaactctagtctaacctaacttgtttgacactaaaaggctttgttgttttatacttttaaaggctgcgcatgtcaagaaaacctatggccattacattaagaagaagacctcacgtaagtcgagaaaacccttgaacccttgccccatccatacacagtgacactatagtccatgtgagaatgaccgcgactggggccgggccttagacctatgctttggcgtgggacagacgatgggattttttaaccttagtctaaaattcgctcccatgggcagtcgaactcaggacactgaggagtgctactcagaccacaaccaaaaccaaaatgtagattatggtcgtatggctgaaatactcgttcggagggcaggctctactgatgaattcactcggttgacatctatcacatggatcaacgagtttgtgaagcttggtggggaacaacttgttccctactatgcagatatattgggcgctgtcttaccatgcatatctgacgaggaggagaaaatccgagtggttgcacgcgaaacaaatgaggaactccgtgctataaaagctgatccagctgagggatttgatatcggagcaattctttcaatcgcaaaaagagaattgaacagtgaacatgaggccactcgaatcgaagcattgcattggttcttcactttgctggatcgatattgtgctgagttcttggcttacctgaacgatatttttgatccactcctaaatgcactttctgatccttcggacgcggttgtcctattagtattggaggttcatgcacgcatagctgaagaatctcaccacttccatcatcttgtatcctacctgatccgcaccttccacaacaaccattttgtactggagaaacgtggtgctttgatagtccgtcggctctgtgttcttctaggtgctgaaaaagtatatcgagagttctccactattcttgagagtgaagttgatcttgatttcgcatccgtcatggttcaggttttgaatttgattttgctcacatcaactgaacttggtgagctccgctctcctcttaagaagtcgttagtggattcttgtggcaaggacttgtttcagtctttatatgcttcatggcgccactctccgatggctacgataagtttatgtttacttgctcaggcatacaatcacgcaagctgtgttattcagtcactgggagaagaagacataaatgtgaattttttggttcaattagataaattgatccgtctcttagagactccagtatttgcttacttgcgtttacaggtaacttggtctgataatccgttcctgcaaatttatctttctgtttctcaggcacatttgaattccgaaacttggagagttctacctggcttttttaatttgatttctagtgctacattaatggcatgataagcctggaccaatctttgtctcatgctgtttatctgtagttctgtacatttactgtatgctcgccttttggtacaatgtttccagactattgctatcccctaatgattccacattcagtttggatgctgtaaaactaacatgttggggtttatgtgacgcaacatgatatgaaaactgtgatgacttgttggcaaaaaaaaactctagtacagagacttttgttgttatatcttcttactgatcattttggcatggaaattccacaacatgctcttaaaaatctgcagcttctcgagcctggaaaacacacttggcttctgaaaactctttacggtctcctgatgcttttgcctcaggtcaaacttctaaccagactctgttgggagagattatacatcgtggggtttatatgtttacacagcaaagtgcggccttcaagatcttgaggactcgactgaagactgtgccattcagtgaaaatcttaagcgcacatcttcagcgaatccatactctcagattctgcaagtgacggaagatggcaatagaaaccaagatatgcagaactacagtgcaatcaatttcccattccttctccagcaatttgagaacatgcagctgcagcatcgtaaccatttgaaggatcaactgcaatcccgtaaatctgcttcgactttaacattatctcaggagatacaaagatacgaagaagcgcattcctcatcgctgtcagagattaacaggcccccttcaagaacatccaaaggcattttatgatgcatttgttcttgcgatgtatgatatatttgccggaagcatcaccacatatatgttggggctttggttagtctcctcgttttttttcaaaggaggttgcatagggtacatagtgtaatcttttctatttcgttcctagattttgtcaagagatggcaattatttgttggagaaagctcgttgccacattctagtcattcttttcttagtggtttcactgctcatctggtttctgtaatttttcaattgaaggccaaatgagcaaagtagtaattggagatagaaatatgttactactgtcctatctatcgatctccaataaattagcgttgcaatgtaaattcctgttggctcgtatgatatatttattatattatttatatgccttatctttacccccattttatattattacaatatcgcatttgggtcatgaacaaatttgcgttttgagtctctttttagtaggaactatcag

SEQ ID NO: 81515 - DNA, 1180 bp, Zea Mays
accatccactgcgatacttcagacagctcttcttgcgttgcctactaagatctctctctctctctctcttgtgttcttgccttctgcctactacgagtgatggccagcctcactgacctcgtcaacctcgacctgagtgactgcaccgacaggatcatcgccgagtacatctgggttggaggatccggcatagacctcaggagcaaagcaagggtgatgtgtgactgctacacgccacaaggcgagccaatccccagtaacaagaggtacaaagctgccacggttttcagccaccccgatgttgcagctgaggtgccatggtacggtattgagcaggagtacactctccttcagaaggatgtgagctggccccttggctggcctgttggtggataccctggtccccagggaccatactactgtgctgccggtgccgataaggcctttgggcgcgacgtggttgacgcccactacaaagcctgcctctacgccggcatcaacatcagcggcatcaacggcgaagtcatgcctggacagtgggagttccaagtcgggccgtccgttgggatctctgccggcgacgagatatgggtcgcccgctacattctcgagaggatcactgagatggccggaatcgttctctccctcgacccgaagccgatcaagggtgactggaacggcgccggcgctcacaccaactacagcaccaagtcgatgagggaggccggtggctacgaggtgatcaaggaggcgatcgagaagctggggaagaggcacagggagcacatcgccgcgtacggcgagggcaacgagcgccgcctcacgggccgccacgagaccgccgacatcaacaccttcaaatggggcgtggcgaaccgcggcgcgtccatccgcgtcggccgcgacaccgagaaggagggcaagggatatttcgaggaccgcaggccggcttccaacatggacccctacgtcgtcaccggcatgatcgccgacaccaccatcctgctcttggccagcgccgcctctgcgtcgcacacctgatccgcatccggtcggcaagtgatgtactcttggatgaggaggcggcgattctggaggcaccgacggtggcgcatgatcgcgtcgatgtcggtcgccgctctcatcttcactaacgccacgtgcacctcggcgatctcct

SEQ ID NO: 81516 - DNA, 947 bp, Zea Mays
cgccgcagaggcccgtgttgcctaagaacgagtctttcggcatcttccggagcgtgttggggatggacccgttgagctggttgtacgacacgttgaactgctccaatgcaggcagctgcagctttgggatctcaccggtgaagctgttcccgtccatgtacagcgtcccgaggcggatcagcttgttgaagtccggcgagatcttgccgctgaacttgttccctgcgatgtccagcctcacgaggttcttgagctcgaacagcgacgctgggacctcgccagagaagctgttgtgctggaagtagatcgcccggagctcggacaggcgggagaggtcgtcggggatgggccccgtgagcgcgttgtaccggagggacagcgtgcggagcgccgacaggttgccgagcacgcccgaggggaggttgcccatgagcccggcccccgggaggcggagctcgacgacgcggccgctctcgcaggtgacgccctgccactggcacgtgggcgtggtgctgttccacgatggcagcgcggagcggccgaccgccgagcgcagcgcctgcagcgcctgtgcgtcggtgttgaggtcatcggcagaaagggccggcagggcggcggcgaagagcaccaggacggccaagcccgctgccggcgccggcattgcggccatcgccggcggggactggggtcagggtgagcgggtgggtaggtgagagcaccttagctcagaggcagcactatcatggatggggctgcttgtgcggagagtactagaagctgtagaaatagagtgagcagggaatcttgggatataatggcagatttgggaggtggaggagctgattagggtgggattaggagggctgattgtcttaacgcctggactgattgctttaatgatagccggtgcaggtggctcttactggagcctggttggagggttttcg

SEQ ID NO: 81517 - DNA, 1456 bp, Zea Mays
gcggccttgcgggaaaaaaaattcaatcatccaaatagcagaggacctacgttcaccctttggtccgcgtccgtgcgcgcgccctctctcactcctggcgcaactggccgacgaccgccgccgccgtactcctggttctctggtgcccaggtctagcaacgtcagtcccttcgccaggtcttcgttggggccttcactggcgacgagcacccaccagttattgggtgtacatctgtatgctcatgtcctttgctgggtccgctcctgatcctaccatattgatgttttctgagagttggccaggtctaccaaggggtgtagaatttaatcccagtgatagtgatcttctgtggcatctagcagcagaagttgggaacgctctagctgagcgccatccatttatcaacgagttcattaaatttgttgatgatgttagagaatttatttgcactcatcctcaacatataccaggtgttaggcaagatggtcgtgcatcatacttcttccatagaagttttgagccctacatcaatgagaatgatgtaaataactgctggaagaaaattggaagccctagatccatcatcctggatggaacactgacgggttgcaaggaagtgtttgccctgtatgcagacatgccgagtgataaaagatctcaggaaactgattggagattacatcagtatcatttacaaaacacagtgaaggcagagtcagagatagtggcgtcaaaaatattccttgcatcacggaacagtctgtgtgaattggccgaggaaactcatattgaatccgaatgggatgtttccacacataaagattcaagcgtggaatgtgccaaaggctttaatcctgaaatctgtactgaaaccgatgagcttgatcatatatctctgaaagagcgctacaggatccttctagcagacaaaagtctggggcttactacagtatcagctgggaaatctataatgcatgtggaaactagcagagcatctcccaaaagaaatcatgagggaaaaataagcaaagaagatatattcagcatgttgcaggaaatttcttctgcaccttctattatagagagtaatcccatggatgatgacagcaacaggagaatacttggtgaagatcttccagtggagggttccgaaaaccagataggtggcactgcaacttgtatgggtgaaaacagtgagctggttgcaagaaaacaaggggctcatctggctgatgtaaaactggaacctgcattaggaggttatgagattggtccttccgaattacctcaagaaaattctactcatgccgaaggctcagtactatctttaggaataaaagatgaactaactgactgtgagttacctggcttatgtgagaatgtttctttcagttcccgacaacgcagaaaaaggaaaacaagttattcaactgaaaaaacacttaaagaagataa

SEQ ID NO: 81518 - DNA, 1421 bp, Zea Mays
aaattcaatcatccaaatagcagaggacctacgttcaccctttggtccgcgtccgtgcgcgcgccctctctcactcctggcgcaactggccgacgaccgccgccgccgtactcctggttctctggtgcccaggtctagcaacgtcagtcccttcgccaggtcttcgttggggccttcactggcgacgagcacccaccagttattgggtgtacatctgtatgctcatgtcctttgctgggtccgctcctgatcctaccatattgatgttttctgagagttggccaggtctaccaaggggtgtagaatttaatcccagtgatagtgatcttctgtggcatctagcagcagaagttgggaacgctctagctgagcgccatccatttatcaacgagttcattaaatttgttgatgatgttagagaatttatttgcactcatcctcaacatataccaggtgttaggcaagatggtcgtgcatcatacttcttccatagaagttttgagccctacatcaatgagaatgatgtaaataactgctggaagaaaattggaagccctagatccatcatcctggatggaacactgacgggttgcaaggaagtgtttgccctgtatgcagacatgccgagtgataaaagatctcaggaaactgattggagattacatcagtatcatttacaaaacacagtgaaggcagagtcagagatagtggcgtcaaaaatattccttgcatcacggaacagtctgtgtgaattggccgaggaaactcatattgaatccgaatgggatgtttccacacataaagattcaagcgtggaatgtgccaaaggctttaatcctgaaatctgtactgaaaccgatgagcttgatcatatatctctgaaagagcgctacaggatccttctagcagacaaaagtctggggcttactacagtatcagctgggaaatctataatgcatgtggaaactagcagagcatctcccaaaagaaatcatgagggaaaaataagcaaagaagatatattcagcatgttgcaggaaatttcttctgcaccttctattatagagagtaatcccatggatgatgacagcaacaggagaatacttggtgaagatcttccaggtaataggtggcactgcaacttgtatgggtgaaaacagtgagctggttgcaagaaaacaaggggctcatctggctgatgtaaaactggaacctgcattaggaggttatgagattggtccttccgaattacctcaagaaaattctactcatgccgaaggctcagtactatctttaggaataaaagatgaactaactgactgtgagttacctggcttatgtgagaatgtttctttcagttcccgacaacgcagaaaaaggaaaacaagttattcaactgaaaaaacacttaaagaagataa

SEQ ID NO: 81519 - DNA, 1522 bp, Zea Mays
aaattcaatcatccaaatagcagaggacctacgttcaccctttggtccgcgtccgtgcgcgcgccctctctcactcctggcgcaactggccgacgaccgccgccgccgtactcctggttctctggtgcccaggtctagcaacgtcagtcccttcgccaggtcttcgttggggccttcactggcgacgagcacccaccagttattgggtgtacatctgtatgctcatgtcctttgctgggtccgctcctgatcctaccatattgatgttttctgagagttggccaggtctaccaaggggtgtagaatttaatcccagtgatagtgatcttctgtggcatctagcagcagaagttgggaacgctctagctgagcgccatccatttatcaacgagttcattaaatttgttgatgatgttagagaatttatttgcactcatcctcaacatataccaggtgttaggcaagatggtcgtgcatcatacttcttccatagaagttttgagccctacatcaatgagaatgatgtaaataactgctggaagaaaattggaagccctagatccatcatcctggatggaacactgacgggttgcaaggaagtgtttgccctgtatgcagacatgccgagtgataaaagatctcaggaaactgattggagattacatcagtatcatttacaaaacacagtgaaggcagagtcagagatagtggcgtcaaaaatattccttgcatcacggaacagtctgtgtgaattggccgaggaaactcatattgaatccgaatgggatgtttccacacataaagattcaagcgtggaatgtgccaaaggctttaatcctgaaatctgtactgaaaccgatgagcttgatcatatatctctgaaagagcgctacaggatccttctagcagacaaaagtctggggcttactacagtatcagctgggaaatctataatgcatgtggaaactagcagagcatctcccaaaagaaatcatgagggaaaaataagcaaagaagatatattcagcatgttgcaggaaatttcttctgcaccttctattatagagagtaatcccatggatgatgacagcaacaggagaatacttggtgaagatcttccagggaactcaggtttcctgaatgtttttggtatgtcatctaatagtaaaccatgcctatttgaacttggatattgtcatgatccagtggagggttccgaaaaccagataggtggcactgcaacttgtatgggtgaaaacagtgagctggttgcaagaaaacaaggggctcatctggctgatgtaaaactggaacctgcattaggaggttatgagattggtccttccgaattacctcaagaaaattctactcatgccgaaggctcagtactatctttaggaataaaagatgaactaactgactgtgagttacctggcttatgtgagaatgtttctttcagttcccgacaacgcagaaaaaggaaaacaagttattcaactgaaaaaacacttaaagaagataa

SEQ ID NO: 81520 - DNA, 922 bp, Zea Mays
gtagattttttgggacagaggaataggagttgaagaaatcaaactttacggtgctgaagaagataatgaaatgattgcagattctacagaaagtaactttgaagatcttgaaaacgtgattgcaaatatatttccgaagaggggaaaatgtcatttactgtcagcagctagatacgaaaggggggaaaagtctatttactgcttatcctgtttaatttctcttattgagcagtcacgataccttcgattccgtgactgtcctgtggaatggggatggtgcagggatctgcaatcctttatttttatatttagaagccataatagttcttgagcgtcctgaatatggttatgcaacatacttctttgaggtggtccaatcaaggccaatagaatggcagatccgtaggctggttgttgcaatgaagcttagtggctgtggaaggacagctcttattgaaaacaggccgttactggttggtacagatttaacagaaggcgaggcacatgttttggaaggatatggctggctaagaaacactgggcttggcacaatggtcaactaccgtgatcgtgtggtccatgacaggtggactgagaaatctgtttctgattggaggtcgaagatagggaaacttctaatggttggttatgctgagggccaatcaatcacaactcttggcccgaagaaaatactggacatgctggaagctactggggatgctgaatttgaagtgaagttggaggatccttattgagagatccgacgtgtataggtacaatatgtacgtgtagttctgaatgcgtccagataaacttagggtaggagctctctgatgaaataacgtggcacttgtattctaaattctaaatcacaaattcgttcgtgattattttaatttcacggaagttagcattatctcca

SEQ ID NO: 81521 - DNA, 2959 bp, Zea Mays
cgaattttatagaagctggctgaaaagctgagcgtttggcaatccgcagcagcttttggtggccagaagctgccagaagctattggtggccagaagctgccagaagctaaaacaaacaggccctatatatgagtcatcgcagtagttaacaattacacctagacctagtactgatttttgtccgtccgggttgctttccggctaacgtgtgtagtgtagcacaacccatcggtcgctgtctgctttctgaagaacgttcattccggttgacgccgctacgctgccgtgtcttctttccttcccttataccctgccgcacacaccttttccgtttgcagtggtgcaggtcttttcggtcctcaggcttcatccctgtgcaagtgcagggataattgcttctgatctcccgaggctgcataacctgattcagaggcagagcaagggggcgtgagggagatgagggagatcatcagcatccatatcgggcaggcaggcatccaggtagggaattcttgctgggagctctactgcctcgagcacggtatccagcctgacggcctcatgcccaggtgaggcccctttccattccaactcatcctttccttgagaattatgtcagattttgttctgtacttctctctgagatgattattccagttccagctcagataattatttaagatagggctgccatctgggttcttgtagcagtcgcctcaaaaggttgggtttttgagataatcctgaggaagatctttacttgttgatcacagacagcactctaaaagctagagaaacttcgctggatgctctgacctctaaaaatcttctcttaagagtcgatgacacccctgcgttcaaaaccacttgcttaaaaagttagaaagagacatgataggataaacaaccctgcatattaaagaagaagctcgtgttttctgaaacgaggataatcatgtgacaagctaccggtttctgtgtccaactcaccgatttcacagcatccaaattctcagccttggccgttcgcttgcagtgacacctctgtcgggatcgcgagggatgcgttcaacacgttcttcagtgaaacgggcgcagggaagcacgttccaagggccctgtttgtcgacttggagcccactgtgattgacgaggtgaagactggggcttaccgccagcttttccatcctgagcagctcatctcacacaaggaagatgcagcgaacaacttcgcccgtggacattacacaggtgtgacatgttcccctcaccctgagctatttcccggagaacaaaaaatgtttttgcaattttaaatgcaatattggttcaagtacaaaaactattggggtttggaagccctaccttgaatttcggtgcattgccaaaatgcgtaaagaccaaatttgtgttcttgaacagtactagcaagtggtagccagaactagtccacaacaatttggatattatgaaggggctgggtcaggatcttataatttacatattcaaccatcctatgccatgattattatagtatttttcatgacttcatatcatacaagcaacctcactttccttacctggggcaattgttttaaaaacattacaatgctttggaactgttctctgctctttattaatacctatcctgtttggaaactgagtaatgtcagaagttctacaacatgttttttctgctgcagttggaagagaagtaatagatctttgccttgatcggatacgaaaattggcagacaactgcactggtcttcaaggttttctggttttcaatgctgttggtggtggaacaggctccggcctgggttcgctacttttagaacgtctatcagtagattatggtaggaagtcaaagctcggtttcaccatctatccttccccacagatctcgactgctgtggtcgagccttataacagcgtgctctccacacattccttgattgaacacacagatgttgttgtgcttcttgacaatgaagctatctatgacatatgcaagaggtccctcgacattgagcgtccaacatacaccaatctgaacaggcttatatcacaagttatatcatctctgactacctctctgaggtttgaaggagctattaatgttgacataactgagttccagaccaaccttgtgccttatccccgcatacactttatgctctcttcgtatgctccaattatctcagtggaaaaggcctaccatgaacaacactctgttcctgagatcacaaattctgtgtttgagccatcaagtgtgatggcaaaatgtgatcccaggcatggaaagtacatggcatgctgtttgatgtaccgtggcgacgttgttccaaaagatgtgaatgctgctgtccattcaatcaagaccaagagagcagtgcagtttgttgattggtgccctactggtttcaagtgtgggataaactaccaaccaccaactgtagtccctggaggggacctggccaaggtgcaacgagcagtctgcatgatcagcaacaacacagccgtggctgaggtcttctctcgtattgaccgcaagtttgatctcatgtatgccaaacgtgcattcgttcattggtatgtcggtgaagggatggaagaaggggagttctcagaggcaagggaggatcttgcagcactggagaaggattatgaggaagtcggagctgaagttgaagatgaggacgaggaagctgagtattgagtcatcgatctggatgcatggttattttcctttggtgtcagtcaaccaggcgtgcttgagttgcatggttgtacctcccatttattccatgtttgctattgcattacacctgttcatggttggcatagtagaagtgtgaagattggttgaactggtatgatggtttcagatcaaataaattatgttttcaaaatgtcatatgaaaaatttattagtagattagtcacaaaaaacata

SEQ ID NO: 81522 - DNA, 1838 bp, Zea Mays
aggccctatatatgagtcatcgcagtagttaacaattacacctagacctagtactgatttttgtccgtccgggttgctttccggctaacgtgtgtagtgtagcacaacccatcggtcgctgtctgctttctgaagaacgttcattccggttgacgccgctacgctgccgtgtcttctttccttcccttataccctgccgcacacaccttttccgtttgcagtggtgcaggtcttttcggtcctcaggcttcatccctgtgcaagtgcagggataattgcttctgatctcccgaggctgcataacctgattcagaggcagagcaagggggcgtgagggagatgagggagatcatcagcatccatatcgggcaggcaggcatccaggtagggaattcttgctgggagctctactgcctcgagcacggtatccagcctgacggcctcatgcccagtgacacctctgtcgggatcgcgagggatgcgttcaacacgttcttcagtgaaacgggcgcagggaagcacgttccaagggccctgtttgtcgacttggagcccactgtgattgacgaggtgaagactggggcttaccgccagcttttccatcctgagcagctcatctcacacaaggaagatgcagcgaacaacttcgcccgtggacattacacagttggaagagaagtaatagatctttgccttgatcggatacgaaaattggcagacaactgcactggtcttcaaggttttctggttttcaatgctgttggtggtggaacaggctccggcctgggttcgctacttttagaacgtctatcagtagattatggtaggaagtcaaagctcggtttcaccatctatccttccccacagatctcgactgctgtggtcgagccttataacagcgtgctctccacacattccttgattgaacacacagatgttgttgtgcttcttgacaatgaagctatctatgacatatgcaagaggtccctcgacattgagcgtccaacatacaccaatctgaacaggcttatatcacaagttatatcatctctgactacctctctgaggtttgaaggagctattaatgttgacataactgagttccagaccaaccttgtgccttatccccgcatacactttatgctctcttcgtatgctccaattatctcagtggaaaaggcctaccatgaacaacactctgttcctgagatcacaaattctgtgtttgagccatcaagtgtgatggcaaaatgtgatcccaggcatggaaagtacatggcatgctgtttgatgtaccgtggcgacgttgttccaaaagatgtgaatgctgctgtccattcaatcaagaccaagagagcagtgcagtttgttgattggtgccctactggtttcaagtgtgggataaactaccaaccaccaactgtagtccctggaggggacctggccaaggtgcaacgagcagtctgcatgatcagcaacaacacagccgtggctgagaaggggagttctcagaggcaagggaggatcttgcagcactggagaaggattatgaggaagtcggagctgaagttgaagatgaggacgaggaagctgagtattgagtcatcgatctggatgcatggttattttcctttggtgtcagtcaaccaggcgtgcttgagttgcatggttgtacctcccatttattccatgtttgctattgcattacacctgttcatggttggcatagtagaagtgtgaagattggttgaactggtatgatggtttcagatcaaataaattatgttttcaaaatgtcatatgaaaaatttattagtagattagtcacaaaaaacata

SEQ ID NO: 81523 - DNA, 2036 bp, Zea Mays
aggccctatatatgagtcatcgcagtagttaacaattacacctagacctagtactgatttttgtccgtccgggttgctttccggctaacgtgtgtagtgtagcacaacccatcggtcgctgtctgctttctgaagaacgttcattccggttgacgccgctacgctgccgtgtcttctttccttcccttataccctgccgcacacaccttttccgtttgcagtggtgcaggtcttttcggtcctcaggcttcatccctgtgcaagtgcagggataattgcttctgatctcccgaggctgcataacctgattcagaggcagagcaagggggcgtgagggagatgagggagatcatcagcatccatatcgggcaggcaggcatccaggtagggaattcttgctgggagctctactgcctcgagcacggtatccagcctgacggcctcatgcccagtgacacctctgtcgggatcgcgagggatgcgttcaacacgttcttcagtgaaacgggcgcagggaagcacgttccaagggccctgtttgtcgacttggagcccactgtgattgacgaggtgaagactggggcttaccgccagcttttccatcctgagcagctcatctcacacaaggaagatgcagcgaacaacttcgcccgtggacattacacagttggaagagaagtaatagatctttgccttgatcggatacgaaaattggcagacaactgcactggtcttcaaggttttctggttttcaatgctgttggtggtggaacaggctccggcctgggttcgctacttttagaacgtctatcagtagattatggtaggaagtcaaagctcggtttcaccatctatccttccccacaggagttgcagaagtgttcataagggacttacaggttctgtcattgatacgcctgggccttctaggagtgcgtaagggcgaatagaggagcagcgcagcctgggacagggacctgagagcgtatggtggagaagagcgagaggaagaagcaggagcaagatcaccgtcggccagggtgaccgaggtaatcgccccacagggagattgtatttccttcgatgcctagttacatgctactgcttcccctttatagaccagggtcggcaccaactgataagagataaacttgcttaacaaccccctgctattatttagctaacaactccctgctattatctagctaacaacccagctattatttagctaacaactccctgctattatctagctaacaacctagctattatttagctaatccttatctgctggaacttaagaattatctgctggaacttaggaattatctgctggagacttatctgctagagcagagctgctggcttcaccgccccgggtctggatctggctgtccctctgctgcctcctagtataagtctgccccacaaatgcatctgtaacatttctcccctcctggagaaacaggtcgtccgcgacctgtatagttggatatcgtagttggaaatcctctagctgaacccaggatgcttctgctgctggacgacccacccaataaactaacacttcccacacgcctctgttaagccttgccttggataccttctcaggtgtaggtaccaccctgccatgtaacagatctggaagaggcaccacctcgtctggcaactgtccaataaatttctttaatagtgacacatgaaaaacatcatgaatttttgcctttggagggagctgcaatttataaaatacgtcccccactaactgtgtaacctggtagggcccaaagaaacgaggtcccaacttggatgtagatgctggtgtcacgcccacgactgacctttgctgtaaccggagccacacccaatccccaacctggaatttcacctcccgtcgagtctggtcttggtactgcttcattgtgacttgggtctggaccagcctctccttgatttctgctaagaactcatcccgatcgcgaagctggccatccaccgcagctactcgcgctttacccggctggtaaggtagtaat

SEQ ID NO: 81524 - DNA, 2273 bp, Zea Mays
cacaacccatcggtcgctgtctgctttctgaagaacgttcattccggttgacgccgctacgctgccgtgtcttctttccttcccttataccctgccgcacacaccttttccgtttgcagtggtgcaggtcttttcggtcctcaggcttcatccctgtgcaagtgcagggataattgcttctgatctcccgaggctgcataacctgattcagaggcagagcaagggggcgtgagggagatgagggagatcatcagcatccatatcgggcaggcaggcatccaggtagggaattcttgctgggagctctactgcctcgagcacggtatccagcctgacggcctcatgcccagtgacacctctgtcgggatcgcgagggatgcgttcaacacgttcttcagtgaaacgggcgcagggaagcacgttccaagggccctgtttgtcgacttggagcccactgtgattgacgaggtgaagactggggcttaccgccagcttttccatcctgagcagctcatctcacacaaggaagatgcagcgaacaacttcgcccgtggacattacacaggtgtgacatgttcccctcaccctgagctatttcccggagaacaaaaaatgtttttgcaattttaaatgcaatattggttcaagtacaaaaactattggggtttggaagccctaccttgaatttcggtgcattgccaaaatgcgtaaagaccaaatttgtgttcttgaacagtactagcaagtggtagccagaactagtccacaacaatttggatattatgaaggggctgggtcaggatcttataatttacatattcaaccatcctatgccatgattattatagtatttttcatgacttcatatcatacaagcaacctcactttccttacctggggcaattgttttaaaaacattacaatgctttggaactgttctctgctctttattaatacctatcctgtttggaaactgagtaatgtcagaagttctacaacatgttttttctgctgcagttggaagagaagtaatagatctttgccttgatcggatacgaaaattggcagacaactgcactggtcttcaaggttttctggttttcaatgctgttggtggtggaacaggctccggcctgggttcgctacttttagaacgtctatcagtagattatggtaggaagtcaaagctcggtttcaccatctatccttccccacagatctcgactgctgtggtcgagccttataacagcgtgctctccacacattccttgattgaacacacagatgttgttgtgcttcttgacaatgaagctatctatgacatatgcaagaggtccctcgacattgagcgtccaacatacaccaatctgaacaggcttatatcacaagttatatcatctctgactacctctctgaggtttgaaggagctattaatgttgacataactgagttccagaccaaccttgtgccttatccccgcatacactttatgctctcttcgtatgctccaattatctcagtggaaaaggcctaccatgaacaacactctgttcctgagatcacaaattctgtgtttgagccatcaagtgtgatggcaaaatgtgatcccaggcatggaaagtacatggcatgctgtttgatgtaccgtggcgacgttgttccaaaagatgtgaatgctgctgtccattcaatcaagaccaagagagcagtgcagtttgttgattggtgccctactggtttcaagtgtgggataaactaccaaccaccaactgtagtccctggaggggacctggccaaggtgcaacgagcagtctgcatgatcagcaacaacacagccgtggctgaggtcttctctcgtattgaccgcaagtttgatctcatgtatgccaaacgtgcattcgttcattggtatgtcggtgaagggatggaagaaggggagttctcagaggcaagggaggatcttgcagcactggagaaggattatgaggaagtcggagctgaagttgaagatgaggacgaggaagctgagtattgagtcatcgatctggatgcatggttattttcctttggtgtcagtcaaccaggcgtgcttgagttgcatggttgtacctcccatttattccatgtttgctattgcattacacctgttcatggttggcatagtagaagtgtgaagattggttgaactggtatgatggtttcagatcaaataaattatgttttcaaaatgtcatatgaaaaatttattagtagattagtcacaaaaaacata

SEQ ID NO: 81525 - DNA, 2270 bp, Zea Mays
gtctgctttctgaagaacgttcattccggttgacgccgctacgctgccgtgtcttctttccttcccttataccctgccgcacacaccttttccgtttgcagtggtgcaggtcttttcggtcctcaggcttcatccctgtgcaagtgcagggataattgcttctgatctcccgaggctgcataacctgattcagaggcagagcaagggggcgtgagggagatgagggagatcatcagcatccatatcgggcaggcaggcatccaggtagggaattcttgctgggagctctactgcctcgagcacggtatccagcctgacggcctcatgcccaggtgaggcccctttccattccaactcatcctttccttgagaattatgtcagattttgttctgtacttctctctgagatgattattccagttccagctcagataattatttaagatagggctgccatctgggttcttgtagcagtcgcctcaaaaggttgggtttttgagataatcctgaggaagatctttacttgttgatcacagacagcactctaaaagctagagaaacttcgctggatgctctgacctctaaaaatcttctcttaagagtcgatgacacccctgcgttcaaaaccacttgcttaaaaagttagaaagagacatgataggataaacaaccctgcatattaaagaagaagctcgtgttttctgaaacgaggataatcatgtgacaagctaccggtttctgtgtccaactcaccgatttcacagcatccaaattctcagccttggccgttcgcttgcagtgacacctctgtcgggatcgcgagggatgcgttcaacacgttcttcagtgaaacgggcgcagggaagcacgttccaagggccctgtttgtcgacttggagcccactgtgattgacgaggtgaagactggggcttaccgccagcttttccatcctgagcagctcatctcacacaaggaagatgcagcgaacaacttcgcccgtggacattacacagttggaagagaagtaatagatctttgccttgatcggatacgaaaattggcagacaactgcactggtcttcaaggttttctggttttcaatgctgttggtggtggaacaggctccggcctgggttcgctacttttagaacgtctatcagtagattatggtaggaagtcaaagctcggtttcaccatctatccttccccacagatctcgactgctgtggtcgagccttataacagcgtgctctccacacattccttgattgaacacacagatgttgttgtgcttcttgacaatgaagctatctatgacatatgcaagaggtccctcgacattgagcgtccaacatacaccaatctgaacaggcttatatcacaagttatatcatctctgactacctctctgaggtttgaaggagctattaatgttgacataactgagttccagaccaaccttgtgccttatccccgcatacactttatgctctcttcgtatgctccaattatctcagtggaaaaggcctaccatgaacaacactctgttcctgagatcacaaattctgtgtttgagccatcaagtgtgatggcaaaatgtgatcccaggcatggaaagtacatggcatgctgtttgatgtaccgtggcgacgttgttccaaaagatgtgaatgctgctgtccattcaatcaagaccaagagagcagtgcagtttgttgattggtgccctactggtttcaagtgtgggataaactaccaaccaccaactgtagtccctggaggggacctggccaaggtgcaacgagcagtctgcatgatcagcaacaacacagccgtggctgaggtcttctctcgtattgaccgcaagtttgatctcatgtatgccaaacgtgcattcgttcattggtatgtcggtgaagggatggaagaaggggagttctcagaggcaagggaggatcttgcagcactggagaaggattatgaggaagtcggagctgaagttgaagatgaggacgaggaagctgagtattgagtcatcgatctggatgcatggttattttcctttggtgtcagtcaaccaggcgtgcttgagttgcatggttgtacctcccatttattccatgtttgctattgcattacacctgttcatggttggcatagtagaagtgtgaagattggttgaactggtatgatggtttcagatcaaataaattatgttttcaaaatgtcatatgaaaaatttattagtagattagtcacaaaaaacata

SEQ ID NO: 81526 - DNA, 1987 bp, Zea Mays
cggctccgcctgtcggcgagcgcacgccgcgtgcctgcccgcggtctctcgtcgtctccagaagatgcgccccgatactcgtctttccacccttcttctacctccttccacccccttctccccacgccccatcggatcgcacgcgcaccgcaattgttgttcatcacctctccgaagaagcgtcacagagcaccgcccggaggttccccttcccgtcgccgtcgcttggccaggatggctgaacaattctataccgtggcatcggatagtgaaaccaccggggaagacaaatcacaggcttcattccctgatgttgctgttggcattgacattgggacttccaaatgcagtgttgctatttggaatggccaccaagttgagctcttaaagaatacccgtaatcagaaagggatgaggtcatatgtcatgttcaaagatgatactctttcagcaggagttactggaggtgcagccaaggaaaatgcacacgaggaaagagacatcttgtcaggaagtgccatattcaacatgaaacgcctgataggaagaatggacactgatgaagtggttcaagctagtaagactctcccatttcttgtgcagacattgggtatcggtgtgagaccattcattgcagcgctcgtgaacaacatgtggcgatctacaactccggaggaggtccttgccatctttctacttgaactgaaggccttggtggagatgcaccttaagcatcccgttaggaatgctgtgcttacaataccagttgcattcagtcgatttcaacagaccaggattgagagagcctgtgcaatggctgggctgcatgtgttgaggttgatgccagaaccaactgctgtggcgcttctgtacgctcagcagcagcagcagcttgtgcatgacaatatgggaagcggcatcgagaaaattgctctgatatttaacatggtgtccaaagttctagaccattcagagtttgaacaagtcaaccgggcaattttcgacaagtgcgaaaagatcatcaaccagtgcttggctgatgcgaagttggtaccagaggacatcaatgatgtcatactggtcggaggttgttcgaagatccccagaatcagaagccttgtcctgggtttgtgcaagaaggaggtctcttacaagaacatagatgctctagaagctgctgtttcaggtgctgcgctggaaggagccatagcttcgggagtgaatgatccttcggggagcttggatcttctcacgatccaggcaactcccatgaacctgggaatccgtgccgacggtgatagcttcgctgcgatcatccctaggaacacgacggttccagcaaggagggacatgctgttcacaacgacacacgacaagcagaccgaagccctaattgctgtgtatgaaggagaaggggaacgtgctgaagataaccatctgttagggtacttcaagattactggaattccggcagcccctaagggagcagttgatatcagtgtatgcatggatatcgatgctgccaatgtcctcagggtgttcgcaggggtcgtcaagcctcaaggcccagccattccaccgttcatcgaggtgaggatgccaacgctggacgatggccatggttggtgtgggcaagctctagcaaagatgtatgggaggattctcgaccttgctgttcttccgaagaagctgcagccatgatatgtggccttccgaggcctcgtaagtagctggtgcgttgtgcgaatgtagcggatgctcagtgttcagtattcactgtgtcactgtcccccgtcttgtgtgggcgctgtctatgtgctgttggtgttgggcagtcttcagaactgaactaccagtttcatccttgtgcaataatgtctcgtacatgtgagatgaatgttgcggatgtttgtacttcatagttttcaggatttgttgactgctggactgctggtgtgcagtacgaaactgagagtttcatccttct

SEQ ID NO: 81527 - DNA, 694 bp, Zea Mays
gcctgctctgcttcaggtactacatgccatgccaggccaacatgtcgctgtcctttctcctcctcctctcatagcctgcaggctgcagctacttatccgttctcttctccctgaaaagatcaacaaacccatctccagcccacaaggccacaggctagatctgaccgaccgtccatgcatggcttccctgtgcatgtttaccatcagcagcaccccacatgttccgcagggctgcaggcgacgatgtagcgacgccgtgtcgtctaggccgagatcctacctcgtctgccaaagtcacctcccgtccgggccgccggcaagcggcggcggcgggggaggaggtggtgaggagaagacgaccccgtggtgggctgccacggccgagaggctgcgcggcgacgtggtgaaggccgggatggcagcgcgggagagcctgagccccaagcagaagggggactggaaggacgtcacgctcatgagcttctccttcgccgtgtacgtgtacatctctcagaagctcgtgtgcacgtactgcgcttggctctctatgattaaccactgacttggtgctgtaatcatctataccgttgctgatcttcaaggtagaaaagatcgttgctgttagttgcatatggatgctgtacctgtagtatatttagatccaaatccaataaagcctcaatttccattgtta

SEQ ID NO: 81528 - DNA, 2940 bp, Zea Mays
gaagccttcacggtctaggctcgagacgagacggagtgacccactagcagtctcgtacaacgaactatcctgttagccagccctaaacccttctgtcccgatggcgtcgtcgtcgtcgccgccgccgccgaagctgccgattcccggccgccgcaacatactcatcactagcgcacttccgtacgtcaataatgtcccgcacctagggaacatcatcggctgtgtgctcagcgcagacgtgttcgcgcggtactgccggctccggggttacaacgctatctacatatgcgggacggacgagtatggcaccgccaccgaaacgaaggccatggaggagaagtgcacgcccaaggagatctgcgataagtaccatgctatccacaatgaagtttacaagtggtttaacataaaatttgacaagtttggacggacctcttctcctgagcagacagaagtctgccatgcaattttccataaattgatggaaaacaattggctcacagaaaatactatgcagcaggcttgttgaaggaacatgcccgaacaaagtctgcaacgcatcagcaagaggagatcagtgtgaaacatgcagcaccttgttgaatccaactgaacttattgacccaaagtgcaaggtttgtaagaacactccacgtattcgtgacacggatcacttatttttggagcttcctctattgagagacaagctggtaaactacatcaatgaaacttcagttgctggtttgtggagtcaaaatgctattcaagcaacaaatgcatggctgaaggaagggctaaagccacgctgcatcaccagagatcttaaatggggtgttcctgtcccccatgagaagtataaagacaaggtgttctatgtttggtttgatgcacctatcggctacgtgtctattacggcatcctatacacctgagtgggagaagtggtggaagaatcctgataatgtagaattgtttcagtttatgggcaaagataatgtgccgtttcacacgatcatgttcccttcaacgctactcggaactggggaaaagtggacaatgatgaaaacgataagtgttactgaatatttgaattatgaagcaggcaaattttccaagagtaaaggtattggagtctttggtaatgatgcaaaggatacaaatattcctcctgaagtatggcgatactatttgcttatgaatcgccctgaggcatcagatacactctttacttgggctgatttgcaagccaaattgaacagcgagttgctgaacaacttgggaaacttcattaatcgtgtgctaagttttgttgcaaaaccagctggagctggatatggttctgttgtacccgatgcacctaatgcgggcgcgcacacattgacaaaaacacttgcagaaaaaaccagtaaatgggttgaacaatatctcgacgcaatggaaaaggttaaactgaaacaaggactcaagagtgcaatgggcatttctagtgatggaaatgcatatttgcaagagagccagttttggaaactttacaaggaagatcctgcagcatgtgcaatcgtgatgaaaacttcagttggccttgtttacctgcttgcctgtctgctggagcctttcatgccctctttttctgatgaagtgttacgtcaactaaatttatctccagaagaaaatctgtcattaagtgaagaaaagggagaaattgcgaaggcaaaaactccttggaattttgtaccagcaggtcacagaatagggaaacccgcacctctgttcaaggaattgaaagatgaagacgtagctctccatagagaaaaatatgcagggagtcaagctgagagaagctcaaaagcagcagctgatgctgaagccaacaaagttgctaaccagctcaagggcacaaaattatctgatggaggaacaaaaaaggaaccgaagaaacaatctggtggctcaaaatcgaagacagctgaggctgacattacagttgcaaagttggatattagagtggggcttatcagaaaagcagagaagcatccagatgctgattccctttacgtggaggagattgatgttggagaggacgcgccgagaacagtagtcagtggccttgttaaattcatacctcttgaagaaatgcagagccggaaagtctgcgtgctctgcaatctgaaaccggtggcaatgcgtggcataaaatcacatgcaatggttctggctgcatcgaatgaggaccacacgaaggttgagttggtggaacctccagagtctgctgctgtgggggagcgtgttacctttgctgggtacgcgggtgagcccgaggcttccctcagtggcaagagcaagacgtgggagaagctggccgccgagttgcacagcaacggtgagctggtggcgtgctacagagatgtgcccttcactacctcggctggagtctgcagggtgaagacaatagcgaacggagagattcgctagtaccaccacatcaccgaactgcagccagcggagccagtctgtgtctggtttcgctgaaagcgattgttcctgattttcatcttcgaaaattttggtatttccatttgttcaaataccgcaaagcaaccatgatttagaaaaatacagagagtgccctttccgcatcctcttttttatcagttagtacttggctcctgttgtctcactcggaggctccatgcttcttgctctatctgtatttccttagaagtgattctttacctgctcttatttatagttccatatgaaaggaacgaagtgtatcagaacatcactttatatataggagggcctgtctgtcactgccccctgtcaatgcatggaaaggagcaagcaaggaagcttgaaggaactgtaaacagagcttggccaatgggcagcgcccgctagattcacgaacgaacgaccatgattgccgggtagttgcaag

SEQ ID NO: 81529 - DNA, 2921 bp, Zea Mays
cacggtctaggctcgagacgagacggagtgacccactagcagtctcgtacaacgaactatcctgttagccagccctaaacccttctgtcccgatggcgtcgtcgtcgtcgccgccgccgccgaagctgccgattcccggccgccgcaacatactcatcactagcgcacttccgtacgtcaataatgtcccgcacctagggaacatcatcggctgtgtgctcagcgcagacgtgttcgcgcggtactgccggctccggggttacaacgctatctacatatgcgggacggacgagtatggcaccgccaccgaaacgaaggccatggaggagaagtgcacgcccaaggagatctgcgataagtaccatgctatccacaatgaagtttacaagtggtttaacataaaatttgacaagtttggacggacctcttctcctgagcagacagaagtctgccatgcaattttccataaattgatggaaaacaattggctcacagaaaatactatgcagcaggaacatgcccgaacaaagtctgcaacgcatcagcaagaggagatcagtgtgaaacatgcagcaccttgttgaatccaactgaacttattgacccaaagtgcaaggtttgtaagaacactccacgtattcgtgacacggatcacttatttttggagcttcctctattgagagacaagctggtaaactacatcaatgaaacttcagttgctggtttgtggagtcaaaatgctattcaagcaacaaatgcatggctgaaggaagggctaaagccacgctgcatcaccagagatcttaaatggggtgttcctgtcccccatgagaagtataaagacaaggtgttctatgtttggtttgatgcacctatcggctacgtgtctattacggcatcctatacacctgagtgggagaagtggtggaagaatcctgataatgtagaattgtttcagtttatgggcaaagataatgtgccgtttcacacgatcatgttcccttcaacgctactcggaactggggaaaagtggacaatgatgaaaacgataagtgttactgaatatttgaattatgaagcaggcaaattttccaagagtaaaggtattggagtctttggtaatgatgcaaaggatacaaatattcctcctgaagtatggcgatactatttgcttatgaatcgccctgaggcatcagatacactctttacttgggctgatttgcaagccaaattgaacagcgagttgctgaacaacttgggaaacttcattaatcgtgtgctaagttttgttgcaaaaccagctggagctggatatggttctgttgtacccgatgcacctaatgcgggcgcgcacacattgacaaaaacacttgcagaaaaaaccagtaaatgggttgaacaatatctcgacgcaatggaaaaggttaaactgaaacaaggactcaagagtgcaatgggcatttctagtgatggaaatgcatatttgcaagagagccagttttggaaactttacaaggaagatcctgcagcatgtgcaatcgtgatgaaaacttcagttggccttgtttacctgcttgcctgtctgctggagcctttcatgccctctttttctgatgaagtgttacgtcaactaaatttatctccagaagaaaatctgtcattaagtgaagaaaagggagaaattgcgaaggcaaaaactccttggaattttgtaccagcaggtcacagaatagggaaacccgcacctctgttcaaggaattgaaagatgaagacgtagctctccatagagaaaaatatgcagggagtcaagctgagagaagctcaaaagcagcagctgatgctgaagccaacaaagttgctaaccagctcaagggcacaaaattatctgatggaggaacaaaaaaggaaccgaagaaacaatctggtggctcaaaatcgaagacagctgaggctgacattacagttgcaaagttggatattagagtggggcttatcagaaaagcagagaagcatccagatgctgattccctttacgtggaggagattgatgttggagaggacgcgccgagaacagtagtcagtggccttgttaaattcatacctcttgaagaaatgcagagccggaaagtctgcgtgctctgcaatctgaaaccggtggcaatgcgtggcataaaatcacatgcaatggttctggctgcatcgaatgaggaccacacgaaggttgagttggtggaacctccagagtctgctgctgtgggggagcgtgttacctttgctgggtacgcgggtgagcccgaggcttccctcagtggcaagagcaagacgtgggagaagctggccgccgagttgcacagcaacggtgagctggtggcgtgctacagagatgtgcccttcactacctcggctggagtctgcagggtgaagacaatagcgaacggagagattcgctagtaccaccacatcaccgaactgcagccagcggagccagtctgtgtctggtttcgctgaaagcgattgttcctgattttcatcttcgaaaattttggtatttccatttgttcaaataccgcaaagcaaccatgatttagaaaaatacagagagtgccctttccgcatcctcttttttatcagttagtacttggctcctgttgtctcactcggaggctccatgcttcttgctctatctgtatttccttagaagtgattctttacctgctcttatttatagttccatatgaaaggaacgaagtgtatcagaacatcactttatatataggagggcctgtctgtcactgccccctgtcaatgcatggaaaggagcaagcaaggaagcttgaaggaactgtaaacagagcttggccaatgggcagcgcccgctagattcacgaacgaacgaccatgattgccgggtagttgcaag

SEQ ID NO: 81530 - DNA, 1926 bp, Zea Mays
gagacgagacggagtgacccactagcagtctcgtacaacgaactatcctgttagccagccctaaacccttctgtcccgatggcgtcgtcgtcgtcgccgccgccgccgaagctgccgattcccggccgccgcaacatactcatcactagcgcacttccgtacgtcaataatgtcccgcacctagggaacatcatcggctgtgtgctcagcgcagacgtgttcgcgcggtactgccggctccggggttacaacgctatctacatatgcgggacggacgagtatggcaccgccaccgaaacgaaggccatggaggagaagtgcacgcccaaggagatctgcgataagtaccatgctatccacaatgaagtttacaagtggtttaacataaaatttgacaagtttggacggacctcttctcctgagcagacagaagtctgccatgcaattttccataaattgatggaaaacaattggctcacagaaaatactatgcagcaggaacatgcccgaacaaagtctgcaacgcatcagcaagaggagatcagtgtgaaacatgcagcaccttgttgaatccaactgaacttattgacccaaagtgcaaggtttgtaagaacactccacgtattcgtgacacggatcacttatttttggagcttcctctattgagagacaagctggtaaactacatcaatgaaacttcagttgctggtttgtggagtcaaaatgctattcaagcaacaaatgcatggctgaaggaagggctaaagccacgctgcatcaccagagatcttaaatggggtgttcctgtcccccatgagaagtataaagacaaggtgttctatgtttggtttgatgcacctatcggctacgtgtctattacggcatcctatacacctgagtgggagaagtggtggaagaatcctgataatgtagaattgtttcagtttatgggcaaagataatgtgccgtttcacacgatcatgttcccttcaacgctactcggaactggggaaaagtggacaatgatgaaaacgataagtgttactgaatatttgaattatgaagcaggcaaattttccaagagtaaaggtattggagtctttggtaatgatgcaaaggatacaaatattcctcctgaagtatggcgatactatttgcttatgaatcgccctgaggcatcagatacactctttacttgggctgatttgcaagccaaattgaacagcgagttgctgaacaacttgggaaacttcattaatcgtgtgctaagttttgttgcaaaaccagctggagctggatatggttctgttgtacccgatgcacctaatgcgggcgcgcacacattgacaaaaacacttgcagaaaaaaccagtaaatgggttgaacaatatctcgacgcaatggaaaaggttaaactgaaacaaggactcaagagtgcaatgggcatttctagtgatggaaatgcatatttgcaagagagccagttttggaaactttacaaggaagatcctgcagcatgtgcaatcgtgatgaaaacttcagttggccttgtttacctgcttgcctgtctgctggagcctttcatgccctctttttctgatgaagtgttacgtcaactaaatttatctccagaagaaaatctgtcattaagtgaagaaaagggagaaattgcgaaggcaaaaactccttggaattttgtaccagcaggtcacagaatagggaaacccgcacctctgttcaaggaattgaaagatgaagacgtagctctccatagagaaaaatatgcagggagtcaagctgagagaagctcaaaagcagcagctgatgctgaagccaacaaagttgctaaccagctcaagggcacaaaattatctgggctgctcaactctgaagctcatgaagctgagctggttttgtgaagctgtg

SEQ ID NO: 81531 - DNA, 3020 bp, Zea Mays
acggagtgacccactagcagtctcgtacaacgaactatcctgttagccagccctaaacccttctgtcccgatggcgtcgtcgtcgtcgccgccgccgccgaagctgccgattcccggccgccgcaacatactcatcactagcgcacttccgtacgtcaataatgtcccgcacctagggaacatcatcggctgtgtgctcagcgcagacgtgttcgcgcggtactgccggctccggggttacaacgctatctacatatgcgggacggacgagtatggcaccgccaccgaaacgaaggccatggaggagaagtgcacgcccaaggagatctgcgataagtaccatgctatccacaatgaagtttacaagtggtttaacataaaatttgacaagtttggacggacctcttctcctgagcagacagaagtctgccatgcaattttccataaattgatggaaaacaattggctcacagaaaatactatgcagcagctgataggcttgttgaaggaacatgcccgaacaaagtctgcaacgcatcagcaagaggagatcagtgtgaaacatgcagcaccttgttgaatccaactgaacttattgacccaaagtgcaaggtttgtaagaacactccacgtattcgtgacacggatcacttatttttggagcttcctctattgagagacaagctggtaaactacatcaatgaaacttcagttgctggtttgtggagtcaaaatgctattcaagcaacaaatgcatggctgaaggaagggctaaagccacgctgcatcaccagagatcttaaatggggtgttcctgtcccccatgagaagtataaagacaaggtgttctatgtttggtttgatgcacctatcggctacgtgtctattacggcatcctatacacctgagtgggagaagtggtggaagaatcctgataatgtagaattgtttcagtttatgggcaaagataatgtgccgtttcacacgatcatgttcccttcaacgctactcggaactggggaaaagtggacaatgatgaaaacgataagtgttactgaatatttgaattatgaagcaggcaaattttccaagagtaaaggtattggagtctttggtaatgatgcaaaggatacaaatattcctcctgaagtatggcgatactatttgcttatgaatcgccctgaggcatcagatacactctttacttgggctgatttgcaagccaaattgaacagcgagttgctgaacaacttgggaaacttcattaatcgtgtgctaagttttgttgcaaaaccagctggagctggatatggttctgttgtacccgatgcacctaatgcgggcgcgcacacattgacaaaaacacttgcagaaaaaaccagtaaatgggttgaacaatatctcgacgcaatggaaaaggttaaactgaaacaaggactcaagagtgcaatgggcatttctagtgatggaaatgcatatttgcaagagagccagttttggaaactttacaaggaagatcctgcagcatgtgcaatcgtgatgaaaacttcagttggccttgtttacctgcttgcctgtctgctggagcctttcatgccctctttttctgatgaagtgttacgtcaactaaatttatctccagaagaaaatctgtcattaagtgaagaaaagggagaaattgcgaaggcaaaaactccttggaattttgtaccagcaggtcacagaatagggaaacccgcacctctgttcaaggaattgaaagatgaagacgtagctctccatagagaaaaatatgcagggagtcaagctgagagaagctcaaaagcagcagctgatgctgaagccaacaaagttgctaaccagctcaagggcacaaaattatctgggctgctcaactctgaagctcatgaagctgagctggttttgtgaagctgtgctgtgcgcctgtgccaaacacctccttagttttcctctcgtgtctctttcagatggaggaacaaaaaaggaaccgaagaaacaatctggtggctcaaaatcgaagacagctgaggctgacattacagttgcaaagttggatattagagtggggcttatcagaaaagcagagaagcatccagatgctgattccctttacgtggaggagattgatgttggagaggacgcgccgagaacagtagtcagtggccttgttaaattcatacctcttgaagaaatgcagagccggaaagtctgcgtgctctgcaatctgaaaccggtggcaatgcgtggcataaaatcacatgcaatggttctggctgcatcgaatgaggaccacacgaaggttgagttggtggaacctccagagtctgctgctgtgggggagcgtgttacctttgctgggtacgcgggtgagcccgaggcttccctcagtggcaagagcaagacgtgggagaagctggccgccgagttgcacagcaacggtgagctggtggcgtgctacagagatgtgcccttcactacctcggctggagtctgcagggtgaagacaatagcgaacggagagattcgctagtaccaccacatcaccgaactgcagccagcggagccagtctgtgtctggtttcgctgaaagcgattgttcctgattttcatcttcgaaaattttggtatttccatttgttcaaataccgcaaagcaaccatgatttagaaaaatacagagagtgccctttccgcatcctcttttttatcagttagtacttggctcctgttgtctcactcggaggctccatgcttcttgctctatctgtatttccttagaagtgattctttacctgctcttatttatagttccatatgaaaggaacgaagtgtatcagaacatcactttatatataggagggcctgtctgtcactgccccctgtcaatgcatggaaaggagcaagcaaggaagcttgaaggaactgtaaacagagcttggccaatgggcagcgcccgctagattcacgaacgaacgaccatgattgccgggtagttgcaag

SEQ ID NO: 81532 - DNA, 2754 bp, Zea Mays
cggagtgacccactagcagtctcgtacaacgaactatcctgttagccagccctaaacccttctgtcccgatggcgtcgtcgtcgtcgccgccgccgccgaagctgccgattcccggccgccgcaacatactcatcactagcgcacttccgtacgtcaataatgtcccgcacctagggaacatcatcggctgtgtgctcagcgcagacgtgttcgcgcggtactgccggctccggggttacaacgctatctacatatgcgggacggacgagtatggcaccgccaccgaaacgaaggccatggaggagaagtgcacgcccaaggagatctgcgataagtaccatgctatccacaatgaagtttacaagtggtttaacataaaatttgacaagtttggacggacctcttctcctgagcagacagaagtctgccatgcaattttccataaattgatggaaaacaattggctcacagaaaatactatgcagcaggaacatgcccgaacaaagtctgcaacgcatcagcaagaggagatcagtgtgaaacatgcagcaccttgttgaatccaactgaacttattgacccaaagtgcaaggtttgtaagaacactccacgtattcgtgacacggatcacttatttttggagcttcctctattgagagacaagctggtaaactacatcaatgaaacttcagttgctggtttgtggagtcaaaatgctattcaagcaacaaatgcatggctgaaggaagggctaaagccacgctgcatcaccagagatcttaaatggggtgttcctgtcccccatgagaagtataaagacaaggtgttctatgtttggtttgatgcacctatcggctacgtgtctattacggcatcctatacacctgagtgggagaagtggtggaagaatcctgataatgtagaattgtttcagtttatgggcaaagataatgtgccgtttcacacgatcatgttcccttcaacgctactcggaactggggaaaagtggacaatgatgaaaacgataagtgttactgaatatttgaattatgaagcaggcaaattttccaagagtaaaggtattggagtctttggtaatgatgcaaaggatacaaatattcctcctgaagtatggcgatactatttgcttatgaatcgccctgaggcatcagatacactctttacttgggctgatttgcaagccaaattgaacagcgagttgctgaacaacttgggaaacttcattaatcgtgtgctaagttttgttgcaaaaccagctggagctggatatggttctgttgtacccgatgcacctaatgcgggcgcgcacacattgacaaaaacacttgcagaaaaaaccagtaaatgggttgaacaatatctcgacgcaatggaaaaggttaaactgaaacaaggactcaagagtgcaatgggcatttctagtgatggaaatgcatatttgcaagagagccagttttggaaactttacaaggaagatcctgcagcatgtgcaatcgtgatgaaaacttcagttggccttgtttacctgcttgcctgtctgctggagcctttcatgccctctttttctgatgaaaaagatgaagacgtagctctccatagagaaaaatatgcagggagtcaagctgagagaagctcaaaagcagcagctgatgctgaagccaacaaagttgctaaccagctcaagggcacaaaattatctgatggaggaacaaaaaaggaaccgaagaaacaatctggtggctcaaaatcgaagacagctgaggctgacattacagttgcaaagttggatattagagtggggcttatcagaaaagcagagaagcatccagatgctgattccctttacgtggaggagattgatgttggagaggacgcgccgagaacagtagtcagtggccttgttaaattcatacctcttgaagaaatgcagagccggaaagtctgcgtgctctgcaatctgaaaccggtggcaatgcgtggcataaaatcacatgcaatggttctggctgcatcgaatgaggaccacacgaaggttgagttggtggaacctccagagtctgctgctgtgggggagcgtgttacctttgctgggtacgcgggtgagcccgaggcttccctcagtggcaagagcaagacgtgggagaagctggccgccgagttgcacagcaacggtgagctggtggcgtgctacagagatgtgcccttcactacctcggctggagtctgcagggtgaagacaatagcgaacggagagattcgctagtaccaccacatcaccgaactgcagccagcggagccagtctgtgtctggtttcgctgaaagcgattgttcctgattttcatcttcgaaaattttggtatttccatttgttcaaataccgcaaagcaaccatgatttagaaaaatacagagagtgccctttccgcatcctcttttttatcagttagtacttggctcctgttgtctcactcggaggctccatgcttcttgctctatctgtatttccttagaagtgattctttacctgctcttatttatagttccatatgaaaggaacgaagtgtatcagaacatcactttatatataggagggcctgtctgtcactgccccctgtcaatgcatggaaaggagcaagcaaggaagcttgaaggaactgtaaacagagcttggccaatgggcagcgcccgctagattcacgaacgaacgaccatgattgccgggtagttgcaag

SEQ ID NO: 81533 - DNA, 2731 bp, Zea Mays
acaacgaactatcctgttagccagccctaaacccttctgtcccgatggcgtcgtcgtcgtcgccgccgccgccgaagctgccgattcccggccgccgcaacatactcatcactagcgcacttccgtacgtcaataatgtcccgcacctagggaacatcatcggctgtgtgctcagcgcagacgtgttcgcgcggtactgccggctccggggttacaacgctatctacatatgcgggacggacgagtatggcaccgccaccgaaacgaaggccatggaggagaagtgcacgcccaaggagatctgcgataagtaccatgctatccacaatgaagtttacaagtggtttaacataaaatttgacaagtttggacggacctcttctcctgagcagacagaagtctgccatgcaattttccataaattgatggaaaacaattggctcacagaaaatactatgcagcagctgataggcttgttgaaggaacatgcccgaacaaagtctgcaacgcatcagcaagaggagatcagtgtgaaacatgcagcaccttgttgaatccaactgaacttattgacccaaagtgcaaggtttgtaagaacactccacgtattcgtgacacggatcacttatttttggagcttcctctattgagagacaagctggtaaactacatcaatgaaacttcagttgctggtttgtggagtcaaaatgctattcaagcaacaaatgcatggctgaaggaagggctaaagccacgctgcatcaccagagatcttaaatggggtgttcctgtcccccatgagaagtataaagacaaggtgttctatgtttggtttgatgcacctatcggctacgtgtctattacggcatcctatacacctgagtgggagaagtggtggaagaatcctgataatgtagaattgtttcagtttatgggcaaagataatgtgccgtttcacacggcaaattttccaagagtaaaggtattggagtctttggtaatgatgcaaaggatacaaatattcctcctgaagtatggcgatactatttgcttatgaatcgccctgaggcatcagatacactctttacttgggctgatttgcaagccaaattgaacagcgagttgctgaacaacttgggaaacttcattaatcgtgtgctaagttttgttgcaaaaccagctggagctggatatggttctgttgtacccgatgcacctaatgcgggcgcgcacacattgacaaaaacacttgcagaaaaaaccagtaaatgggttgaacaatatctcgacgcaatggaaaaggttaaactgaaacaaggactcaagagtgcaatgggcatttctagtgatggaaatgcatatttgcaagagagccagttttggaaactttacaaggaagatcctgcagcatgtgcaatcgtgatgaaaacttcagttggccttgtttacctgcttgcctgtctgctggagcctttcatgccctctttttctgatgaaaagaaaatctgtcattaagtgaagaaaagggagaaattgcgaaggcaaaaactccttggaattttgtaccagcagaaagatgaagacgtagctctccatagagaaaaatatgcagggagtcaagctgagagaagctcaaaagcagcagctgatgctgaagccaacaaagttgctaaccagctcaagggcacaaaattatctgatggaggaacaaaaaaggaaccgaagaaacaatctggtggctcaaaatcgaagacagctgaggctgacattacagttgcaaagttggatattagagtggggcttatcagaaaagcagagaagcatccagatgctgattccctttacgtggaggagattgatgttggagaggacgcgccgagaacagtagtcagtggccttgttaaattcatacctcttgaagaaatgcagagccggaaagtctgcgtgctctgcaatctgaaaccggtggcaatgcgtggcataaaatcacatgcaatggttctggctgcatcgaatgaggaccacacgaaggttgagttggtggaacctccagagtctgctgctgtgggggagcgtgttacctttgctgggtacgcgggtgagcccgaggcttccctcagtggcaagagcaagacgtgggagaagctggccgccgagttgcacagcaacggtgagctggtggcgtgctacagagatgtgcccttcactacctcggctggagtctgcagggtgaagacaatagcgaacggagagattcgctagtaccaccacatcaccgaactgcagccagcggagccagtctgtgtctggtttcgctgaaagcgattgttcctgattttcatcttcgaaaattttggtatttccatttgttcaaataccgcaaagcaaccatgatttagaaaaatacagagagtgccctttccgcatcctcttttttatcagttagtacttggctcctgttgtctcactcggaggctccatgcttcttgctctatctgtatttccttagaagtgattctttacctgctcttatttatagttccatatgaaaggaacgaagtgtatcagaacatcactttatatataggagggcctgtctgtcactgccccctgtcaatgcatggaaaggagcaagcaaggaagcttgaaggaactgtaaacagagcttggccaatgggcagcgcccgctagattcacgaacgaacgaccatgattgccgggtagttgcaag

SEQ ID NO: 81534 - DNA, 2819 bp, Zea Mays
acaacgaactatcctgttagccagccctaaacccttctgtcccgatggcgtcgtcgtcgtcgccgccgccgccgaagctgccgattcccggccgccgcaacatactcatcactagcgcacttccgtacgtcaataatgtcccgcacctagggaacatcatcggctgtgtgctcagcgcagacgtgttcgcgcggtactgccggctccggggttacaacgctatctacatatgcgggacggacgagtatggcaccgccaccgaaacgaaggccatggaggagaagtgcacgcccaaggagatctgcgataagtaccatgctatccacaatgaagtttacaagtggtttaacataaaatttgacaagtttggacggacctcttctcctgagcagacagaagtctgccatgcaattttccataaattgatggaaaacaattggctcacagaaaatactatgcagcagctgataggcttgttgaaggaacatgcccgaacaaagtctgcaacgcatcagcaagaggagatcagtgtgaaacatgcagcaccttgttgaatccaactgaacttattgacccaaagtgcaagctggtaaactacatcaatgaaacttcagttgctggtttgtggagtcaaaatgctattcaagcaacaaatgcatggctgaaggaagggctaaagccacgctgcatcaccagagatcttaaatggggtgttcctgtcccccatgagaagtataaagacaaggtgttctatgtttggtttgatgcacctatcggctacgtgtctattacggcatcctatacacctgagtgggagaagtggtggaagaatcctgataatgtagaattgtttcagtttatgggcaaagataatgtgccgtttcacacgatcatgttcccttcaacgctactcggaactggggaaaagtggacaatgatgaaaacgataagtgttactgaatatttgaattatgaagcaggcaaattttccaagagtaaaggtattggagtctttggtaatgatgcaaaggatacaaatattcctcctgaagtatggcgatactatttgcttatgaatcgccctgaggcatcagatacactctttacttgggctgatttgcaagccaaattgaacagcgagttgctgaacaacttgggaaacttcattaatcgtgtgctaagttttgttgcaaaaccagctggagctggatatggttctgttgtacccgatgcacctaatgcgggcgcgcacacattgacaaaaacacttgcagaaaaaaccagtaaatgggttgaacaatatctcgacgcaatggaaaaggttaaactgaaacaaggactcaagagtgcaatgggcatttctagtgatggaaatgcatatttgcaagagagccagttttggaaactttacaaggaagatcctgcagcatgtgcaatcgtgatgaaaacttcagttggccttgtttacctgcttgcctgtctgctggagcctttcatgccctctttttctgatgaagtgttacgtcaactaaatttatctccagaagaaaatctgtcattaagtgaagaaaagggagaaattgcgaaggcaaaaactccttggaattttgtaccagcaggtcacagaatagggaaacccgcacctctgttcaaggaattgaaagatgaagacgtagctctccatagagaaaaatatgcagggagtcaagctgagagaagctcaaaagcagcagctgatgctgaagccaacaaagttgctaaccagctcaagggcacaaaattatctgatggaggaacaaaaaaggaaccgaagaaacaatctggtggctcaaaatcgaagacagctgaggctgacattacagttgcaaagttggatattagagtggggcttatcagaaaagcagagaagcatccagatgctgattccctttacgtggaggagattgatgttggagaggacgcgccgagaacagtagtcagtggccttgttaaattcatacctcttgaagaaatgcagagccggaaagtctgcgtgctctgcaatctgaaaccggtggcaatgcgtggcataaaatcacatgcaatggttctggctgcatcgaatgaggaccacacgaaggttgagttggtggaacctccagagtctgctgctgtgggggagcgtgttacctttgctgggtacgcgggtgagcccgaggcttccctcagtggcaagagcaagacgtgggagaagctggccgccgagttgcacagcaacggtgagctggtggcgtgctacagagatgtgcccttcactacctcggctggagtctgcagggtgaagacaatagcgaacggagagattcgctagtaccaccacatcaccgaactgcagccagcggagccagtctgtgtctggtttcgctgaaagcgattgttcctgattttcatcttcgaaaattttggtatttccatttgttcaaataccgcaaagcaaccatgatttagaaaaatacagagagtgccctttccgcatcctcttttttatcagttagtacttggctcctgttgtctcactcggaggctccatgcttcttgctctatctgtatttccttagaagtgattctttacctgctcttatttatagttccatatgaaaggaacgaagtgtatcagaacatcactttatatataggagggcctgtctgtcactgccccctgtcaatgcatggaaaggagcaagcaaggaagcttgaaggaactgtaaacagagcttggccaatgggcagcgcccgctagattcacgaacgaacgaccatgattgccgggtagttgcaag

SEQ ID NO: 81535 - DNA, 2002 bp, Zea Mays
aagtggtggaagaatcctgataatgtagaattgtttcagtttatgggcaaagataatgtgccgtttcacacgatcatgttcccttcaacgctactcggaactggggaaaagtggacaatgatgaaaacgataagtgttactgaatatttgaattatgaagcaggcaaattttccaagagtaaaggtattggagtctttggtaatgatgcaaaggatacaaatattcctcctgaagtatggcgatactatttgcttatgaatcgccctgaggcatcagatacactctttacttgggctgatttgcaagccaaattgaacagcgagttgctgaacaacttgggaaacttcattaatcgtgtgctaagttttgttgcaaaaccagctggagctggatatggttctgttgtacccgatgcacctaatgcgggcgcgcacacattgacaaaaacacttgcagaaaaaaccagtaaatgggttgaacaatatctcgacgcaatggaaaaggttaaactgaaacaaggactcaagagtgcaatgggcatttctagtgatggaaatgcatatttgcaagagagccagttttggaaactttacaaggaagatcctgcagcatgtgcaatcgtgatgaaaacttcagttggccttgtttacctgcttgcctgtctgctggagcctttcatgccctctttttctgatgaagtgttacgtcaactaaatttatctccagaagaaaatctgtcattaagtgaagaaaagggagaaattgcgaaggcaaaaactccttggaattttgtaccagcaggtcacagaatagggaaacccgcacctctgttcaaggaattgaaagatgaagacgtagctctccatagagaaaaatatgcagggagtcaagctgagagaagctcaaaagcagcagctgatgctgaagccaacaaagttgctaaccagctcaagggcacaaaattatctgatggaggaacaaaaaaggaaccgaagaaacaatctggtggctcaaaatcgaagacagctgaggctgacattacagttgcaaagttggatattagagtggggcttatcagaaaagcagagaagcatccagatgctgattccctttacgtggaggagattgatgttggagaggacgcgccgagaacagtagtcagtggccttgttaaattcatacctcttgaagaaatgcagagccggaaagtctgcgtgctctgcaatctgaaaccggtggcaatgcgtggcataaaatcacatgcaatggttctggctgcatcgaatgaggaccacacgaaggttgagttggtggaacctccagagtctgctgctgtgggggagcgtgttacctttgctgggtacgcgggtgagcccgaggcttccctcagtggcaagagcaagacgtgggagaagctggccgccgagttgcacagcaacggtgagctggtggcgtgctacagagatgtgcccttcactacctcggctggagtctgcagggtgaagacaatagcgaacggagagattcgctagtaccaccacatcaccgaactgcagccagcggagccagtctgtgtctggtttcgctgaaagcgattgttcctgattttcatcttcgaaaattttggtatttccatttgttcaaataccgcaaagcaaccatgatttagaaaaatacagagagtgccctttccgcatcctcttttttatcagttagtacttggctcctgttgtctcactcggaggctccatgcttcttgctctatctgtatttccttagaagtgattctttacctgctcttatttatagttccatatgaaaggaacgaagtgtatcagaacatcactttatatataggagggcctgtctgtcactgccccctgtcaatgcatggaaaggagcaagcaaggaagcttgaaggaactgtaaacagagcttggccaatgggcagcgcccgctagattcacgaacgaacgaccatgattgccgggtagttgcaag

SEQ ID NO: 81536 - DNA, 1202 bp, Zea Mays
gggcgcgcgcgaggaagaagttaggttagaaggactctccaaaagcgccgcttgagtaaaaaagatctcgccccaaggggtacgacgactacgatcacacaatataagcatctctctgctgctcaaagcaacccaggccggactcccgagggagcttttttagagcaagagaggacggagaggtagagagagaagggggacggaacaagcagctagctagcagggaagatgggtcgcggcaaggtggagctgaagcggatcgagaacaagatcagccggcaggtgacgttcgccaagcgcaggaacgggctgctcaagaaggcgtacgagctgtcgctgctgtgcgacgccgaggtcgcgctcatcatattctccggccgcggccgcctcttcgagttctccagctcctcatgcatgtacaaaacactcgagagataccgcagctccaactacagcacacaggaagtaaaagctccactggagagtgaaattaactaccaggactacttgaagttgaggaccagagttgattttctccagactacacaaagaaacatccttggcgaagatctgggcccactcagcatgaaggagctcgagcagctggagaaccagatagaggtatccctgaagcatatcaggtcaagaaagaatcagatgctactcgaccagctctttgatctcaaaagcaaggaacaagagttgcaggatctcaacaaagacctaaggaaaaagctgcaagaaacaagtccgcagaatgtgatccacgacgtctcctgggaggaaggcgggcacagtgggagtagtgttcttggtccgttccagggactccttcagcaccatggcaatgatccttccctgcagacacggcctacatggaccagctgaacgaggacatggcggaccctgacgagcacggtcggtctggatggatatgagatgctccggtccgatgccccccaaataatgtcgatgcatgcatatagtttcctgcggtatgcggaactatatatgtgttgaaactgcaccaacgattagctgcctgattgtaatggttaccttaagaactccagtgtattgtattgttgtgtgctgtgctgtgttgtcagaagcttgcaactttgtatatgtacatgtatggtattctgttagtttcttggagctgcgcaaaaccgtcttcatttctgggcttcatttctata

SEQ ID NO: 81537 - DNA, 1166 bp, Zea Mays
gggcgcgcgcgaggaagaagttaggttagaaggactctccaaaagcgccgcttgagtaaaaaagatctcgccccaaggggtacgacgactacgatcacacaatataagcatctctctgctgctcaaagcaacccaggccggactcccgagggagcttttttagagcaagagaggacggagaggtagagagagaagggggacggaacaagcagctagctagcagggaagatgggtcgcggcaaggtggagctgaagcggatcgagaacaagatcagccggcaggtgacgttcgccaagcgcaggaacgggctgctcaagaaggcgtacgagctgtcgctgctgtgcgacgccgaggtcgcgctcatcatattctccggccgcggccgcctcttcgagttctccagctcctcatgcatgtacaaaacactcgagagataccgcagctccaactacagcacacaggaagtaaaagctccactggagagtgaaattaactaccaggactacttgaagttgaggaccagagttgattttctccagactacacaaagaaacatccttggcgaagatctgggcccactcagcatgaaggagctcgagcagctggagaaccagatagaggtatccctgaagcatatcaggtcaagaaagatgctactcgaccagctctttgatctcaaaagcaaggaacaagagttgcaggatctcaacaaagacctaaggaaaaagctgcaagaaacaagtccgcagaatgtgatccacgacgtctcctgggaggaaggcgggcacagtgggagtagtgttcttggtccgttccagggactccttcagcaccatggcaatgatccttccctgcagacacggtaccatcagcaggcctacatggaccagctgaacgaggacatggcggaccctgacgagcacggtcggtctggatggatatgagatgctccggtccgatgccccccaaataatgtcgatgcatgcatatagtttcctgcggtatgcggaactatatatgtgttgaaactgcaccaacgattagctgcctgattgtaatggttaccttaagaactccagtgtattgtattgttgtgtgctgtgctgtgttgtcagaagcttgcaactttgtatatgtacatgtatggtattctgttaaaaaaaaa

SEQ ID NO: 81538 - DNA, 2369 bp, Zea Mays
ctccactccacctacgctgcagcagtccaatgcagatcagtccaccgtaataagtttactgtgatgattgatgaatgatgatatctctggcgtcatgcccgctcgcggctcgcacctagcagtgtcgccgcctcgccgtggacgacggatatcgcgggcgcggcacccccgttcccgtcctcgttcgcttgtctgatcagatccccatctggccgttcacgaaggcacgcagccgagctcgcagcgcacgcagggggctgggagaaccggacaagtcagaaggtccacccgcgacgcgaccgcgacccgcaaggcgggcgagcccgccgaggcggaggagggcgcctcgagatctcctccgcgcggctcgcgggtcagaagcagcgaagtcgcatttgaccccactgctagtgctaggttcccactccgcgcgcgccggcccagttaacccccgtccgcggccgcgggttgactcgcaatcggaatcgcaagcgtccggatccgggctcacacctccgaccgacagccaccgcgcagaaaacaaggcggagacccggcgataaatccccgcgccccatccttttccgttccccacaccaccaccgagttcaccggggctggaggaagcgtctacaggacaaggatcagcatcgcttcatgtgactgattggttggttgcgccggcctgcgaggatctagcaccgagttcagggagcacttcgtgagacttgttcattcgtcttgaggtgctggagccgtcacgttgtggtagttgagaggaacctgtccaatttccatagttgcgaggaaagattcctgagatgtctactctctcagacccctcaaaagaagatacttcacctgagggttcaggtactacccagagaaatggagcctggagtaacacattgaacactcttctgcagcaagcctcagtatatggtgtggccgctgggtattgtttatcagcgtccctgctctcgatcatcaataaatgggcaatcatgaaatttccatatcctggagccctgacagctctgcagtacttcactagtgttgctggagttctcctatgtggacagctcaagctcattgagcacgatggacttaacttgaggacaatgtggaagttcttacctgctgctgtgatgttctacatctccatcttcacaaatagtgaactcctgcttcatgccaatgtggatactttcattgtgttccgctctgctgtgcctatatttgtcgcgatcggagagacgctgtatcttcatcagccatggccatcgctcaagacatggctttcactctccacaatacttggtggaagtgtgatctatgttttcacagacaaccaattcactgtgactgcttacacctgggcagtggcctacctagcaagcatgtccattgatttcgtgtacatcaagcacgtcgtaatgaccattgggctgaacacatggggccttgtgctatacaacaatctcgaggctttgatgttattcccccttgagctccttataatgggagaatttgatcagatgaaggtcgacagctccaaggtgtcaaactggctgtcattcgatgtggtcctccctgttgctctttcatgcctgtttggactatcgatatcattctttggattctcctgcagacgggctatttctgctaccgggttcacagtgcttggcatagtgaacaagctcctgactgttgttattaatttgcttatctgggacaagcatgcctcttttgtgggcaccattgggctcttgatatgcatgtcaggtggcgtgctctaccagcaatccaccatgaagccgaaggcgcccaaggttgagccgaaggaagagaacgacaacgacgaggagcagcagaaattgctgcagatgcagggtgttcaagagagcaatccaactcagaaataaagctcttcataaaccttacaacgaagtaatgctttgatggattaccttctttgcaacagcctcacctgaaacgtttttgtattggctaatacttggaaaaaagcatatggatgagtagtcatgaattaggagctacaaaatatcatgtttttgatattagaagtcgtgaggggacctaattatcactatgcaattctttattactgtattaccacttacatttgtaacgcaaaatcgttatgataggataccaggtactcggcaaatacctgcattgaatacttcctatacaaaagcatccgtctcatacagttcgggggtgacagtggtagtatgatctgtttttaggcatttctctgctggagttagcctatatgttctgtaacttattgttggtgatgaagacattggttcttgtgctaaatagagttttcttatcatcgt

SEQ ID NO: 81539 - DNA, 2441 bp, Zea Mays
gtaataagtttactgtgatgattgatgaatgatgatatctctggcgtcatgcccgctcgcggctcgcacctagcagtgtcgccgcctcgccgtggacgacggatatcgcgggcgcggcacccccgttcccgtcctcgttcgcttgtctgatcagatccccatctggccgttcacgaaggcacgcagccgagctcgcagcgcacgcagggggctgggagaaccggacaagtcagaaggtccacccgcgacgcgaccgcgacccgcaaggcgggcgagcccgccgaggcggaggagggcgcctcgagatctcctccgcgcggctcgcgggtcagaagcagcgaagtcgcatttgtaaattcatcatcgtccccgactccccgcctgcaaaaattctgctgtggcctcctgccctcctcgtttgccttccattgcctgaaatcccaattccgagattcccaaattgcaggaccccactgctagtgctaggttcccactccgcgcgcgccggcccagttaacccccgtccgcggccgcgggttgactcgcaatcggaatcgcaagcgtccggatccgggctcacacctccgaccgacagccaccgcgcagaaaacaaggcggagacccggcgataaatccccgcgccccatccttttccgttccccacaccaccaccgagttcaccggggctggaggaagcgtctacaggacaagcaggatcagcatcgcttcatgtgactgattggttggttgcgccggcctgcgaggatctagcaccgagttcagggagcacttcgtgagacttgttcattcgtcttgaggtgctggagccgtcacgttgtggtagttgagaggaacctgtccaatttccatagttgcgaggaaagattcctgagatgtctactctctcagacccctcaaaagaagatacttcacctgagggttcaggtactacccagagaaatggagcctggagtaacacattgaacactcttctgcagcaagcctcagtatatggtgtggccgctgggtattgtttatcagcgtccctgctctcgatcatcaataaatgggcaatcatgaaatttccatatcctggagccctgacagctctgcagtacttcactagtgttgctggagttctcctatgtggacagctcaagctcattgagcacgatggacttaacttgaggacaatgtggaagttcttacctgctgctgtgatgttctacatctccatcttcacaaatagtgaactcctgcttcatgccaatgtggatactttcattgtgttccgctctgctgtgcctatatttgtcgcgatcggagagacgctgtatcttcatcagccatggccatcgctcaagacatggctttcactctccacaatacttggtggaagtgtgatctatgttttcacagacaaccaattcactgtgactgcttacacctgggcagtggcctacctagcaagcatgtccattgatttcgtgtacatcaagcacgtcgtaatgaccattgggctgaacacatggggccttgtgctatacaacaatctcgaggctttgatgttattcccccttgagctccttataatgggagaatttgatcagatgaaggtcgacagctccaaggtgtcaaactggctgtcattcgatgtggtcctccctgttgctctttcatgcctgtttggactatcgatatcattctttggattctcctgcagacgggctatttctgctaccgggttcacagtgcttggcatagtgaacaagctcctgactgttgttattaatttgcttatctgggacaagcatgcctcttttgtgggcaccattgggctcttgatatgcatgtcaggtggcgtgctctaccagcaatccaccatgaagccgaaggcgcccaaggttgagccgaaggaagagaacgacaacgacgaggagcagcagaaattgctgcagatgcagggtgttcaagagagcaatccaactcagaaataaagctcttcataaaccttacaacgaagtaatgctttgatggattaccttctttgcaacagcctcacctgaaacgtttttgtattggctaatacttggaaaaaagcatatggatgagtagtcatgaattaggagctacaaaatatcatgtttttgatattagaagtcgtgaggggacctaattatcactatgcaattctttattactgtattaccacttacatttgtaacgcaaaatcgttatgataggataccaggtactcggcaaatacctgcattgaatacttcctatacaaaagcatccgtctcatacagttcgggggtgacagtggtagtatgatctgtttttaggcatttctctgctggagttagcctatatgttctgtaacttattgttggtgatgaagacattggttcttgtgctaaatagagttttcttatcatcgt

SEQ ID NO: 81540 - DNA, 1855 bp, Zea Mays
tttcgaacccgtttctgcgcccccaaattgcacgaactatgcggaggagtggctgtcattggtcgtgacgggacgccctcacacctaacaattgacattttcttttcttctgtccgtggcggcgttaagatcagcatcgcttcatgtgactgattggttggttgcgccggcctgcgaggatctagcaccgagttcagggagcacttcgtgagacttgttcattcgtcttgaggtgctggagccgtcacgttgtggtagttgagaggaacctgtccaatttccatagttgcgaggaaagattcctgagatgtctactctctcagacccctcaaaagaagatacttcacctgagggttcaggtactacccagagaaatggagcctggagtaacacattgaacactcttctgcagcaagcctcagtatatggtgtggccgctgggtattgtttatcagcgtccctgctctcgatcatcaataaatgggcaatcatgaaatttccatatcctggagccctgacagctctgcagtacttcactagtgttgctggagttctcctatgtggacagctcaagctcattgagcacgatggacttaacttgaggacaatgtggaagttcttacctgctgctgtgatgttctacatctccatcttcacaaatagtgaactcctgcttcatgccaatgtggatactttcattgtgttccgctctgctgtgcctatatttgtcgcgatcggagagacgctgtatcttcatcagccatggccatcgctcaagacatggctttcactctccacaatacttggtggaagtgtgatctatgttttcacagacaaccaattcactgtgactgcttacacctgggcagtggcctacctagcaagcatgtccattgatttcgtgtacatcaagcacgtcgtaatgaccattgggctgaacacatggggccttgtgctatacaacaatctcgaggctttgatgttattcccccttgagctccttataatgggagaatttgatcagatgaaggtcgacagctccaaggtgtcaaactggctgtcattcgatgtggtcctccctgttgctctttcatgcctgtttggactatcgatatcattctttggattctcctgcagacgggctatttctgctaccgggttcacagtgcttggcatagtgaacaagctcctgactgttgttattaatttgcttatctgggacaagcatgcctcttttgtgggcaccattgggctcttgatatgcatgtcaggtggcgtgctctaccagcaatccaccatgaagccgaaggcgcccaaggttgagccgaaggaagagaacgacaacgacgaggagcagcagaaattgctgcagatgcagggtgttcaagagagcaatccaactcagaaataaagctcttcataaaccttacaacgaagtaatgctttgatggattaccttctttgcaacagcctcacctgaaacgtttttgtattggctaatacttggaaaaaagcatatggatgagtagtcatgaattaggagctacaaaatatcatgtttttgatattagaagtcgtgaggggacctaattatcactatgcaattctttattactgtattaccacttacatttgtaacgcaaaatcgttatgataggataccaggtactcggcaaatacctgcattgaatacttcctatacaaaagcatccgtctcatacagttcgggggtgacagtggtagtatgatctgtttttaggcatttctctgctggagttagcctatatgttctgtaacttattgttggtgatgaagacattggttcttgtgctaaatagagttttcttatcatcgt

SEQ ID NO: 81541 - DNA, 1681 bp, Zea Mays
gtcagatttacatagatagaggttttaagacccagtcagtatcaccagatgtcaaaatgtgttacccttgaacgacaaggttggttaaagaattagctggattggcaaacaattgaaatttcatgcatgaaagatgtctactctctcagacccctcaaaagaagatacttcacctgagggttcaggtactacccagagaaatggagcctggagtaacacattgaacactcttctgcagcaagcctcagtatatggtgtggccgctgggtattgtttatcagcgtccctgctctcgatcatcaataaatgggcaatcatgaaatttccatatcctggagccctgacagctctgcagtacttcactagtgttgctggagttctcctatgtggacagctcaagctcattgagcacgatggacttaacttgaggacaatgtggaagttcttacctgctgctgtgatgttctacatctccatcttcacaaatagtgaactcctgcttcatgccaatgtggatactttcattgtgttccgctctgctgtgcctatatttgtcgcgatcggagagacgctgtatcttcatcagccatggccatcgctcaagacatggctttcactctccacaatacttggtggaagtgtgatctatgttttcacagacaaccaattcactgtgactgcttacacctgggcagtggcctacctagcaagcatgtccattgatttcgtgtacatcaagcacgtcgtaatgaccattgggctgaacacatggggccttgtgctatacaacaatctcgaggctttgatgttattcccccttgagctccttataatgggagaatttgatcagatgaaggtcgacagctccaaggtgtcaaactggctgtcattcgatgtggtcctccctgttgctctttcatgcctgtttggactatcgatatcattctttggattctcctgcagacgggctatttctgctaccgggttcacagtgcttggcatagtgaacaagctcctgactgttgttattaatttgcttatctgggacaagcatgcctcttttgtgggcaccattgggctcttgatatgcatgtcaggtggcgtgctctaccagcaatccaccatgaagccgaaggcgcccaaggttgagccgaaggaagagaacgacaacgacgaggagcagcagaaattgctgcagatgcagggtgttcaagagagcaatccaactcagaaataaagctcttcataaaccttacaacgaagtaatgctttgatggattaccttctttgcaacagcctcacctgaaacgtttttgtattggctaatacttggaaaaaagcatatggatgagtagtcatgaattaggagctacaaaatatcatgtttttgatattagaagtcgtgaggggacctaattatcactatgcaattctttattactgtattaccacttacatttgtaacgcaaaatcgttatgataggataccaggtactcggcaaatacctgcattgaatacttcctatacaaaagcatccgtctcatacagttcgggggtgacagtggtagtatgatctgtttttaggcatttctctgctggagttagcctatatgttctgtaacttattgttggtgatgaagacattggttcttgtgctaaatagagttttcttatcatcgt

SEQ ID NO: 81542 - DNA, 1546 bp, Zea Mays
ttttttttgaaacgaaacatacatgaaagtttgcctcctctcacacgacttgacttttttgccgctatatcttttccgcctaattttattatttttttaatcttccgtacgatatattgtatctatctgtgagctgaggcgtgactcctctcttcttccttcctttcttcctcctgctatttagacggttctcaccggagctatcgcctccctatcatctcaatatgttgtagtgagtttgcctctatcccgcccacctcaccgtcgttgtctccgccaccgccactgctcccaccactgccatgcattaacctcaacccttccgcaaactattcactgtcactttgtcatcggcgctccatcgttcactcaaatgtggtctccgatacctggcaccctcatgaggactagttcactccctgctgtcattgaggcttctggcaatgatgactggaagaaacgaaaggaagcacagagcctgaagaggctcgaggttaagaagaagaggattgagaggaggaactctctcgcctgcaacacttcaaaagaagctgctgggcagagtccaaaagagatgaatgcaaacactgacaaattagtaagttctgatgaaactattgtcagcgctaacgaaagtcatagcagtggcaagcatctggtgaaggggcttccaccaaagtaccaggccacaattacatcagaagacagttcgtcagcaatgcgaaagaagccaaactcggccttcaaagccatcactgaggagcagaactcatcatcgtctgttccttcctccggtgaagctataagtagcgtgacggcaccaagtctgcctctgttgtctttggtccccataacagcaacccttggttccagggaagaccaaagcattttaggcagggctggtgcaagggcaaacggcatgggggacgtggaaaggaggatgatgcaggagatgccgggcgtgttcaccaagggcctgtccaacggcagcagggtcgaaggcttcctgtacaaatacagcaaaggagaagtgaggatcgtatgcatctgccatggaagcttccttactccttcggagtttgtggagcacgccggcgccggcaaggtagataacccgctgcgacacattgtcgtcagcgctaccccgaacctgtgactgtgaggccaggcagacccgtgcacaagctatagtgttctgtagactcaggacctgagcctagcgtcagagcaatgtcaccgttagactgtgtggtgcggtgcttatgcccgattaaattggtgggcattgtggtaacataacctgttgataatgttttgacaatgttttgatccttcctatgcgtgatttagttctgcagcttcttcttctttttttcttttgtgttcctatcgtggtttcatacctgggcaagtagatttgtaggttagtgaggggcttgcggtgccactgtcccaatggccttgctctgggtgagctcgaagagaagttttttagactcatttgggcaagttttctacgtccaatatggtactgaagtttttgttg

SEQ ID NO: 81543 - DNA, 1417 bp, Zea Mays
gaggcgtgactcctctcttcttccttcctttcttcctcctgctatttagacggttctcaccggagctatcgcctccctatcatctcaatatgttgtagtgagtttgcctctatcccgcccacctcaccgtcgttgtctccgccaccgccactgctcccaccactgccatgcattaacctcaacccttccgcaaactattcactgtcactttgtcatcggcgctccatcgttcactcaaatgtggtctccgatacctggcaccctcatgaggactagttcactccctgctgtcattgaggcttctggcaatgatgactggaagaaacgaaaggaagcacagagcctgaagaggctcgaggttaagaagaagaggattgagaggaggaactctctcgcctgcaacacttcaaaagaagctgctgggcagagtccaaaagagatgaatgcaaacactgacaaattagtaagttctgatgaaactattgtcagcgctaacgaaagtcatagcagtggcaagcatctggtgaaggggcttccaccaaagtaccaggccacaattacatcagaagacagttcgtcagcaatgcgaaagaagccaaactcggccttcaaaggaacagccatcactgaggagcagaactcatcatcgtctgttccttcctccggtgaagctataagtagcgtgacggcaccaagtctgcctctgttgtctttggtccccataacagcaacccttggttccagggaagaccaaagcattttaggcagggctggtgcaagggcaaacggcatgggggacgtggaaaggaggatgatgcaggagatgccgggcgtgttcaccaagggcctgtccaacggcagcagggtcgaaggcttcctgtacaaatacagcaaaggagaagtgaggatcgtatgcatctgccatggaagcttccttactccttcggagtttgtggagcacgccggcgccggcaaggtagataacccgctgcgacacattgtcgtcagcgctaccccgaacctgtgactgtgaggccaggcagacccgtgcacaagctatagtgttctgtagactcaggacctgagcctagcgtcagagcaatgtcaccgttagactgtgtggtgcggtgcttatgcccgattaaattggtgggcattgtggtaacataacctgttgataatgttttgacaatgttttgatccttcctatgcgtgatttagttctgcagcttcttcttctttttttcttttgtgttcctatcgtggtttcatacctgggcaagtagatttgtaggttagtgaggggcttgcggtgccactgtcccaatggccttgctctgggtgagctcgaagagaagttttttagactcatttgggcaagttttctacgtccaatatggtactgaagtttttgttg

SEQ ID NO: 81544 - DNA, 1770 bp, Zea Mays
cagcacaaaaaggagcacaaagctctctctccctcccccctctctctctctctctcctgttccccgcgagagtcgctcagggccgcgacgaggagaagcggcagcgcgtcacctctccaatggcatccccgtccctcctccgtgcaacctgtgcgcttctcgagtgctgaggctccctgtccctaagacaagcttgcgcgcgcgatggagggtttttcgagggacttgctgtgcgggattggcaagggggacgcgccgccaccggagaagaggccggggcagctgcgggaggagatggaggaggtggagcttagcctcgggctgtctcttggcggccgattcgggctcgacaggaaggggagcaagctcccccggtcgtcgtccgtggcggccatgctgacaacgccggtggaggtgccggcgccgccctccctctcgcgggcgagctcgctgccggtccaggcggaggcgtcggaagttgagaggaagcaggggctggatggatggggttcttgccgtgagggcggcggtctcggcgtgcaacacgcggcgaggctgccggcgagcgggaacccttcctctgcctcttcggtaggtgaaggacagattttgcaaggcaccctcatgaggactagttcactccctgctgtcattgaggcttctggcaatgatgactggaagaaacgaaaggaagcacagagcctgaagaggctcgaggttaagaagaagaggattgagaggaggaactctctcgcctgcaacacttcaaaagaagctgctgggcagagtccaaaagagatgaatgcaaacactgacaaattagtaagttctgatgaaactattgtcagcgctaacgaaagtcatagcagtggcaagcatctggtgaaggggcttccaccaaagtaccaggccacaattacatcagaagacagttcgtcagcaatgcgaaagaagccaaactcggccttcaaagccatcactgaggagcagaactcatcatcgtctgttccttcctccggtgaagctataagtagcgtgacggcaccaagtctgcctctgttgtctttggtccccataacagcaacccttggttccagggaagaccaaagcattttaggcagggctggtgcaagggcaaacggcatgggggacgtggaaaggaggatgatgcaggagatgccgggcgtgttcaccaagggcctgtccaacggcagcagggtcgaaggcttcctgtacaaatacagcaaaggagaagtgaggatcgtatgcatctgccatggaagcttccttactccttcggagtttgtggagcacgccggcgccggcaaggtagataacccgctgcgacacattgtcgtcagcgctaccccgaacctgtgactgtgaggccaggcagacccgtgcacaagctatagtgttctgtagactcaggacctgagcctagcgtcagagcaatgtcaccgttagactgtgtggtgcggtgcttatgcccgattaaattggtgggcattgtggtaacataacctgttgataatgttttgacaatgttttgatccttcctatgcgtgatttagttctgcagcttcttcttctttttttcttttgtgttcctatcgtggtttcatacctgggcaagtagatttgtaggttagtgaggggcttgcggtgccactgtcccaatggccttgctctgggtgagctcgaagagaagttttttagactcatttgggcaagttttctacgtccaatatggtactgaagtttttgttg

SEQ ID NO: 81545 - DNA, 1776 bp, Zea Mays
cagcacaaaaaggagcacaaagctctctctccctcccccctctctctctctctctcctgttccccgcgagagtcgctcagggccgcgacgaggagaagcggcagcgcgtcacctctccaatggcatccccgtccctcctccgtgcaacctgtgcgcttctcgagtgctgaggctccctgtccctaagacaagcttgcgcgcgcgatggagggtttttcgagggacttgctgtgcgggattggcaagggggacgcgccgccaccggagaagaggccggggcagctgcgggaggagatggaggaggtggagcttagcctcgggctgtctcttggcggccgattcgggctcgacaggaaggggagcaagctcccccggtcgtcgtccgtggcggccatgctgacaacgccggtggaggtgccggcgccgccctccctctcgcgggcgagctcgctgccggtccaggcggaggcgtcggaagttgagaggaagcaggggctggatggatggggttcttgccgtgagggcggcggtctcggcgtgcaacacgcggcgaggctgccggcgagcgggaacccttcctctgcctcttcggtaggtgaaggacagattttgcaaggcaccctcatgaggactagttcactccctgctgtcattgaggcttctggcaatgatgactggaagaaacgaaaggaagcacagagcctgaagaggctcgaggttaagaagaagaggattgagaggaggaactctctcgcctgcaacacttcaaaagaagctgctgggcagagtccaaaagagatgaatgcaaacactgacaaattagtaagttctgatgaaactattgtcagcgctaacgaaagtcatagcagtggcaagcatctggtgaaggggcttccaccaaagtaccaggccacaattacatcagaagacagttcgtcagcaatgcgaaagaagccaaactcggccttcaaaggaacagccatcactgaggagcagaactcatcatcgtctgttccttcctccggtgaagctataagtagcgtgacggcaccaagtctgcctctgttgtctttggtccccataacagcaacccttggttccagggaagaccaaagcattttaggcagggctggtgcaagggcaaacggcatgggggacgtggaaaggaggatgatgcaggagatgccgggcgtgttcaccaagggcctgtccaacggcagcagggtcgaaggcttcctgtacaaatacagcaaaggagaagtgaggatcgtatgcatctgccatggaagcttccttactccttcggagtttgtggagcacgccggcgccggcaaggtagataacccgctgcgacacattgtcgtcagcgctaccccgaacctgtgactgtgaggccaggcagacccgtgcacaagctatagtgttctgtagactcaggacctgagcctagcgtcagagcaatgtcaccgttagactgtgtggtgcggtgcttatgcccgattaaattggtgggcattgtggtaacataacctgttgataatgttttgacaatgttttgatccttcctatgcgtgatttagttctgcagcttcttcttctttttttcttttgtgttcctatcgtggtttcatacctgggcaagtagatttgtaggttagtgaggggcttgcggtgccactgtcccaatggccttgctctgggtgagctcgaagagaagttttttagactcatttgggcaagttttctacgtccaatatggtactgaagtttttgttg

SEQ ID NO: 81546 - DNA, 1306 bp, Zea Mays
aaaaaggagcacaaagctctctctccctcccccctctctctctctctctcctgttccccgcgagagtcgctcagggccgcgacgaggagaagcggcagcgcgtcacctctccaatggcatccccgtccctcctccgtgcaacctgtgcaccctcatgaggactagttcactccctgctgtcattgaggcttctggcaatgatgactggaagaaacgaaaggaagcacagagcctgaagaggctcgaggttaagaagaagaggattgagaggaggaactctctcgcctgcaacacttcaaaagaagctgctgggcagagtccaaaagagatgaatgcaaacactgacaaattagtaagttctgatgaaactattgtcagcgctaacgaaagtcatagcagtggcaagcatctggtgaaggggcttccaccaaagtaccaggccacaattacatcagaagacagttcgtcagcaatgcgaaagaagccaaactcggccttcaaaggaacagccatcactgaggagcagaactcatcatcgtctgttccttcctccggtgaagctataagtagcgtgacggcaccaagtctgcctctgttgtctttggtccccataacagcaacccttggttccagggaagaccaaagcattttaggcagggctggtgcaagggcaaacggcatgggggacgtggaaaggaggatgatgcaggagatgccgggcgtgttcaccaagggcctgtccaacggcagcagggtcgaaggcttcctgtacaaatacagcaaaggagaagtgaggatcgtatgcatctgccatggaagcttccttactccttcggagtttgtggagcacgccggcgccggcaaggtagataacccgctgcgacacattgtcgtcagcgctaccccgaacctgtgactgtgaggccaggcagacccgtgcacaagctatagtgttctgtagactcaggacctgagcctagcgtcagagcaatgtcaccgttagactgtgtggtgcggtgcttatgcccgattaaattggtgggcattgtggtaacataacctgttgataatgttttgacaatgttttgatccttcctatgcgtgatttagttctgcagcttcttcttctttttttcttttgtgttcctatcgtggtttcatacctgggcaagtagatttgtaggttagtgaggggcttgcggtgccactgtcccaatggccttgctctgggtgagctcgaagagaagttttttagactcatttgggcaagttttctacgtccaatatggtactgaagtttttgttg

SEQ ID NO: 81547 - DNA, 1296 bp, Zea Mays
aggagcacaaagctctctctccctcccccctctctctctctctctcctgttccccgcgagagtcgctcagggccgcgacgaggagaagcggcagcgcgtcacctctccaatggcatccccgtccctcctccgtgcaacctgtgcaccctcatgaggactagttcactccctgctgtcattgaggcttctggcaatgatgactggaagaaacgaaaggaagcacagagcctgaagaggctcgaggttaagaagaagaggattgagaggaggaactctctcgcctgcaacacttcaaaagaagctgctgggcagagtccaaaagagatgaatgcaaacactgacaaattagtaagttctgatgaaactattgtcagcgctaacgaaagtcatagcagtggcaagcatctggtgaaggggcttccaccaaagtaccaggccacaattacatcagaagacagttcgtcagcaatgcgaaagaagccaaactcggccttcaaagccatcactgaggagcagaactcatcatcgtctgttccttcctccggtgaagctataagtagcgtgacggcaccaagtctgcctctgttgtctttggtccccataacagcaacccttggttccagggaagaccaaagcattttaggcagggctggtgcaagggcaaacggcatgggggacgtggaaaggaggatgatgcaggagatgccgggcgtgttcaccaagggcctgtccaacggcagcagggtcgaaggcttcctgtacaaatacagcaaaggagaagtgaggatcgtatgcatctgccatggaagcttccttactccttcggagtttgtggagcacgccggcgccggcaaggtagataacccgctgcgacacattgtcgtcagcgctaccccgaacctgtgactgtgaggccaggcagacccgtgcacaagctatagtgttctgtagactcaggacctgagcctagcgtcagagcaatgtcaccgttagactgtgtggtgcggtgcttatgcccgattaaattggtgggcattgtggtaacataacctgttgataatgttttgacaatgttttgatccttcctatgcgtgatttagttctgcagcttcttcttctttttttcttttgtgttcctatcgtggtttcatacctgggcaagtagatttgtaggttagtgaggggcttgcggtgccactgtcccaatggccttgctctgggtgagctcgaagagaagttttttagactcatttgggcaagttttctacgtccaatatggtactgaagtttttgttg

SEQ ID NO: 81548 - DNA, 1282 bp, Zea Mays
ctctctctccctcccccctctctctctctctctcctgttccccgcgagagtcgctcagggccgcgacgaggagaagcggcagcgcgtcacctctccaatggcatccccgtccctcctccgtgcaacctgcaccctcatgaggactagttcactccctgctgtcattgaggcttctggcaatgatgactggaagaaacgaaaggaagcacagagcctgaagaggctcgaggttaagaagaagaggattgagaggaggaactctctcgcctgcaacacttcaaaagaagctgctgggcagagtccaaaagagatgaatgcaaacactgacaaattagtaagttctgatgaaactattgtcagcgctaacgaaagtcatagcagtggcaagcatctggtgaaggggcttccaccaaagtaccaggccacaattacatcagaagacagttcgtcagcaatgcgaaagaagccaaactcggccttcaaagccatcactgaggagcagaactcatcatcgtctgttccttcctccggtgaagctataagtagcgtgacggcaccaagtctgcctctgttgtctttggtccccataacagcaacccttggttccagggaagaccaaagcattttaggcagggctggtgcaagggcaaacggcatgggggacgtggaaaggaggatgatgcaggagatgccgggcgtgttcaccaagggcctgtccaacggcagcagggtcgaaggcttcctgtacaaatacagcaaaggagaagtgaggatcgtatgcatctgccatggaagcttccttactccttcggagtttgtggagcacgccggcgccggcaaggtagataacccgctgcgacacattgtcgtcagcgctaccccgaacctgtgactgtgaggccaggcagacccgtgcacaagctatagtgttctgtagactcaggacctgagcctagcgtcagagcaatgtcaccgttagactgtgtggtgcggtgcttatgcccgattaaattggtgggcattgtggtaacataacctgttgataatgttttgacaatgttttgatccttcctatgcgtgatttagttctgcagcttcttcttctttttttcttttgtgttcctatcgtggtttcatacctgggcaagtagatttgtaggttagtgaggggcttgcggtgccactgtcccaatggccttgctctgggtgagctcgaagagaagttttttagactcatttgggcaagttttctacgtccaatatggtactgaagtttttgttg

SEQ ID NO: 81549 - DNA, 1717 bp, Zea Mays
ctccctcccccctctctctctctctctcctgttccccgcgagagtcgctcagggccgcgacgaggagaagcggcagcgcgtcacctctccaatggcatccccgtccctcctccgtgcaacctgtgcgcttctcgagtgctgaggctccctgtccctaagacaagcttgcgcgcgcgatggagggtttttcgagggacttgctgtgcgggattggcaagggggacgcgccgccaccggagaagaggccggggcagctgcgggaggagatggaggaggtggagcttagcctcgggctgtctcttggcggccgattcgggctcgacaggaaggggagcaagctcccccggtcgtcgtccgtggcggccatgctgacaacgccggtggaggtgccggcgccgccctccctctcgcgggcgagctcgctgccggtccaggcggaggcgtcggaagttgagaggaagcaggggctggatggatggggttcttgccgtgagggcggcggtctcggcgtgcaacacgcggcgaggctgccggcgagcgggaacccttcctctgcctcttcggcaccctcatgaggactagttcactccctgctgtcattgaggcttctggcaatgatgactggaagaaacgaaaggaagcacagagcctgaagaggctcgaggttaagaagaagaggattgagaggaggaactctctcgcctgcaacacttcaaaagaagctgctgggcagagtccaaaagagatgaatgcaaacactgacaaattagtaagttctgatgaaactattgtcagcgctaacgaaagtcatagcagtggcaagcatctggtgaaggggcttccaccaaagtaccaggccacaattacatcagaagacagttcgtcagcaatgcgaaagaagccaaactcggccttcaaagccatcactgaggagcagaactcatcatcgtctgttccttcctccggtgaagctataagtagcgtgacggcaccaagtctgcctctgttgtctttggtccccataacagcaacccttggttccagggaagaccaaagcattttaggcagggctggtgcaagggcaaacggcatgggggacgtggaaaggaggatgatgcaggagatgccgggcgtgttcaccaagggcctgtccaacggcagcagggtcgaaggcttcctgtacaaatacagcaaaggagaagtgaggatcgtatgcatctgccatggaagcttccttactccttcggagtttgtggagcacgccggcgccggcaaggtagataacccgctgcgacacattgtcgtcagcgctaccccgaacctgtgactgtgaggccaggcagacccgtgcacaagctatagtgttctgtagactcaggacctgagcctagcgtcagagcaatgtcaccgttagactgtgtggtgcggtgcttatgcccgattaaattggtgggcattgtggtaacataacctgttgataatgttttgacaatgttttgatccttcctatgcgtgatttagttctgcagcttcttcttctttttttcttttgtgttcctatcgtggtttcatacctgggcaagtagatttgtaggttagtgaggggcttgcggtgccactgtcccaatggccttgctctgggtgagctcgaagagaagttttttagactcatttgggcaagttttctacgtccaatatggtactgaagtttttgttg

SEQ ID NO: 81550 - DNA, 1524 bp, Zea Mays
ctcgacctcctcccccatgaccacgaccatgcgccgtttcaacctcggcacttctgcagaaccgtccacgccccgcatgcccgcatcctccacctcttcccgtccaactccgttcccacctggcctagaactgcagacggccaagactggcgatgcttctcagatccatgctcatcaccgctcgctcacctacctcccagtacctcctccttccgtaataacctggcgtgcagcgtggtgctcctcggcaccgccgccacctaccccaacagcgggcgctctgacaacggcgaccgtggcggtgcaggtgtaggggctggggagtttgtgccctgccggatccagttgatcgcagaggtttccctcgctaagctcttcgcagacttcgccagcccagtcgacacgtctgcgctgatgcagcagaactcgcctcccaccttgtccaagtcgcccgtgccggagagggagaccatcccgccgcaagagacgctaggcggcggcgacgacaacatagatcccgtcgatccacgtgagagtgttacaggctccgaggaacccggcttgccagaagctgccgttatgaggaaggacatggcggcggtttccaacaaggatggcttgcccaccaggaaggatgacgacgaggatgcaacgtccgagcccaccaccaagccatgtgactggcataacaaatcaataacttgagatacatttcacaagcttagtcccataggttgtaacagataatgtgctaatgtccagcatgatgagtttctatgagcactagctgtgctgagttcatgtatgaggggcaccctcctcgagatcggcatgtcctactctagggcctccagtgtgcagctccttggaaaggaggaatccaatgggaagcggtgcagatcgaccaagcgcggtggcacgaaggacaacccgagaatggtggaaagaagcaggggaaggacaacgcaacgaagcccccctagctgcccaaggactacatccatgtctgggcaaggcgtggcgagcaaggcatggcgaggcgatggactgtcacaacctcgtggagaggaccttgcaatggcgaatcaagggatagttacacatcgaggcttttcgaaatgctactcttctggctccctcctggctaagcagttgaagaatgtgaatgaacacaaatgtcaaatctatggtgacactgtcgggttcttagcaacaggcgatatttttgttgcgtgcaacgaatgtgccttccctgtgtgtcggtcacgctatgagtatgagcgcaaagaggggaatcaatgttgtcctcaatgcaaaactagatacaagaggcacaaaggaagccctcaagttcggggagatgaggaggatggagttgatttggacaatgaattaaactatacagtatacacaaggcaatgtccaagggcctgtgttgcagctgtggggataaggggagatgttgacatctcttcgtattctcgacatgaaccccatcactaaattccacgtctaacaactgga

SEQ ID NO: 81551 - DNA, 4375 bp, Zea Mays
ctcgacctcctcccccatgaccacgaccatgcgccgtttcaacctcggcacttctgcagaaccgtccacgccccgcatgcccgcatcctccacctcttcccgtccaactccgttcccacctggcctagaactgcagacggccaagactggcgatgcttctcagatccatgctcatcaccgctcgctcacctacctcccagtacctcctccttccgtaataacctggcgtgcagcgtggtgctcctcggcaccgccgccacctaccccaacagcgggcgctctgacaacggcgaccgtggcggtgcaggtgtaggggctggggagtttgtgccctgccggatccagttgatcgcagaggtttccctcgctaagctcttcgcagacttcgccagcccagtcgacacgtctgcgctgatgcagcagaactcgcctcccaccttgtccaagtcgcccgtgccggagagggagaccatcccgccgcaagagacgctaggcggcggcgacgacaacatagatcccgtcgatccacgtgagagtgttacaggctccgaggaacccggcttgccagaagctgccgttatgaggaaggacatggcggcggtttccaacaaggatggcttgcccaccaggaaggatgacgacgaggatgcaacgtccgagcccaccaccaagccatgtgactggcataacaaatcaataacttgagatacatttcacaagcttagtcccataggttgtaacagataatgtgctaatgtccagcatgatgagtttctatgagcactagctgtgctgagttcatgtatgaggggcaccctcctcgagatcggcatgtcctactctagggcctccagtgtgcagctccttggaaaggaggaatccaatgggaagcggtgcagatcgaccaagcgcggtggcacgaaggacaacccgagaatggtggaaagaagcaggggaaggacaacgcaacgaagcccccctagctgcccaaggactacatccatgtctgggcaaggcgtggcgagcaaggcatggcgaggcgatggactgtcacaacctcgtggagaggaccttgcaatggcgaatcaagggatagttacacatcgaggcttttcgaaatgctactcttctggctccctcctggctaagcagttgaagaatgtgaatgaacacaaatgtcaaatctatggtgacactgtcgggttcttagcaacaggcgatatttttgttgcgtgcaacgaatgtgccttccctgtgtgtcggtcacgctatgagtatgagcgcaaagaggggaatcaatgttgtcctcaatgcaaaactagatacaagaggcacaaagcactggttgcactgtacctttaccctttcttgaacactgtctacaaaacaagagagtatgagttcttgaggcttaccagcctgggtgtgatcgatgctcttgtgaaggtaagaaatttaagacaactaagaagggctatagatttctattggagtgtcgggaggtgtgtaggttatcaatttggaattttggatacatattccagtcttgctgattaaataatctaactgagattttaaatcctgtgcatccctatgtaaacatcaatagctgtttgaagatgtgacagtgatgtattttgatgaaggcttgaaattcatttgtttttcttttatagcagatatatttttaaaaataaagctcaacctttttcctgggaatatatatagttcgatgatcatgaagtcagttgtgtttctgctgagttatgaaatgattcctttgtgtctgtgtgctattaatatgagcaatgagctttcgaaatggtatttaccaacctactcgaccattaatgaaaacacaattaatcttttatgttttctctatgccgactactcaattagtgcgctcctttcttgttctattctccatatatcgtgattgctatttgagatatcaagctatttcagtgatcagaactggagatgatcaagtggtgagctattaacttgctctaatgtcatgattggagttagttattctcctatgattcctaagtcttaagcctctaatgatcctatctttatccttgtgcatcatattctgagcagcaatatactaaacaataggtgccattgtttctctttgaaaatctttatcctaatttatatgcttgagcttgggtcaggaattatagtggtcagtttagatatctatggatttttgacatctcccttcgtttttatttagatatcatatttgtcttagtgcacagacaaggatgagattaacgctgagttaatacttgttttttctgctccgtgcaattgatgctgcatcatactcagtactcacgctcgcatgctcacctgcatgcagatttaatttttcgtggaaggaacagagggagtattagtcaataaacagcaaatttatagacatttatattttcttggctcctggactagagttttaatgttgcatttagtttatggggtacctgctttttctctaactttaacctgattgtatgctaccttcctgaggtgtaagatattcacttaccatactgttgttttgcagccggttgttaggaagtgcaccgaaatgttgagtcgagcaatttgcatatctggcggcgatttttatgtacgcaggtttcataaggatggacctattgtttggaggttgttggctttatctccattccgacgtctgtcaaagatggatgaaaaagcaatcattttaccatatagggatacctcacttaactcagaggaacctatggctgagatctctagccaaaagattcagattgcagtcctggacatgatcgctgcaatatcttcgaacaagagaaatgttgttgcactagaaagcgtactaaagaagatgtgtactactcactaaaccaaagggaatctttacttcccgaccaagatctagccctggtatcagatcttttgccccctcaagtgtcttcgagagaatacctctttgtacagtatggaggtgagggtgtcaggtgtgatgtagacccctcatctgtttattatgtgttcagaaggatgcagggtgtgtgatcttgtgcgacctgaaaatcaggtagaatccacagctttccatctatattgacatgtttctctttcacatttcattacttaagaattctacttttttcaggttcctaatactgtgtatttgtaatcttgctgagtttttttggtcatgctagcaccctgtgtcacacattgaatataatatcacctgctacaaagaatggtaaactttttcatacgtgttctcgcactgaaaatcatcaaggttggtcacatgtctgaagaatgattatgacaagtctttaccactttgaccataattatattaaggtagaagtagtgtgctttcttcattccgcatatccactattaaccttatagatatctgtacattgtcgttgtaccatatgttttggtgaatctcgtctaacctcgagtacccttgaaatttttccagcaaacatcaggactcatgatgacaatgaaggatgtgatgagtttgtgtctgttaaccatataaggttgcacgttaagcatgcccctgacttgccggacgagcagcaagactttgggacctagattggctaaggcactaagaatagaatagcttttcaagaaaagagagacaacaactaacactgtactatgtaggggtgaaatagctagattaagataataaaatttatatatagctaggatcataaatggattacgaaacatttttatcttaacaatataacacatgtttatatataagttattatagtattatatatttccgttgcaacgcacgggcactcacctagtaagcaaagaattcaggggtgtgatcatttttggccgtggggacactccgaagcagcatgtggacctgctgcaccagcagctgcttcctcactcaggtatttcattccgtccacaacagtacagcacagtgcatcgatcttgaaatcaaaatccaacagcgacacaaaccgaatataatcgacaccaccgctcgctcacgacgccagggtggtgctggggcagttgtcgacgccgcaggccagaacgtcgcggtagtcgcgggagatggtgaagtggtcgtgcacgctgccatcccggctcttcttgtactccaacagcagcctcgtgtggttgaacgccgtcagcttcacgaacccaaagtcgcggtcccgcacgtggctccatcgcgcccgcgcggccgtgtagtcggcgaggctggcgccgccgccgcccaccacgacgtgcgtcgtcgccgtgaaggcgccggcgtagaggtcggaccccttggccacgcacgcgttctgcgttccac

SEQ ID NO: 81552 - DNA, 3366 bp, Zea Mays
ctcgacctcctcccccatgaccacgaccatgcgccgtttcaacctcggcacttctgcagaaccgtccacgccccgcatgcccgcatcctccacctcttcccgtccaactccgttcccacctggcctagaactgcagacggccaagactggcgatgcttctcagatccatgctcatcaccgctcgctcacctacctcccagtacctcctccttccgtaataacctggcgtgcagcgtggtgctcctcggcaccgccgccacctaccccaacagcgggcgctctgacaacggcgaccgtggcggtgcaggtgtaggggctggggagtttgtgccctgccggatccagttgatcgcagaggtttccctcgctaagctcttcgcagacttcgccagcccagtcgacacgtctgcgctgatgcagcagaactcgcctcccaccttgtccaagtcgcccgtgccggagagggagaccatcccgccgcaagagacgctaggcggcggcgacgacaacatagatcccgtcgatccacgtgagagtgttacaggctccgaggaacccggcttgccagaagctgccgttatgaggaaggacatggcggcggtttccaacaaggatggcttgcccaccaggaaggatgacgacgaggatgcaacgtccgagcccaccaccaagccatgtgactggcataacaaatcaataacttgagatacatttcacaagcttagtcccataggttgtaacagataatgtgctaatgtccagcatgatgagtttctatgagcactagctgtgctgagttcatgtatgaggggcaccctcctcgagatcggcatgtcctactctagggcctccagtgtgcagctccttggaaaggaggaatccaatgggaagcggtgcagatcgaccaagcgcggtggcacgaaggacaacccgagaatggtggaaagaagcaggggaaggacaacgcaacgaagcccccctagctgcccaaggactacatccatgtctgggcaaggcgtggcgagcaaggcatggcgaggcgatggactgtcacaacctcgtggagaggggagaagattagctagcagatgaagccgctgcaggatctcgtgccgagttgcaacaaggtttgaattcagagtaaaatgtttctcattttgggtggtgggcaaggcagtgatgctcgatgaaatcataaactatgtgtagaccttgcaatggcgaatcaagggatagttacacatcgaggcttttcgaaatgctactcttctggctccctcctggctaagcagttgaagaatgtgaatgaacacaaatgtcaaatctatggtgacactgtcgggttcttagcaacaggcgatatttttgttgcgtgcaacgaatgtgccttccctgtgtgtcggtcacgctatgagtatgagcgcaaagaggggaatcaatgttgtcctcaatgcaaaactagatacaagaggcacaaaggaagccctcaagttcggggagatgaggaggatggagttgatttggacaatgaattaaactatacagtatacacaaggcaatgtccaagggcctgtgttgcagctgtggggataaggggagatgttgacatctcttcgtattctcgacatgaaccccatcactaaattccacgtctaacaactggacaacagcactggttgcactgtacctttaccctttcttgaacactgtctacaaaacaagagagtatgagttcttgaggcttaccagcctgggtgtgatcgatgctcttgtgaagccggttgttaggaagtgcaccgaaatgttgagtcgagcaatttgcatatctggcggcgatttttatgtacgcaggtttcataaggatggacctattgtttggaggttgttggctttatctccattccgacgtctgtcaaagatggatgaaaaagcaatcattttaccatatagggatacctcacttaactcagaggaacctatggctgagatctctagccaaaagattcagattgcagtcctggacatgatcgctgcaatatcttcgaacaagagaaatgttgttgcactagaaagcgtactaaagaagatgtgtactactcactaaaccaaagggaatctttacttcccgaccaagatctagccctggtatcagatcttttgccccctcaagtgtcttcgagagaatacctctttgtacagtatggaggtgagggtgtcaggtgtgatgtagacccctcatctgtttattatgtgttcagaaggatgcagggtgtgtgatcttgtgcgacctgaaaatcaggttcctaatactgtgtatttgtaatcttgctgagtttttttggtcatgctagcaccctgtgtcacacattgaatataatatcacctgctacaaagaatggtaaactttttcatacgtgttctcgcactgaaaatcatcaaggttggtcacatgtctgaagaatgattatgacaagtctttaccactttgaccataattatattaagcaaacatcaggactcatgatgacaatgaaggatgtgatgagtttgtgtctgttaaccatataaggttgcacgttaagcatgcccctgacttgccggacgagcagcaagactttgggacctagattggctaaggcactaagaatagaatagcttttcaagaaaagagagacaacaactaacactgtactatgtaggggtgaaatagctagattaagataataaaatttatatatagctaggatcataaatggattacgaaacatttttatcttaacaatataacacatgtttatatataagttattatagtattatatatttccgttgcaacgcacgggcactcacctagtaagcaaagaattcaggggtgtgatcatttttggccgtggggacactccgaagcagcatgtggacctgctgcaccagcagctgcttcctcactcaggtatttcattccgtccacaacagtacagcacagtgcatcgatcttgaaatcaaaatccaacagcgacacaaaccgaatataatcgacaccaccgctcgctcacgacgccagggtggtgctggggcagttgtcgacgccgcaggccagaacgtcgcggtagtcgcgggagatggtgaagtggtcgtgcacgctgccatcccggctcttcttgtactccaacagcagcctcgtgtggttgaacgccgtcagcttcacgaacccaaagtcgcggtcccgcacgtggctccatcgcgcccgcgcggccgtgtagtcggcgaggctggcgccgccgccgcccaccacgacgtgcgtcgtcgccgtgaaggcgccggcgtagaggtcggaccccttggccacgcacgcgttctgcgttccac

SEQ ID NO: 81553 - DNA, 4334 bp, Zea Mays
ctcgacctcctcccccatgaccacgaccatgcgccgtttcaacctcggcacttctgcagaaccgtccacgccccgcatgcccgcatcctccacctcttcccgtccaactccgttcccacctggcctagaactgcagacggccaagactggcgatgcttctcagatccatgctcatcaccgctcgctcacctacctcccagtacctcctccttccgtaataacctggcgtgcagcgtggtgctcctcggcaccgccgccacctaccccaacagcgggcgctctgacaacggcgaccgtggcggtgcaggtgtaggggctggggagtttgtgccctgccggatccagttgatcgcagaggtttccctcgctaagctcttcgcagacttcgccagcccagtcgacacgtctgcgctgatgcagcagaactcgcctcccaccttgtccaagtcgcccgtgccggagagggagaccatcccgccgcaagagacgctaggcggcggcgacgacaacatagatcccgtcgatccacgtgagagtgttacaggctccgaggaacccggcttgccagaagctgccgttatgaggaaggacatggcggcggtttccaacaaggatggcttgcccaccaggaaggatgacgacgaggatgcaacgtccgagcccaccaccaagccatgtgactggcataacaaatcaataacttgagatacatttcacaagcttagtcccataggttgtaacagataatgtgctaatgtccagcatgatgagtttctatgagcactagctgtgctgagttcatgtatgaggggcaccctcctcgagatcggcatgtcctactctagggcctccagtgtgcagctccttggaaaggaggaatccaatgggaagcggtgcagatcgaccaagcgcggtggcacgaaggacaacccgagaatggtggaaagaagcaggggaaggacaacgcaacgaagcccccctagctgcccaaggactacatccatgtctgggcaaggcgtggcgagcaaggcatggcgaggcgatggactgtcacaacctcgtggagaggggagaagattagctagcagatgaagccgctgcaggatctcgtgccgagttgcaacaagaccttgcaatggcgaatcaagggatagttacacatcgaggcttttcgaaatgctactcttctggctccctcctggctaagcagttgaagaatgtgaatgaacacaaatgtcaaatctatggtgacactgtcgggttcttagcaacaggcgatatttttgttgcgtgcaacgaatgtgccttccctgtgtgtcggtcacgctatgagtatgagcgcaaagaggggaatcaatgttgtcctcaatgcaaaactagatacaagaggcacaaaggaagccctcaagttcggggagatgaggaggatggagttgatttggacaatgaattaaactatacagtatacacaaggcaatgtccaagggcctgtgttgcagctgtggggataaggggagatgttgacatctcttcgtattctcgacatgaaccccatcactaaattccacgtctaacaactggacaacagcactggttgcactgtacctttaccctttcttgaacactgtctacaaaacaagagagtatgagttcttgaggcttaccagcctgggtgtgatcgatgctcttgtgaaggtaagaaatttaagacaactaagaagggctatagatttctattggagtgtcgggaggtgtgtaggttatcaatttggaattttggatacatattccagtcttgctgattaaataatctaactgagattttaaatcctgtgcatccctatgtaaacatcaatagctgtttgaagatgtgacagtgatgtattttgatgaaggcttgaaattcatttgtttttcttttatagcagatatatttttaaaaataaagctcaacctttttcctgggaatatatatagttcgatgatcatgaagtcagttgtgtttctgctgagttatgaaatgattcctttgtgtctgtgtgctattaatatgagcaatgagctttcgaaatggtatttaccaacctactcgaccattaatgaaaacacaattaatcttttatgttttctctatgccgactactcaattagtgcgctcctttcttgttctattctccatatatcgtgattgctatttgagatatcaagctatttcagtgatcagaactggagatgatcaagtggtgagctattaacttgctctaatgtcatgattggagttagttattctcctatgattcctaagtcttaagcctctaatgatcctatctttatccttgtgcatcatattctgagcagcaatatactaaacaataggtgccattgtttctctttgaaaatctttatcctaatttatatgcttgagcttgggtcaggaattatagtggtcagtttagatatctatggatttttgacatctcccttcgtttttatttagatatcatatttgtcttagtgcacagacaaggatgagattaacgctgagttaatacttgttttttctgctccgtgcaattgatgctgcatcatactcagtactcacgctcgcatgctcacctgcatgcagatttaatttttcgtggaaggaacagagggagtattagtcaataaacagcaaatttatagacatttatattttcttggctcctggactagagttttaatgttgcatttagtttatggggtacctgctttttctctaactttaacctgattgtatgctaccttcctgaggtgtaagatattcacttaccatactgttgttttgcagccggttgttaggaagtgcaccgaaatgttgagtcgagcaatttgcatatctggcggcgatttttatgtacgcaggtttcataaggatggacctattgtttggaggttgttggctttatctccattccgacgtctgtcaaagatggatgaaaaagcaatcattttaccatatagggatacctcacttaactcagaggaacctatggctgagatctctagccaaaagattcagattgcagtcctggacatgatcgctgcaatatcttcgaacaagagaaatgttgttgcactagaaagcgtactaaagaaggtctgtggccttgtggtaggcattgcctacagtagtttgacaggtttgcaggaagctactataagggcattggcaggccttgcctgcatggatgctgatcttgtctggcttctccttgcagatgtgtactactcactaaaccaaagggaatctttacttcccgaccaagatctagccctggtatcagatcttttgccccctcaagtgtcttcgagagaatacctctttgtacagtatggaggtgagggtgtcaggtgtgatgtagacccctcatctgtttattatgtgttcagaaggatgcagggtgtgtgatcttgtgcgacctgaaaatcagcaaacatcaggactcatgatgacaatgaaggatgtgatgagtttgtgtctgttaaccatataaggttgcacgttaagcatgcccctgacttgccggacgagcagcaagactttgggacctagattggctaaggcactaagaatagaatagcttttcaagaaaagagagacaacaactaacactgtactatgtaggggtgaaatagctagattaagataataaaatttatatatagctaggatcataaatggattacgaaacatttttatcttaacaatataacacatgtttatatataagttattatagtattatatatttccgttgcaacgcacgggcactcacctagtaagcaaagaattcaggggtgtgatcatttttggccgtggggacactccgaagcagcatgtggacctgctgcaccagcagctgcttcctcactcaggtatttcattccgtccacaacagtacagcacagtgcatcgatcttgaaatcaaaatccaacagcgacacaaaccgaatataatcgacaccaccgctcgctcacgacgccagggtggtgctggggcagttgtcgacgccgcaggccagaacgtcgcggtagtcgcgggagatggtgaagtggtcgtgcacgctgccatcccggctcttcttgtactccaacagcagcctcgtgtggttgaacgccgtcagcttcacgaacccaaagtcgcggtcccgcacgtggctccatcgcgcccgcgcggccgtgtagtcggcgaggctggcgccgccgccgcccaccacgacgtgcgtcgtcgccgtgaaggcgccggcgtagaggtcggaccccttggccacgcacgcgttctgcgttccac

SEQ ID NO: 81554 - DNA, 3076 bp, Zea Mays
ctcgacctcctcccccatgaccacgaccatgcgccgtttcaacctcggcacttctgcagaaccgtccacgccccgcatgcccgcatcctccacctcttcccgtccaactccgttcccacctggcctagaactgcagacggccaagactggcgatgcttctcagatccatgctcatcaccgctcgctcacctacctcccagtacctcctccttccgtaataacctggcgtgcagcgtggtgctcctcggcaccgccgccacctaccccaacagcgggcgctctgacaacggcgaccgtggcggtgcaggtgtaggggctggggagtttgtgccctgccggatccagttgatcgcagaggtttccctcgctaagctcttcgcagacttcgccagcccagtcgacacgtctgcgctgatgcagcagaactcgcctcccaccttgtccaagtcgcccgtgccggagagggagaccatcccgccgcaagagacgctaggcggcggcgacgacaacatagatcccgtcgatccacgtgagagtgttacaggctccgaggaacccggcttgccagaagctgccgttatgaggaaggacatggcggcggtttccaacaaggatggcttgcccaccaggaaggatgacgacgaggatgcaacgtccgagcccaccaccaagccatcatgatgagtttctatgagcactagctgtgctgagttcatgtatgaggggcaccctcctcgagatcggcatgtcctactctagggcctccagtgtgcagctccttggaaaggaggaatccaatgggaagcggtgcagatcgaccaagcgcggtggcacgaaggacaacccgagaatggtggaaagaagcaggggaaggacaacgcaacgaagcccccctagctgcccaaggactacatccatgtctgggcaaggcgtggcgagcaaggcatggcgaggcgatggactgtcacaacctcgtggagaggaccttgcaatggcgaatcaagggatagttacacatcgaggcttttcgaaatgctactcttctggctccctcctggctaagcagttgaagaatgtgaatgaacacaaatgtcaaatctatggtgacactgtcgggttcttagcaacaggcgatatttttgttgcgtgcaacgaatgtgccttccctgtgtgtcggtcacgctatgagtatgagcgcaaagaggggaatcaatgttgtcctcaatgcaaaactagatacaagaggcacaaagcactggttgcactgtacctttaccctttcttgaacactgtctacaaaacaagagagtatgagttcttgaggcttaccagcctgggtgtgatcgatgctcttgtgaagccggttgttaggaagtgcaccgaaatgttgagtcgagcaatttgcatatctggcggcgatttttatgtacgcaggtttcataaggatggacctattgtttggaggttgttggctttatctccattccgacgtctgtcaaagatggatgaaaaagcaatcattttaccatatagggatacctcacttaactcagaggaacctatggctgagatctctagccaaaagattcagattgcagtcctggacatgatcgctgcaatatcttcgaacaagagaaatgttgttgcactagaaagcgtactaaagaagatgtgtactactcactaaaccaaagggaatctttacttcccgaccaagatctagccctggtatcagatcttttgccccctcaagtgtcttcgagagaatacctctttgtacagtatggaggtgagggtgtcaggtgtgatgtagacccctcatctgtttattatgtgttcagaaggatgcagggtgtgtgatcttgtgcgacctgaaaatcaggttcctaatactgtgtatttgtaatcttgctgagtttttttggtcatgctagcaccctgtgtcacacattgaatataatatcacctgctacaaagaatggtaaactttttcatacgtgttctcgcactgaaaatcatcaaggttggtcacatgtctgaagaatgattatgacaagtctttaccactttgaccataattatattaaggtagaagtagtgtgctttcttcattccgcatatccactattaaccttatagatatctgtacattgtcgttgtaccatatgttttggtgaatctcgtctaacctcgagtacccttgaaatttttccagcaaacatcaggactcatgatgacaatgaaggatgtgatgagtttgtgtctgttaaccatataaggttgcacgttaagcatgcccctgacttgccggacgagcagcaagactttgggacctagattggctaaggcactaagaatagaatagcttttcaagaaaagagagacaacaactaacactgtactatgtaggggtgaaatagctagattaagataataaaatttatatatagctaggatcataaatggattacgaaacatttttatcttaacaatataacacatgtttatatataagttattatagtattatatatttccgttgcaacgcacgggcactcacctagtaagcaaagaattcaggggtgtgatcatttttggccgtggggacactccgaagcagcatgtggacctgctgcaccagcagctgcttcctcactcaggtatttcattccgtccacaacagtacagcacagtgcatcgatcttgaaatcaaaatccaacagcgacacaaaccgaatataatcgacaccaccgctcgctcacgacgccagggtggtgctggggcagttgtcgacgccgcaggccagaacgtcgcggtagtcgcgggagatggtgaagtggtcgtgcacgctgccatcccggctcttcttgtactccaacagcagcctcgtgtggttgaacgccgtcagcttcacgaacccaaagtcgcggtcccgcacgtggctccatcgcgcccgcgcggccgtgtagtcggcgaggctggcgccgccgccgcccaccacgacgtgcgtcgtcgccgtgaaggcgccggcgtagaggtcggaccccttggccacgcacgcgttctgcgttccac

SEQ ID NO: 81555 - DNA, 3160 bp, Zea Mays
ctcgacctcctcccccatgaccacgaccatgcgccgtttcaacctcggcacttctgcagaaccgtccacgccccgcatgcccgcatcctccacctcttcccgtccaactccgttcccacctggcctagaactgcagacggccaagactggcgatgcttctcagatccatgctcatcaccgctcgctcacctacctcccagtacctcctccttccgtaataacctggcgtgcagcgtggtgctcctcggcaccgccgccacctaccccaacagcgggcgctctgacaacggcgaccgtggcggtgcaggtgtaggggctggggagtttgtgccctgccggatccagttgatcgcagaggtttccctcgctaagctcttcgcagacttcgccagcccagtcgacacgtctgcgctgatgcagcagaactcgcctcccaccttgtccaagtcgcccgtgccggagagggagaccatcccgccgcaagagacgctaggcggcggcgacgacaacatagatcccgtcgatccacgtgagagtgttacaggctccgaggaacccggcttgccagaagctgccgttatgaggaaggacatggcggcggtttccaacaaggatggcttgcccaccaggaaggatgacgacgaggatgcaacgtccgagcccaccaccaagccatgtgactggcataacaaatcaataacttgagatacatttcacaagcttagtcccataggttgtaacagataatgtgctaatgtccagcatgatgagtttctatgagcactagctgtgctgagttcatgtatgaggggcaccctcctcgagatcggcatgtcctactctagggcctccagtgtgcagctccttggaaaggaggaatccaatgggaagcggtgcagatcgaccaagcgcggtggcacgaaggacaacccgagaatggtggaaagaagcaggggaaggacaacgcaacgaagcccccctagctgcccaaggactacatccatgtctgggcaaggcgtggcgagcaaggcatggcgaggcgatggactgtcacaacctcgtggagaggggagaagattagctagcagatgaagccgctgcaggatctcgtgccgagttgcaacaaggtttgaattcagagtaaaatgtttctcattttgggtggtgggcaaggcagtgatgctcgatgaaatcataaactatgtgtagaccttgcaatggcgaatcaagggatagttacacatcgaggcttttcgaaatgctactcttctggctccctcctggctaagcagttgaagaatgtgaatgaacacaaatgtcaaatctatggtgacactgtcgggttcttagcaacaggcgatatttttgttgcgtgcaacgaatgtgccttccctgtgtgtcggtcacgctatgagtatgagcgcaaagaggggaatcaatgttgtcctcaatgcaaaactagatacaagaggcacaaaggaagccctcaagttcggggagatgaggaggatggagttgatttggacaatgaattaaactatacagtatacacaaggcaatgtccaagggcctgtgttgcagctgtggggataaggggagatgttgacatctcttcgtattctcgacatgaaccccatcactaaattccacgtctaacaactggacaacagcactggttgcactgtacctttaccctttcttgaacactgtctacaaaacaagagagtatgagttcttgaggcttaccagcctgggtgtgatcgatgctcttgtgaagccggttgttaggaagtgcaccgaaatgttgagtcgagcaatttgcatatctggcggcgatttttatgtacgcaggtttcataaggatggacctattgtttggaggttgttggctttatctccattccgacgtctgtcaaagatggatgaaaaagcaatcattttaccatatagggatacctcacttaactcagaggaacctatggctgagatctctagccaaaagattcagattgcagtcctggacatgatcgctgcaatatcttcgaacaagagaaatgttgttgcactagaaagcgtactaaagaagatgtgtactactcactaaaccaaagggaatctttacttcccgaccaagatctagccctggtatcagatcttttgccccctcaagtgtcttcgagagaatacctctttgtacagtatggaggtgagggtgtcaggtgtgatgtagacccctcatctgtttattatgtgttcagaaggatgcagggtgtgtgatcttgtgcgacctgaaaatcagcaaacatcaggactcatgatgacaatgaaggatgtgatgagtttgtgtctgttaaccatataaggttgcacgttaagcatgcccctgacttgccggacgagcagcaagactttgggacctagattggctaaggcactaagaatagaatagcttttcaagaaaagagagacaacaactaacactgtactatgtaggggtgaaatagctagattaagataataaaatttatatatagctaggatcataaatggattacgaaacatttttatcttaacaatataacacatgtttatatataagttattatagtattatatatttccgttgcaacgcacgggcactcacctagtaagcaaagaattcaggggtgtgatcatttttggccgtggggacactccgaagcagcatgtggacctgctgcaccagcagctgcttcctcactcaggtatttcattccgtccacaacagtacagcacagtgcatcgatcttgaaatcaaaatccaacagcgacacaaaccgaatataatcgacaccaccgctcgctcacgacgccagggtggtgctggggcagttgtcgacgccgcaggccagaacgtcgcggtagtcgcgggagatggtgaagtggtcgtgcacgctgccatcccggctcttcttgtactccaacagcagcctcgtgtggttgaacgccgtcagcttcacgaacccaaagtcgcggtcccgcacgtggctccatcgcgcccgcgcggccgtgtagtcggcgaggctggcgccgccgccgcccaccacgacgtgcgtcgtcgccgtgaaggcgccggcgtagaggtcggaccccttggccacgcacgcgttctgcgttccac

SEQ ID NO: 81556 - DNA, 2039 bp, Zea Mays
agaagattagctagcagatgaagccgctgcaggatctcgtgccgagttgcaacaaggtttgaattcagagtaaaatgtttctcattttgggtggtgggcaaggcagtgatgctcgatgaaatcataaactatgtgtagaccttgcaatggcgaatcaagggatagttacacatcgaggcttttcgaaatgctactcttctggctccctcctggctaagcagttgaagaatgtgaatgaacacaaatgtcaaatctatggtgacactgtcgggttcttagcaacaggcgatatttttgttgcgtgcaacgaatgtgccttccctgtgtgtcggtcacgctatgagtatgagcgcaaagaggggaatcaatgttgtcctcaatgcaaaactagatacaagaggcacaaagcactggttgcactgtacctttaccctttcttgaacactgtctacaaaacaagagagtatgagttcttgaggcttaccagcctgggtgtgatcgatgctcttgtgaagccggttgttaggaagtgcaccgaaatgttgagtcgagcaatttgcatatctggcggcgatttttatgtacgcaggtttcataaggatggacctattgtttggaggttgttggctttatctccattccgacgtctgtcaaagatggatgaaaaagcaatcattttaccatatagggatacctcacttaactcagaggaacctatggctgagatctctagccaaaagattcagattgcagtcctggacatgatcgctgcaatatcttcgaacaagagaaatgttgttgcactagaaagcgtactaaagaagatgtgtactactcactaaaccaaagggaatctttacttcccgaccaagatctagccctggtatcagatcttttgccccctcaagtgtcttcgagagaatacctctttgtacagtatggaggtgagggtgtcaggtgtgatgtagacccctcatctgtttattatgtgttcagaaggatgcagggtgtgtgatcttgtgcgacctgaaaatcaggttcctaatactgtgtatttgtaatcttgctgagtttttttggtcatgctagcaccctgtgtcacacattgaatataatatcacctgctacaaagaatggtaaactttttcatacgtgttctcgcactgaaaatcatcaagcaaacatcaggactcatgatgacaatgaaggatgtgatgagtttgtgtctgttaaccatataaggttgcacgttaagcatgcccctgacttgccggacgagcagcaagactttgggacctagattggctaaggcactaagaatagaatagcttttcaagaaaagagagacaacaactaacactgtactatgtaggggtgaaatagctagattaagataataaaatttatatatagctaggatcataaatggattacgaaacatttttatcttaacaatataacacatgtttatatataagttattatagtattatatatttccgttgcaacgcacgggcactcacctagtaagcaaagaattcaggggtgtgatcatttttggccgtggggacactccgaagcagcatgtggacctgctgcaccagcagctgcttcctcactcaggtatttcattccgtccacaacagtacagcacagtgcatcgatcttgaaatcaaaatccaacagcgacacaaaccgaatataatcgacaccaccgctcgctcacgacgccagggtggtgctggggcagttgtcgacgccgcaggccagaacgtcgcggtagtcgcgggagatggtgaagtggtcgtgcacgctgccatcccggctcttcttgtactccaacagcagcctcgtgtggttgaacgccgtcagcttcacgaacccaaagtcgcggtcccgcacgtggctccatcgcgcccgcgcggccgtgtagtcggcgaggctggcgccgccgccgcccaccacgacgtgcgtcgtcgccgtgaaggcgccggcgtagaggtcggaccccttggccacgcacgcgttctgcgttccac

SEQ ID NO: 81557 - DNA, 2035 bp, Zea Mays
agaagattagctagcagatgaagccgctgcaggatctcgtgccgagttgcaacaagaccttgcaatggcgaatcaagggatagttacacatcgaggcttttcgaaatgctactcttctggctccctcctggctaagcagttgaagaatgtgaatgaacacaaatgtcaaatctatggtgacactgtcgggttcttagcaacaggcgatatttttgttgcgtgcaacgaatgtgccttccctgtgtgtcggtcacgctatgagtatgagcgcaaagaggggaatcaatgttgtcctcaatgcaaaactagatacaagaggcacaaagcactggttgcactgtacctttaccctttcttgaacactgtctacaaaacaagagagtatgagttcttgaggcttaccagcctgggtgtgatcgatgctcttgtgaagccggttgttaggaagtgcaccgaaatgttgagtcgagcaatttgcatatctggcggcgatttttatgtacgcaggtttcataaggatggacctattgtttggaggttgttggctttatctccattccgacgtctgtcaaagatggatgaaaaagcaatcattttaccatatagggatacctcacttaactcagaggaacctatggctgagatctctagccaaaagattcagattgcagtcctggacatgatcgctgcaatatcttcgaacaagagaaatgttgttgcactagaaagcgtactaaagaagatgtgtactactcactaaaccaaagggaatctttacttcccgaccaagatctagccctggtatcagatcttttgccccctcaagtgtcttcgagagaatacctctttgtacagtatggaggtgagggtgtcaggtgtgatgtagacccctcatctgtttattatgtgttcagaaggatgcagggtgtgtgatcttgtgcgacctgaaaatcaggtagaatccacagctttccatctatattgacatgtttctctttcacatttcattacttaagaattctacttttttcaggttcctaatactgtgtatttgtaatcttgctgagtttttttggtcatgctagcaccctgtgtcacacattgaatataatatcacctgctacaaagaatggtaaactttttcatacgtgttctcgcactgaaaatcatcaagcaaacatcaggactcatgatgacaatgaaggatgtgatgagtttgtgtctgttaaccatataaggttgcacgttaagcatgcccctgacttgccggacgagcagcaagactttgggacctagattggctaaggcactaagaatagaatagcttttcaagaaaagagagacaacaactaacactgtactatgtaggggtgaaatagctagattaagataataaaatttatatatagctaggatcataaatggattacgaaacatttttatcttaacaatataacacatgtttatatataagttattatagtattatatatttccgttgcaacgcacgggcactcacctagtaagcaaagaattcaggggtgtgatcatttttggccgtggggacactccgaagcagcatgtggacctgctgcaccagcagctgcttcctcactcaggtatttcattccgtccacaacagtacagcacagtgcatcgatcttgaaatcaaaatccaacagcgacacaaaccgaatataatcgacaccaccgctcgctcacgacgccagggtggtgctggggcagttgtcgacgccgcaggccagaacgtcgcggtagtcgcgggagatggtgaagtggtcgtgcacgctgccatcccggctcttcttgtactccaacagcagcctcgtgtggttgaacgccgtcagcttcacgaacccaaagtcgcggtcccgcacgtggctccatcgcgcccgcgcggccgtgtagtcggcgaggctggcgccgccgccgcccaccacgacgtgcgtcgtcgccgtgaaggcgccggcgtagaggtcggaccccttggccacgcacgcgttctgcgttccac

SEQ ID NO: 81558 - DNA, 1995 bp, Zea Mays
gtactgagtactgactactgactacactcccaagtcaactccaccgtcggctgtgctgcgctgatcttctgtgagtagtgcgcgcggcgtggtctccgttcgaaccgatgcccatctgctgaatcggatcggatcgtgcgatcggccgccacgccacggcccgcgggtgaggcgtggtctccgggaggcagccaacctatcccgcccggtctagcctctagcgatcccggcgccggcagcgcgcacgagaggaatggacgcgtcgcacccggagggcgaggccacggcggggtggctgacggtcgaggagtggagcggctcgtcagcctccgcgctctcccgcaccgccgtcctcaccgcctccgcctcctctctcaccgcacacaggttcggcagccggtgggaacggatcgggagccgcatgctcggcgccttcgtgcctgagggctttcctgggagcgtgactccggattatgtcccgttccagatgtgggatacgttgcagggtctctccacatacatccgtgcaatgttgtctacacaagctcttctaggggcaatcggagtgggggaacagtccgcaactgtcataggtgctacttttcagtggtttctgagggacttgacaggaatgcttggagggatattgttcaccttttaccaggaatgttgatggatcttttgagccctctgtttccttcatcgttgatagttataatgtgcttaggcagcctgtctaggtcattcactggtgttgctagtggagcaactagagcagcactaacgcagcattttgcacttgcaaataatgcagctgatatttctgcaaaggagggcagtcaggaaacacttgctacaatgttagggatggggttggggatgctgttagctcaaattaccagagggcatgctttgagtgtatgggcatcttttctttctcttacgatgttccatatgtatgcaaattacaaggcagtgcagtcactttcactcactacgctaaactatgagagagcttccatcttgctacaatacttcaaggaatgtggtgaagttcttgtgccacggaaggtttcccagcaggaacatattcttccttcttggtcaaactggaggaaactgaacagaattaaactgccacatgagcgtgtgcacttgggtgctaaagcctcgatgcttacacacagtgacatgttggtgattgcaaaaacaagataccactatgaaaacgcgaactactttttgctggataaacaaggcatcgtttacgttttcatccacaaggaggcaacaccagccgatgttttaaggtccttcgtacacgggctcgtgctagctagctcgacacagaacagcaaacctcagcacttagaggcccgtcgatggatggacgagatgtataccagttttatctcgaagctgcagactgaaggttactcgacggaacgccttctgtcgcattcgattctttggagggcacactggcttcacggccagctggatgagaagctcaagtaggaggaacactgcaagaccgcgtctgcttatccaaggacaggtcacaggtatatcgcccaggacgcgattattagctagggtgagaacgtgttaattgttcgcttgtgcatggcatgactgcatgatgaaagatagatgcatgagctgcaccgagcaccaccaaatatagttaaccgcttcgaggttctagcatatggacggacttcacgataaaagtgctggcctgtacgctcgagttcagcatgttaatggttcacactacgtccatccgcgccgctttagggcatgtacagtggtgtttaatgtggagtctcttaaggtgtttaagggggttatttgtaaaaaaatcttagagccgtctctccgtgaagagacgtctctggctcgtaaaccaagtagcaacagacgccttacttcccactgtacgaatttgtcgtctgttctatcgatctgatgctatacaaatacatttaattc

SEQ ID NO: 81559 - DNA, 1999 bp, Zea Mays
gtactgagtactgactactgactacactcccaagtcaactccaccgtcggctgtgctgcgctgatcttctgtgagtagtgcgcgcggcgtggtctccgttcgaaccgatgcccatctgctgaatcggatcggatcgtgcgatcggccgccacgccacggcccgcgggtgaggcgtggtctccgggaggcagccaacctatcccgcccggtctagcctctagcgatcccggcgccggcagcgcgcacgagaggaatggacgcgtcgcacccggagggcgaggccacggcggggtggctgacggtcgaggagtggagcggctcgtcagcctccgcgctctcccgcaccgccgtcctcaccgcctccgcctcctctctcaccgcacacaggttcggcagccggtgggaacggatcgggagccgcatgctcggcgccttcgtgcctgagggctttcctgggagcgtgactccggattatgtcccgttccagatgtgggatacgttgcagggtctctccacatacatccgtgcaatgttgtctacacaagctcttctaggggcaatcggagtgggggaacagtccgcaactgtcataggtgctacttttcagtggtttctgagggacttgacaggaatgcttggagggatattgttcaccttttaccagggatctaatcttgatagcaatgctaaaatgtggcgtctagttgcagactttatgaatgaccttggaatgttgatggatcttttgagccctctgtttccttcatcgttgatagttataatgtgcttaggcagcctgtctaggtcattcactggtgttgctagtggagcaactagagcagcactaacgcagcattttgcacttgcaaataatgcagctgatatttctgcaaaggagggcagtcaggaaacacttgctacaatgttagggatggggttggggatgctgttagctcaaattaccagagggcatgctttgagtgtatgggcatcttttctttctcttacgatgttccatatgtatgtgctgaagcgtagcctatttgctaacacactctaaatctgcccctacatggaaagcaaattacaaggcagtgcagtcactttcactcactacgctaaactatgagagagcttccatcttgctacaatacttcaaggaatgtggtgaagttcttgtgccacggaaggtttcccagcaggaacatattcttccttcttggtcaaactggaggaaactgaacagaattaaactgccacatgagcgtgtgcacttgggtgctaaagcctcgatgcttacacacagtgacatgttggtgattgcaaaaacaagataccactatgaaaacgcgaactactttttgctggataaacaaggcatcgtttacgttttcatccacaaggaggcaacaccagccgatgttttaaggtccttcgtacacgggctcgtgctagctagctcgacacagaacagcaaacctcagcacttagaggcccgtcgatggatggacgagatgtataccagttttatctcgaagactgaaggttactcgacggaacgccttctgtcgcattcgattctttggagggcacactggcttcacggccagctggatgagaagctcaagtaggaggaacactgcaagaccgcgtctgcttatccaaggacaggtcacagcgaggttacgacaaacttggagctcgaattggagaagtatctggagtttcaccaaaaaggtcaagagcaggtactgctggaggagaatcatgaaggcgagtttagagtggtctagaccgtcgtcttctagttaactttgattatggaggatcgtcgtcgtcatatgatgtattttacttagttattttgtacaaaagctcctattatgtaataaagatgtgatgttgctttctatactgaaagggaattaggcttacacctatttcctaattgattttggtggttgaattgcccaacacaaataattggactaactagttt

SEQ ID NO: 81560 - DNA, 1982 bp, Zea Mays
gtactgagtactgactactgactacactcccaagtcaactccaccgtcggctgtgctgcgctgatcttctgtgagtagtgcgcgcggcgtggtctccgttcgaaccgatgcccatctgctgaatcggatcggatcgtgcgatcggccgccacgccacggcccgcgggtgaggcgtggtctccgggaggcagccaacctatcccgcccggtctagcctctagcgatcccggcgccggcagcgcgcacgagaggaatggacgcgtcgcacccggagggcgaggccacggcggggtggctgacggtcgaggagtggagcggctcgtcagcctccgcgctctcccgcaccgccgtcctcaccgcctccgcctcctctctcaccgcacacaggttcggcagccggtgggaacggatcgggagccgcatgctcggcgccttcgtgcctgagggctttcctgggagcgtgactccggattatgtcccgttccagatgtgggatacgttgcagggtctctccacatacatccgtgcaatgttgtctacacaagctcttctaggggcaatcggagtgggggaacagtccgcaactgtcataggtgctacttttcagtggtttctgagggacttgacaggaatgcttggagggatattgttcaccttttaccagggatctaatcttgatagcaatgctaaaatgtggcgtctagttgcagactttatgaatgaccttggaatgttgatggatcttttgagccctctgtttccttcatcgttgatagttataatgtgcttaggcagcctgtctaggtcattcactggtgttgctagtggagcaactagagcagcactaacgcagcattttgcacttgcaaataatgcagctgatatttctgcaaaggagggcagtcaggaaacacttgctacaatgttagggatggggttggggatgctgttagctcaaattaccagagggcatgctttgagtgtatgggcatcttttctttctcttacgatgttccatatgtatgcaaattacaaggcagtgcagtcactttcactcactacgctaaactatgagagagcttccatcttgctacaatacttcaaggaatgtggtgaagttcttgtgccacggaaggtttcccagcaggaacatattcttccttcttggtcaaactggaggaaactgaacagaattaaactgccacatgagcgtgtgcacttgggtgctaaagcctcgatgcttacacacagtgacatgttggtgattgcaaaaacaagataccactatgaaaacgcgaactactttttgctggataaacaaggcatcgtttacgttttcatccacaaggaggcaacaccagccgatgttttaaggtccttcgtacacgggctcgtgctagctagctcgacacagaacagcaaacctcagcacttagaggcccgtcgatggatggacgagatgtataccagttttatctcgaagctgcagactgaaggttactcgacggaacgccttctgtcgcattcgattctttggagggcacactggcttcacggccagctggatgagaagctcaagtaggaggaacactgcaagaccgcgtctgcttatccaaggacaggtcacaggtatatcgcccaggacgcgattattagctaggcgaggttacgacaaacttggagctcgaattggagaagtatctggagtttcaccaaaaaggtcaagagcaggtactgctggaggagaatcatgaaggcgagtttagagtggtctagaccgtcgtcttctagttaactttgattatggaggatcgtcgtcgtcatatgatgtattttacttagttattttgtacaaaagctcctattatgtaataaagatgtgatgttgctttctatactgaaagggaattaggcttacacctatttcctaattgattttggtggttgaattgcccaacacaaataattggactaactagttt

SEQ ID NO: 81561 - DNA, 1891 bp, Zea Mays
gtactgagtactgactactgactacactcccaagtcaactccaccgtcggctgtgctgcgctgatcttctgtgagtagtgcgcgcggcgtggtctccgttcgaaccgatgcccatctgctgaatcggatcggatcgtgcgatcggccgccacgccacggcccgcgggtgaggcgtggtctccgggaggcagccaacctatcccgcccggtctagcctctagcgatcccggcgccggcagcgcgcacgagaggaatggacgcgtcgcacccggagggcgaggccacggcggggtggctgacggtcgaggagtggagcggctcgtcagcctccgcgctctcccgcaccgccgtcctcaccgcctccgcctcctctctcaccgcacacaggttcggcagccggtgggaacggatcgggagccgcatgctcggcgccttcgtgcctgagggctttcctgggagcgtgactccggattatgtcccgttccagatgtgggatacgttgcagggtctctccacatacatccgtgcaatgttgtctacacaagctcttctaggggcaatcggagtgggggaacagtccgcaactgtcataggtgctacttttcagtggtttctgagggacttgacaggaatgcttggagggatattgttcaccttttaccagggatctaatcttgatagcaatgctaaaatgtggcgtctagttgcagactttatgaatgaccttggaatgttgatggatcttttgagccctctgtttccttcatcgttgatagttataatgtgcttaggcagcctgtctaggtcattcactggtgttgctagtggagcaactagagcagcactaacgcagcattttgcacttgcaaataatgcagctgatatttctgcaaaggagggcagtcaggaaacacttgctacaatgttagggatggggttggggatgctgttagctcaaattaccagagggcatgctttgagtgtatgggcatcttttctttctcttacgatgttccatatgtatgcaaattacaaggcagtgcagtcactttcactcactacgctaaactatgagagagcttccatcttgctacaatacttcaaggaatgtggtgaagttcttgtgccacggaaggtttcccagcaggaacatattcttccttcttggtcaaactggaggaaactgaacagaattaaactgccacatgagcgtgtgcacttgggtgctaaagcctcgatgcttacacacagtgacatgttggtgattgcaaaaacaagataccactatgaaaacgcgaactactttttgctggataaacaaggcatcgtttacgttttcatccacaaggaggcaacaccagccgatgttttaaggtccttcgtacacgggctcgtgctagctagctcgacacagaacagcaaacctcagcacttagaggcccgtcgatggatggacgagatgtataccagttttatctcgaagctgcagactgaaggttactcgacggaacgccttctgtcgcattcgattctttggagggcacactggcttcacggccagctggatgagaagctcaagtaggaggaacactgcaagaccgcgtctgcttatccaaggacaggtcacaggtcaagagcaggtactgctggaggagaatcatgaaggcgagtttagagtggtctagaccgtcgtcttctagttaactttgattatggaggatcgtcgtcgtcatatgatgtattttacttagttattttgtacaaaagctcctattatgtaataaagatgtgatgttgctttctatactgaaagggaattaggcttacacctatttcctaattgattttggtggttgaattgcccaacacaaataattggactaactagttt

SEQ ID NO: 81562 - DNA, 1950 bp, Zea Mays
gtactgagtactgactactgactacactcccaagtcaactccaccgtcggctgtgctgcgctgatcttctgtgagtagtgcgcgcggcgtggtctccgttcgaaccgatgcccatctgctgaatcggatcggatcgtgcgatcggccgccacgccacggcccgcgggtgaggcgtggtctccgggaggcagccaacctatcccgcccggtctagcctctagcgatcccggcgccggcagcgcgcacgagaggaatggacgcgtcgcacccggagggcgaggccacggcggggtggctgacggtcgaggagtggagcggctcgtcagcctccgcgctctcccgcaccgccgtcctcaccgcctccgcctcctctctcaccgcacacaggttcggcagccggtgggaacggatcgggagccgcatgctcggcgccttcgtgcctgagggctttcctgggagcgtgactccggattatgtcccgttccagatgtgggatacgttgcagggtctctccacatacatccgtgcaatgttgtctacacaagctcttctaggggcaatcggagtgggggaacagtccgcaactgtcataggtgctacttttcagtggtttctgagggacttgacaggaatgcttggagggatattgttcaccttttaccagggatctaatcttgatagcaatgctaaaatgtggcgtctagttgcagactttatgaatgaccttggaatgttgatggatcttttgagccctctgtttccttcatcgttgatagttataatgtgcttaggcagcctgtctaggtcattcactggtgttgctagtggagcaactagagcagcactaacgcagcattttgcacttgcaaataatgcagctgatatttctgcaaaggagggcagtcaggaaacacttgctacaatgttagggatggggttggggatgctgttagctcaaattaccagagggcatgctttgagtgtatgggcatcttttctttctcttacgatgttccatatgtatgcaaattacaaggcagtgcagtcactttcactcactacgctaaactatgagagagcttccatcttgctacaatacttcaaggaatgtggtgaagttcttgtgccacggaaggtttcccagcaggaacatattcttccttcttggtcaaactggaggaaactgaacagaattaaactgccacatgagcgtgtgcacttgggtgctaaagcctcgatgcttacacacagtgacatgttggtgattgcaaaaacaagataccactatgaaaacgcgaactactttttgctggataaacaaggcatcgtttacgttttcatccacaaggaggcaacaccagccgatgttttaaggtccttcgtacacgggctcgtgctagctagctcgacacagaacagcaaacctcagcacttagaggcccgtcgatggatggacgagatgtataccagttttatctcgaagctgcagactgaaggttactcgacggaacgccttctgtcgcattcgattctttggagggcacactggcttcacggccagctggatgagaagctcaagtaggaggaacactgcaagaccgcgtctgcttatccaaggacaggtcacagcgaggttacgacaaacttggagctcgaattggagaagtatctggagtttcaccaaaaaggtcaagagcaggtactgctggaggagaatcatgaaggcgagtttagagtggtctagaccgtcgtcttctagttaactttgattatggaggatcgtcgtcgtcatatgatgtattttacttagttattttgtacaaaagctcctattatgtaataaagatgtgatgttgctttctatactgaaagggaattaggcttacacctatttcctaattgattttggtggttgaattgcccaacacaaataattggactaactagttt

SEQ ID NO: 81563 - DNA, 2150 bp, Zea Mays
gtactgagtactgactactgactacactcccaagtcaactccaccgtcggctgtgctgcgctgatcttctgtgagtagtgcgcgcggcgtggtctccgttcgaaccgatgcccatctgctgaatcggatcggatcgtgcgatcggccgccacgccacggcccgcgggtgaggcgtggtctccgggaggcagccaacctatcccgcccggtctagcctctagcgatcccggcgccggcagcgcgcacgagaggaatggacgcgtcgcacccggagggcgaggccacggcggggtggctgacggtcgaggagtggagcggctcgtcagcctccgcgctctcccgcaccgccgtcctcaccgcctccgcctcctctctcaccgcacacaggttcggcagccggtgggaacggatcgggagccgcatgctcggcgccttcgtgcctgagggctttcctgggagcgtgactccggattatgtcccgttccagatgtgggatacgttgcagggtctctccacatacatccgtgcaatgttgtctacacaagctcttctaggggcaatcggagtgggggaacagtccgcaactgtcataggtgctacttttcagtggtttctgagggacttgacaggaatgcttggagggatattgttcaccttttaccaggaatgttgatggatcttttgagccctctgtttccttcatcgttgatagttataatgtgcttaggcagcctgtctaggtcattcactggtgttgctagtggagcaactagagcagcactaacgcagcattttgcacttgcaaataatgcagctgatatttctgcaaaggagggcagtcaggaaacacttgctacaatgttagggatggggttggggatgctgttagctcaaattaccagagggcatgctttgagtgtatgggcatcttttctttctcttacgatgttccatatgtatgtgctgaagcgtagcctatttgctaacacactctaaatctgcccctacatggaaagatcggatactgcatacttagactcggatacggatcggagctcaacgcttttagacagataatatccgtaccatttacatccctacggctatcccatatttctgtgtgattttcttccttagcatatcacgtttcttcatgcttcagggatttagttttaaaaaggcatttcttaacatacttccgcttgttttgtttctgatgatccagcaaattacaaggcagtgcagtcactttcactcactacgctaaactatgagagagcttccatcttgctacaatacttcaaggaatgtggtgaagttcttgtgccacggaaggtttcccagcaggaacatattcttccttcttggtcaaactggaggaaactgaacagaattaaactgccacatgagcgtgtgcacttgggtgctaaagcctcgatgcttacacacagtgacatgttggtgattgcaaaaacaagataccactatgaaaacgcgaactactttttgctggataaacaaggcatcgtttacgttttcatccacaaggaggcaacaccagccgatgttttaaggtccttcgtacacgggctcgtgctagctagctcgacacagaacagcaaacctcagcacttagaggcccgtcgatggatggacgagatgtataccagttttatctcgaagctgcagactgaaggttactcgacggaacgccttctgtcgcattcgattctttggagggcacactggcttcacggccagctggatgagaagctcaagtaggaggaacactgcaagaccgcgtctgcttatccaaggacaggtcacagcgaggttacgacaaacttggagctcgaattggagaagtatctggagtttcaccaaaaaggtcaagagcaggtactgctggaggagaatcatgaaggcgagtttagagtggtctagaccgtcgtcttctagttaactttgattatggaggatcgtcgtcgtcatatgatgtattttacttagttattttgtacaaaagctcctattatgtaataaagatgtgatgttgctttctatactgaaagggaattaggcttacacctatttcctaattgattttggtggttgaattgcccaacacaaataattggactaactagttt

SEQ ID NO: 81564 - DNA, 6918 bp, Zea Mays
gaaaaagcaatttggaaaatgcattgcattttcaagggattgccaagctaggctagggatcgtccgcgggtatcagatcaggaatatcgtatttatctcttctaatatagatcccacttccctccacttcttgcctcacgcccgtcaaaccaggccctccctgtacacctgggagccacgaaccggaggagattgacttattcaattttgactctcgtcggctccggtatttcgacttccaaaatagccctaacatttaccgaagctcctcccgccggcgcgctgcgatccaactccgagatgctcgcaccgcttccgcgcctgacgagcgcgctccgcggccactacgacgctgatcaggcctacctcctccgcaagagcgccctccaggctctcaccctccccaggccgcatgacgagtggaagttcgctcggaaaatcgtgcctggctgggacgatgcttccagcgaagtgcgtcaggcgtataaacaatttatcggggccgttgtggagttgttgagcggagaggcagtgtctgaagaactctaccaagttgcgcagactgtatatactctatttggtggcgatgacacggagtatgttggtgctaaaaaagtcctttccaaaaggaatgagttggagagccttgtgggctacactgtacaagactcagttttgaaaaagctagctcagttagctcagaagctcgattcccttcaacgagcaagtgcctatgaatctgtacacagaatagcggatgatgtaaatgaaaatgatagaattgaatttggagcagacttcgatttcaagccacttgcccgtttcattgttgatgtttctcttgacgcacccttagaaagtgctgaattgggcagtggtccatttgaaaaatggcagtatgatgcttggagcacatccacaactagtcattcaactgctgttaggggttctgtgagtttgaggtggctgaaagatcagtgtgctttgataactaaaagtggtggctcaatgctctcaggagatgaacttgcaatgaccttgtgcagagtgctcctatcaaataaagcaggcgatcagatagctggtgaacttttggacctggttggcgacaccgcttttgaaatagttcaagatcttcttttgcataggaaagagctagtggatgcaattcaacatggattgtcgatactgaaatctgagaaaatgacctcaggtaatcaaccaaagatgccaacttatggtacacaggtaactgtacaaacagagtctgaacgccagcttgataagattaggaggaaagaggaaagacgtagcaagcgcagtgcagacagtggcaataatgatattggtgttgatgatttttcatcccttcttttggcaagtgaacggaaggaggcatttgatgacgtgattggtagtggagaagggtcagacagttttacagtaacttcccttcctcaaggaaccacaaggaaacacatgaagggttatgaagaagtgaagattccaccaactccaacagcatcactgaaacccaatgagaagctgattgaaataaaagaattagatgagtttgcccaagctgccttccagggatacaagtcactcaatcgtgtgcagagtcgtattttccaagctacatactacaccaatgagaatattttagtttgtgccccaacaggtgctgggaaaacaaatattgcaatgattgcagttcttcatgaggttaaacagcacttcagggatggtattttacataaaaacgagtttaagatagtctatgttgctccaatgaaggccttggccgcagaggtaacagcaacattcagtcgccgattatctccattgaacctggttgttagagaacttacaggagatatgcagttgaccaaaaatgagattgaagaaactcagatgatagtgactactcctgagaagtgggatgttattacacgcaaaagcagtgacatgtcactttcaatgctggttaagctgatcatcattgatgaagtacaccttttaaatgacgatagaggttcagtaattgaggcgctagtagctcggactctccgccaggttgagtctatgcaatcaatgattcgcattgttggcctatctgctaccctgcctacctacttagaggtcgcacattttttgcgggttaatccagacactggacttttcttttttgactcaagctatcgtccagttcctcttgctcagcagtacattgggatcagtgaaagggattacacaaagagaagtgaattattcaatactttgtgttatgagaaggttgttgagtccattaagcaaggtcaccaagcattggtttttgtccatacccgtaaggatactgggaaaaccgctagaaccctgattgacctagcagcaaaagcaggggaattggaattattttcaagtgcagatcatcctcaatttccattaatcaagaaagatgttagtaaagcaaaaagtcgtgaagttgttgaattttttgaatctggatttggtatacacaatgctggaatgatgcgatctgacagaagtttgatggagcgcttgtttggtgacgggcttttgaaagtccttgtttgtacagcaactttggcttggggagtaaacttaccagctcatacagttgttataaagggcacacagctatatgatcctaaagctggtgggtggcgagacttggggatgcttgatgtgatgcagatctttggacgtgctggaaggccacagtttgataaaagtggcgaaggaattattatcacaacacatgacaaattggcttattacttgaggttattgacaagtcagcttccaatagagagccagttccttggatctctgaaagataatttaaatgctgaagttgctttgggcactgtaacaaatgtcagggaggcttgtacctggcttggctatacatacttatttataaggatgaagactaatcctctggtgtatgggataacttgggaagaggttatgggagatccttctatgggtgcaaagcaaagaacatttattattgatgctgcacgagcactggacaaagctaagatgatgcgctttgatgaaaagagtggtaacttctactgcaccgaacttggtcgaattgcaagtcatttttaccttcagtactccagtgtcgagacttacaatgagatgcttcgacgtcacatgagtgaaagtgagttgattactatggtggcccattcctctgaatttgagaatatcgtagtaagagaagaagaacaggatgaattagaagcccttgcaaggaaagcatgccctttagaaattaagggtgggccgactgacaaacatgggaaaatttcaattctcatacaggtttatatttcccgtgctccaatcgatagctcctctttacattctgatgctcaatacattagtcaaagtttggcacgcataatgagggcactatttgagatttgtctgcgtcggggatggtctgagatgtcatccttattgttgcaatattgcaaggccgtggaccgcaagatatggccccatcttcatccacttaggcagtttgataaggatctttctcctcaggtattgtggaaactcgaggaaagaaatgttgatctggatcatctttatgagatggaggaaaatgaaattggagctctgatccggttttctcatcagggaaagttggtcaagcaatacgttggatacttcccgtatgtcaacctatctgcaaccgtgagcccaatcactaggacagttcttaaagtggacctgcatataactcctgaatttgtgtggaaagatcgttatcatggcatgtcagaacgatggtggatcattgttgaggattctgaaaatgataccatttatcattcagagctattcacattaacgaagaagatggcaagaggaacacctacaaagatatcttttaatgtaccaatatttgaacctcatccgccacagtactatatacatgccatctcagactcatggctacatgctgaaacactcttcactgtttcttttcataatttgacattgccacagacacaaataacacacacagaactcttggacttgaagcctcttccactgagtgctcttggcaacaaaacgtatgaggatctgtacagattttcccatttcaacccgatacaaactcaggcttttcatgttctttatcacactgataacaatgtactcttgggagctccaactgggagtggcaaaacaatttcggcagaacttgcaatgctccatcttttcagtacacaaccagacatgaaggtagtttacattgctcctctaaaggcaatagtacgagaaagaatgaatgattggagaaaacgtcttgtaattcagcttgggaagaagatggttgagatgactggtgacttcactccagatttgatggccctattgtcagctgacatcatcatttctacccctgaaaaatgggatgggattagtcgaaattggcatagcagaagttacgttatgaaggtcgggctcatgatattggatgagatacatcttctgggagctgaccgtggacccatccttgaggtcattgtatcaagaatgcgatacatatcatcacaaacagaacgttcaattcggtttgttggtttatcaacggcattagcaaatgctcgtgatttagctgattggttgggcgttacagatgacggtctattcaatttcaagcctagtgtgagacctgtacctcttgaagtgcatatccagggatatcctgggaaattctattgtccaagaatgaatagcatgaacaaaccagcttatgcagccatatgcactcattcacccaataaaccagttctcatttttgtgtcatcacgtcgacagacaagacttacagctcttgatatcattcagcttgcagcatcagatgaaaaaccaaggcagttcctgagcattgaagacaactccctagacatggttctttcacaggtttctgacagtaatttgaggcatactctgcaatttggcataggtctgcatcatgctggtttaaatgacagagacagatccttggttgaggagcttttttcaaacaataagattcaggtgctggtatgtaccagcacattggcgtggggtgtcaatcttccagctcacctggtcataatcaagggcactgaatactatgatgggaaaacaaaaagatacatagattatgatatcacagatattctgcagatgatgggtcgtgcaggtcggccgcaatacgaccaacatggcaaagctgttattcttgtccatgaaccaaaaaagagcttttacaagaagttcctctacgaaccgtttcctgtggaaagtaatctgagggagcacttgcatgaccacataaatgcagaaattgtttctggcaccatcagcaacaaggaggaggcgattatttatctcacctggacttacctatatcgcagattggttgttaatccggcctattatggattggaggatactgaaacaaacacattgaattcttatctatcaaggttagtcgaaactacatttgaagatcttgaggacagtggatgcataaaagtggatgaccactctgtaaagtacttgattttggggaaaatagcttcacagtattacctgagctacctcactgtttcaatgtttgggtcaaatattggccccaacacaacgttggaagtctttctacacatactgtcagctgcatcagaatttgatgagcttcctgtacggcacaatgaggacaatttgaatcgaatactcagcggaaatgtcccgtatccagttgatcaacaccaccttgatgatccacatgttaaagccaacttactctttcaggcacatttctccagagcagaattgccaataagcgactatgtcactgacttgaaatcagttcttgatcagagcatacgcatcatacaggcaatgattgatgtatgcgcgaatagtggatggcttacgagtgcattgacttgcatgcatctcttgcagatgatcatacagggtctctggtttgagagagattatgaatccctctggatgttgccatccatgaatgatgatatattagaccatctcaagagtagaggagtctcaacagtcccctccttactagatctttcccgtgaagaattgcgtagggtacttcaaccattttctgcgtcagagttgtatcaggatctgcaacatttccctcatgttgatgtgaaagttaagcttcataatgaacaggagcgatccaaacctccaactttaaacatcaggttgcaattgaaaaattcgcgacggtcagcatcaagagcatttgcccctagatttcccaaggcaaaacaagaagcttggtggcttgtcctggggaatgctacaagttcagagctgtatggtctgaaaagaattagttttgcagatcgggtgattaatactcgcatggaattgccacagacgttcaatgtgcaggagacgaagctgatcttggtgtcggattgctacctaggttttgacttggagtattctcttgagcatctcaccaagggttgagtgctttattcagagctgtttgggctgtttcattttgtatgggttcagcaaccagctcatcctagattgatcctgtaatcacgagacatgagttcattccatgaatttttgtttgtatgactacatccctcgtgttcatggttatattatatttaatagctatatatacgagtggataggtttataactttcatgaaatatcttttccgtaagcatagtagatgtttgagctctaaggttatgaccaacaaattgtgtatatggtcgtgcaaaatactattttataatataaactatattatttacatggtgaagtttgaaatagaagatcgagatgagtaagttgctggaattagcctaagg

SEQ ID NO: 81565 - DNA, 6808 bp, Zea Mays
cgtatttatctcttctaatatagatcccacttccctccacttcttgcctcacgcccgtcaaaccaggccctccctgtacacctgggagccacgaaccggaggagattgacttattcaattttgactctcgtcggctccggtatttcgacttccaaaatagccctaacatttaccgaagctcctcccgccggcgcgctgcgatccaactccgagatgctcgcaccgcttccgcgcctgacgagcgcgctccgcggccactacgacgctgatcaggcctacctcctccgcaagagcgccctccaggctctcaccctccccaggccgcatgacgagtggaagttcgctcggaaaatcgtgcctggctgggacgatgcttccagcgaagtgcgtcaggcgtataaacaatttatcggggccgttgtggagttgttgagcggagaggcagtgtctgaagaactctaccaagttgcgcagactgtatatactctatttggtggcgatgacacggagtatgttggtgctaaaaaagtcctttccaaaaggaatgagttggagagccttgtgggctacactgtacaagactcagttttgaaaaagctagctcagttagctcagaagctcgattcccttcaacgagcaagtgcctatgaatctgtacacagaatagcggatgatgtaaatgaaaatgatagaattgaatttggagcagacttcgatttcaagccacttgcccgtttcattgttgatgtttctcttgacgcacccttagaaagtgctgaattgggcagtggtccatttgaaaaatggcagtatgatgcttggagcacatccacaactagtcattcaactgctgttaggggttctgtgagtttgaggtggctgaaagatcagtgtgctttgataactaaaagtggtggctcaatgctctcaggagatgaacttgcaatgaccttgtgcagagtgctcctatcaaataaagcaggcgatcagatagctggtgaacttttggacctggttggcgacaccgcttttgaaatagttcaagatcttcttttgcataggaaagagctagtggatgcaattcaacatggattgtcgatactgaaatctgagaaaatgacctcaggtaatcaaccaaagatgccaacttatggtacacaggtaactgtacaaacagagtctgaacgccagcttgataagattaggaggaaagaggaaagacgtagcaagcgcagtgcagacagtggcaataatgatattggtgttgatgatttttcatcccttcttttggcaagtgaacggaaggaggcatttgatgacgtgattggtagtggagaagggtcagacagttttacagtaacttcccttcctcaaggaaccacaaggaaacacatgaagggttatgaagaagtgaagattccaccaactccaacagcatcactgaaacccaatgagaagctgattgaaataaaagaattagatgagtttgcccaagctgccttccagggatacaagtcactcaatcgtgtgcagagtcgtattttccaagctacatactacaccaatgagaatattttagtttgtgccccaacaggtgctgggaaaacaaatattgcaatgattgcagttcttcatgaggttaaacagcacttcagggatggtattttacataaaaacgagtttaagatagtctatgttgctccaatgaaggccttggccgcagaggtaacagcaacattcagtcgccgattatctccattgaacctggttgttagagaacttacaggagatatgcagttgaccaaaaatgagattgaagaaactcagatgatagtgactactcctgagaagtgggatgttattacacgcaaaagcagtgacatgtcactttcaatgctggttaagctgatcatcattgatgaagtacaccttttaaatgacgatagaggttcagtaattgaggcgctagtagctcggactctccgccaggttgagtctatgcaatcaatgattcgcattgttggcctatctgctaccctgcctacctacttagaggtcgcacattttttgcgggttaatccagacactggacttttcttttttgactcaagctatcgtccagttcctcttgctcagcagtacattgggatcagtgaaagggattacacaaagagaagtgaattattcaatactttgtgttatgagaaggttgttgagtccattaagcaaggtcaccaagcattggtttttgtccatacccgtaaggatactgggaaaaccgctagaaccctgattgacctagcagcaaaagcaggggaattggaattattttcaagtgcagatcatcctcaatttccattaatcaagaaagatgttagtaaagcaaaaagtcgtgaagttgttgaattttttgaatctggatttggtatacacaatgctggaatgatgcgatctgacagaagtttgatggagcgcttgtttggtgacgggcttttgaaagtccttgtttgtacagcaactttggcttggggagtaaacttaccagctcatacagttgttataaagggcacacagctatatgatcctaaagctggtgggtggcgagacttggggatgcttgatgtgatgcagatctttggacgtgctggaaggccacagtttgataaaagtggcgaaggaattattatcacaacacatgacaaattggcttattacttgaggttattgacaagtcagcttccaatagagagccagttccttggatctctgaaagataatttaaatgctgaagttgctttgggcactgtaacaaatgtcagggaggcttgtacctggcttggctatacatacttatttataaggatgaagactaatcctctggtgtatgggataacttgggaagaggttatgggagatccttctatgggtgcaaagcaaagaacatttattattgatgctgcacgagcactggacaaagctaagatgatgcgctttgatgaaaagagtggtaacttctactgcaccgaacttggtcgaattgcaagtcatttttaccttcagtactccagtgtcgagacttacaatgagatgcttcgacgtcacatgagtgaaagtgagttgattactatggtggcccattcctctgaatttgagaatatcgtagtaagagaagaagaacaggatgaattagaagcccttgcaaggaaagcatgccctttagaaattaagggtgggccgactgacaaacatgggaaaatttcaattctcatacaggtttatatttcccgtgctccaatcgatagctcctctttacattctgatgctcaatacattagtcaaagtttggcacgcataatgagggcactatttgagatttgtctgcgtcggggatggtctgagatgtcatccttattgttgcaatattgcaaggccgtggaccgcaagatatggccccatcttcatccacttaggcagtttgataaggatctttctcctcaggtattgtggaaactcgaggaaagaaatgttgatctggatcatctttatgagatggaggaaaatgaaattggagctctgatccggttttctcatcagggaaagttggtcaagcaatacgttggatacttcccgtatgtcaacctatctgcaaccgtgagcccaatcactaggacagttcttaaagtggacctgcatataactcctgaatttgtgtggaaagatcgttatcatggcatgtcagaacgatggtggatcattgttgaggattctgaaaatgataccatttatcattcagagctattcacattaacgaagaagatggcaagaggaacacctacaaagatatcttttaatgtaccaatatttgaacctcatccgccacagtactatatacatgccatctcagactcatggctacatgctgaaacactcttcactgtttcttttcataatttgacattgccacagacacaaataacacacacagaactcttggacttgaagcctcttccactgagtgctcttggcaacaaaacgtatgaggatctgtacagattttcccatttcaacccgatacaaactcaggcttttcatgttctttatcacactgataacaatgtactcttgggagctccaactgggagtggcaaaacaatttcggcagaacttgcaatgctccatcttttcagtacacaaccagacatgaaggtagtttacattgctcctctaaaggcaatagtacgagaaagaatgaatgattggagaaaacgtcttgtaattcagcttgggaagaagatggttgagatgactggtgacttcactccagatttgatggccctattgtcagctgacatcatcatttctacccctgaaaaatgggatgggattagtcgaaattggcatagcagaagttacgttatgaaggtcgggctcatgatattggatgagatacatcttctgggagctgaccgtggacccatccttgaggtcattgtatcaagaatgcgatacatatcatcacaaacagaacgttcaattcggtttgttggtttatcaacggcattagcaaatgctcgtgatttagctgattggttgggcgttacagatgacggtctattcaatttcaagcctagtgtgagacctgtacctcttgaagtgcatatccagggatatcctgggaaattctattgtccaagaatgaatagcatgaacaaaccagcttatgcagccatatgcactcattcacccaataaaccagttctcatttttgtgtcatcacgtcgacagacaagacttacagctcttgatatcattcagcttgcagcatcagatgaaaaaccaaggcagttcctgagcattgaagacaactccctagacatggttctttcacaggtttctgacagtaatttgaggcatactctgcaatttggcataggtctgcatcatgctggtttaaatgacagagacagatccttggttgaggagcttttttcaaacaataagattcaggtgctggtatgtaccagcacattggcgtggggtgtcaatcttccagctcacctggtcataatcaagggcactgaatactatgatgggaaaacaaaaagatacatagattatgatatcacagatattctgcagatgatgggtcgtgcaggtcggccgcaatacgaccaacatggcaaagctgttattcttgtccatgaaccaaaaaagagcttttacaagaagttcctctacgaaccgtttcctgtggaaagtaatctgagggagcacttgcatgaccacataaatgcagaaattgtttctggcaccatcagcaacaaggaggaggcgattatttatctcacctggacttacctatatcgcagattggttgttaatccggcctattatggattggaggatactgaaacaaacacattgaattcttatctatcaaggttagtcgaaactacatttgaagatcttgaggacagtggatgcataaaagtggatgaccactctgtaaagtacttgattttggggaaaatagcttcacagtattacctgagctacctcactgtttcaatgtttgggtcaaatattggccccaacacaacgttggaagtctttctacacatactgtcagctgcatcagaatttgatgagcttcctgtacggcacaatgagcggaaatgtcccgtatccagttgatcaacaccaccttgatgatccacatgttaaagccaacttactctttcaggcacatttctccagagcagaattgccaataagcgactatgtcactgacttgaaatcagttcttgatcagagcatacgcatcatacaggcaatgattgatgtatgcgcgaatagtggatggcttacgagtgcattgacttgcatgcatctcttgcagatgatcatacagggtctctggtttgagagagattatgaatccctctggatgttgccatccatgaatgatgatatattagaccatctcaagagtagaggagtctcaacagtcccctccttactagatctttcccgtgaagaattgcgtagggtacttcaaccattttctgcgtcagagttgtatcaggatctgcaacatttccctcatgttgatgtgaaagttaagcttcataatgaacaggagcgatccaaacctccaactttaaacatcaggttgcaattgaaaaattcgcgacggtcagcatcaagagcatttgcccctagatttcccaaggcaaaacaagaagcttggtggcttgtcctggggaatgctacaagttcagagctgtatggtctgaaaagaattagttttgcagatcgggtgattaatactcgcatggaattgccacagacgttcaatgtgcaggagacgaagctgatcttggtgtcggattgctacctaggttttgacttggagtattctcttgagcatctcaccaagggttgagtgctttattcagagctgtttgggctgtttcattttgtatgggttcagcaaccagctcatcctagattgatcctgtaatcacgagacatgagttcattccatgaatttttgtttgtatgactacatccctcgtgttcatggttatattatatttaatagctatatatacgagtggataggtttataactttcatgaaatatcttttccgtaagcatagtagatgtttgagctctaaggttatgaccaacaaattgtgtatatggtcgtgcaaaatactattttataatataaactatattatttacatggtgaagtttgaaatagaagatcgagatgagtaagttgctggaattagcctaagg

SEQ ID NO: 81566 - DNA, 6533 bp, Zea Mays
ttgacttattcaattttgactctcgtcggctccggtatttcgacttccaaaatagccctaacatttaccgaagctcctcccgccggcgcgctgcgatccaactccgagatgctcgcaccgcttccgcgcctgacgagcgcgctccgcggccactacgacgctgatcaggcctacctcctccgcaagagcgccctccaggctctcaccctccccaggccgcatgacgagtggaagttcgctcggaaaatcgtgcctggctgggacgatgcttccagcgaagtgcgtcaggcgtataaacaatttatcggggccgttgtggagttgttgagcggagaggcagtgtctgaagaactctaccaagttgcgcagactgtatatactctatttggtggcgatgacacggagtatgttggtgctaaaaaagtcctttccaaaaggaatgagttggagagccttgtgggctacactgtacaagactcagttttgaaaaagctagctcagttagctcagaagctcgattcccttcaacgagcaagtgcctatgaatctgtacacagaatagcggatgatgtaaatgaaaatgatagaattgaatttggagcagacttcgatttcaagccacttgcccgtttcattgttgatgtttctcttgacgcacccttagaaagtgctgaattgggcagtggtccatttgaaaaatggcagtatgatgcttggagcacatccacaactagtcattcaactgctgttaggggttctatagctggtgaacttttggacctggttggcgacaccgcttttgaaatagttcaagatcttcttttgcataggaaagagctagtggatgcaattcaacatggattgtcgatactgaaatctgagaaaatgacctcaggtaatcaaccaaagatgccaacttatggtacacaggtaactgtacaaacagagtctgaacgccagcttgataagattaggaggaaagaggaaagacgtagcaagcgcagtgcagacagtggcaataatgatattggtgttgatgatttttcatcccttcttttggcaagtgaacggaaggaggcatttgatgacgtgattggtagtggagaagggtcagacagttttacagtaacttcccttcctcaaggaaccacaaggaaacacatgaagggttatgaagaagtgaagattccaccaactccaacagcatcactgaaacccaatgagaagctgattgaaataaaagaattagatgagtttgcccaagctgccttccagggatacaagtcactcaatcgtgtgcagagtcgtattttccaagctacatactacaccaatgagaatattttagtttgtgccccaacaggtgctgggaaaacaaatattgcaatgattgcagttcttcatgaggttaaacagcacttcagggatggtattttacataaaaacgagtttaagatagtctatgttgctccaatgaaggccttggccgcagaggtaacagcaacattcagtcgccgattatctccattgaacctggttgttagagaacttacaggagatatgcagttgaccaaaaatgagattgaagaaactcagatgatagtgactactcctgagaagtgggatgttattacacgcaaaagcagtgacatgtcactttcaatgctggttaagctgatcatcattgatgaagtacaccttttaaatgacgatagaggttcagtaattgaggcgctagtagctcggactctccgccaggttgagtctatgcaatcaatgattcgcattgttggcctatctgctaccctgcctacctacttagaggtcgcacattttttgcgggttaatccagacactggacttttcttttttgactcaagctatcgtccagttcctcttgctcagcagtacattgggatcagtgaaagggattacacaaagagaagtgaattattcaatactttgtgttatgagaaggttgttgagtccattaagcaaggtcaccaagcattggtttttgtccatacccgtaaggatactgggaaaaccgctagaaccctgattgacctagcagcaaaagcaggggaattggaattattttcaagtgcagatcatcctcaatttccattaatcaagaaagatgttagtaaagcaaaaagtcgtgaagttgttgaattttttgaatctggatttggtatacacaatgctggaatgatgcgatctgacagaagtttgatggagcgcttgtttggtgacgggcttttgaaagtccttgtttgtacagcaactttggcttggggagtaaacttaccagctcatacagttgttataaagggcacacagctatatgatcctaaagctggtgggtggcgagacttggggatgcttgatgtgatgcagatctttggacgtgctggaaggccacagtttgataaaagtggcgaaggaattattatcacaacacatgacaaattggcttattacttgaggttattgacaagtcagcttccaatagagagccagttccttggatctctgaaagataatttaaatgctgaagttgctttgggcactgtaacaaatgtcagggaggcttgtacctggcttggctatacatacttatttataaggatgaagactaatcctctggtgtatgggataacttgggaagaggttatgggagatccttctatgggtgcaaagcaaagaacatttattattgatgctgcacgagcactggacaaagctaagatgatgcgctttgatgaaaagagtggtaacttctactgcaccgaacttggtcgaattgcaagtcatttttaccttcagtactccagtgtcgagacttacaatgagatgcttcgacgtcacatgagtgaaagtgagttgattactatggtggcccattcctctgaatttgagaatatcgtagtaagagaagaagaacaggatgaattagaagcccttgcaaggaaagcatgccctttagaaattaagggtgggccgactgacaaacatgggaaaatttcaattctcatacaggtttatatttcccgtgctccaatcgatagctcctctttacattctgatgctcaatacattagtcaaagtttggcacgcataatgagggcactatttgagatttgtctgcgtcggggatggtctgagatgtcatccttattgttgcaatattgcaaggccgtggaccgcaagatatggccccatcttcatccacttaggcagtttgataaggatctttctcctcaggtattgtggaaactcgaggaaagaaatgttgatctggatcatctttatgagatggaggaaaatgaaattggagctctgatccggttttctcatcagggaaagttggtcaagcaatacgttggatacttcccgtatgtcaacctatctgcaaccgtgagcccaatcactaggacagttcttaaagtggacctgcatataactcctgaatttgtgtggaaagatcgttatcatggcatgtcagaacgatggtggatcattgttgaggattctgaaaatgataccatttatcattcagagctattcacattaacgaagaagatggcaagaggaacacctacaaagatatcttttaatgtaccaatatttgaacctcatccgccacagtactatatacatgccatctcagactcatggctacatgctgaaacactcttcactgtttcttttcataatttgacattgccacagacacaaataacacacacagaactcttggacttgaagcctcttccactgagtgctcttggcaacaaaacgtatgaggatctgtacagattttcccatttcaacccgatacaaactcaggcttttcatgttctttatcacactgataacaatgtactcttgggagctccaactgggagtggcaaaacaatttcggcagaacttgcaatgctccatcttttcagtacacaaccagacatgaaggtagtttacattgctcctctaaaggcaatagtacgagaaagaatgaatgattggagaaaacgtcttgtaattcagcttgggaagaagatggttgagatgactggtgacttcactccagatttgatggccctattgtcagctgacatcatcatttctacccctgaaaaatgggatgggattagtcgaaattggcatagcagaagttacgttatgaaggtcgggctcatgatattggatgagatacatcttctgggagctgaccgtggacccatccttgaggtcattgtatcaagaatgcgatacatatcatcacaaacagaacgttcaattcggtttgttggtttatcaacggcattagcaaatgctcgtgatttagctgattggttgggcgttacagatgacggtctattcaatttcaagcctagtgtgagacctgtacctcttgaagtgcatatccagggatatcctgggaaattctattgtccaagaatgaatagcatgaacaaaccagcttatgcagccatatgcactcattcacccaataaaccagttctcatttttgtgtcatcacgtcgacagacaagacttacagctcttgatatcattcagcttgcagcatcagatgaaaaaccaaggcagttcctgagcattgaagacaactccctagacatggttctttcacaggtttctgacagtaatttgaggcatactctgcaatttggcataggtctgcatcatgctggtttaaatgacagagacagatccttggttgaggagcttttttcaaacaataagattcaggtgctggtatgtaccagcacattggcgtggggtgtcaatcttccagctcacctggtcataatcaagggcactgaatactatgatgggaaaacaaaaagatacatagattatgatatcacagatattctgcagatgatgggtcgtgcaggtcggccgcaatacgaccaacatggcaaagctgttattcttgtccatgaaccaaaaaagagcttttacaagaagaaattgtttctggcaccatcagcaacaaggaggaggcgattatttatctcacctggacttacctatatcgcagattggttgttaatccggcctattatggattggaggatactgaaacaaacacattgaattcttatctatcaaggttagtcgaaactacatttgaagatcttgaggacagtggatgcataaaagtggatgaccactctgtaaagtacttgattttggggaaaatagcttcacagtattacctgagctacctcactgtttcaatgtttgggtcaaatattggccccaacacaacgttggaagtctttctacacatactgtcagctgcatcagaatttgatgagcttcctgtacggcacaatgaggacaatttgaatcgaatactcagcggaaatgtcccgtatccagttgatcaacaccaccttgatgatccacatgttaaagccaacttactctttcaggcacatttctccagagcagaattgccaataagcgactatgtcactgacttgaaatcagttcttgatcagagcatacgcatcatacaggcaatgattgatgtatgcgcgaatagtggatggcttacgagtgcattgacttgcatgcatctcttgcagatgatcatacagggtctctggtttgagagagattatgaatccctctggatgttgccatccatgaatgatgatatattagaccatctcaagagtagaggagtctcaacagtcccctccttactagatctttcccgtgaagaattgcgtagggtacttcaaccattttctgcgtcagagttgtatcaggatctgcaacatttccctcatgttgatgtgaaagttaagcttcataatgaacaggagcgatccaaacctccaactttaaacatcaggttgcaattgaaaaattcgcgacggtcagcatcaagagcatttgcccctagatttcccaaggcaaaacaagaagcttggtggcttgtcctggggaatgctacaagttcagagctgtatggtctgaaaagaattagttttgcagatcgggtgattaatactcgcatggaattgccacagacgttcaatgtgcaggagacgaagctgatcttggtgtcggattgctacctaggttttgacttggagtattctcttgagcatctcaccaagggttgagtgctttattcagagctgtttgggctgtttcattttgtatgggttcagcaaccagctcatcctagattgatcctgtaatcacgagacatgagttcattccatgaatttttgtttgtatgactacatccctcgtgttcatggttatattatatttaatagctatatatacgagtggataggtttataactttcatgaaatatcttttccgtaagcatagtagatgtttgagctctaaggttatgaccaacaaattgtgtatatggtcgtgcaaaatactattttataatataaactatattatttacatggtgaagtttgaaatagaagatcgagatgagtaagttgctggaattagcctaagg

SEQ ID NO: 81567 - DNA, 6600 bp, Zea Mays
ttgacttattcaattttgactctcgtcggctccggtatttcgacttccaaaatagccctaacatttaccgaagctcctcccgccggcgcgctgcgatccaactccgagatgctcgcaccgcttccgcgcctgacgagcgcgctccgcggccactacgacgctgatcaggcctacctcctccgcaagagcgccctccaggctctcaccctccccaggccgcatgacgagtggaagttcgctcggaaaatcgtgcctggctgggacgatgcttccagcgaagtgcgtcaggcgtataaacaatttatcggggccgttgtggagttgttgagcggagaggcagtgtctgaagaactctaccaagttgcgcagactgtatatactctatttggtggcgatgacacggagtatgttggtgctaaaaaagtcctttccaaaaggaatgagttggagagccttgtgggctacactgtacaagactcagttttgaaaaagctagctcagttagctcagaagctcgattcccttcaacgagcaagtgcctatgaatctgtacacagaatagcggatgatgtaaatgaaaatgatagaattgaatttggagcagacttcgatttcaagccacttgcccgtttcattgttgatgtttctcttgacgcacccttagaaagtgctgaattgggcagtggtccatttgaaaaatggcagtatgatgcttggagcacatccacaactagtcattcaactgctgttaggggttctatagctggtgaacttttggacctggttggcgacaccgcttttgaaatagttcaagatcttcttttgcataggaaagagctagtggatgcaattcaacatggattgtcgatactgaaatctgagaaaatgacctcaggtaatcaaccaaagatgccaacttatggtacacaggtaactgtacaaacagagtctgaacgccagcttgataagattaggaggaaagaggaaagacgtagcaagcgcagtgcagacagtggcaataatgatattggtgttgatgatttttcatcccttcttttggcaagtgaacggaaggaggcatttgatgacgtgattggtagtggagaagggtcagacagttttacagtaacttcccttcctcaaggaaccacaaggaaacacatgaagggttatgaagaagtgaagattccaccaactccaacagcatcactgaaacccaatgagaagctgattgaaataaaagaattagatgagtttgcccaagctgccttccagggatacaagtcactcaatcgtgtgcagagtcgtattttccaagctacatactacaccaatgagaatattttagtttgtgccccaacaggtgctgggaaaacaaatattgcaatgattgcagttcttcatgaggttaaacagcacttcagggatggtattttacataaaaacgagtttaagatagtctatgttgctccaatgaaggccttggccgcagaggtaacagcaacattcagtcgccgattatctccattgaacctggttgttagagaacttacaggagatatgcagttgaccaaaaatgagattgaagaaactcagatgatagtgactactcctgagaagtgggatgttattacacgcaaaagcagtgacatgtcactttcaatgctggttaagctgatcatcattgatgaagtacaccttttaaatgacgatagaggttcagtaattgaggcgctagtagctcggactctccgccaggttgagtctatgcaatcaatgattcgcattgttggcctatctgctaccctgcctacctacttagaggtcgcacattttttgcgggttaatccagacactggacttttcttttttgactcaagctatcgtccagttcctcttgctcagcagtacattgggatcagtgaaagggattacacaaagagaagtgaattattcaatactttgtgttatgagaaggttgttgagtccattaagcaaggtcaccaagcattggtttttgtccatacccgtaaggatactgggaaaaccgctagaaccctgattgacctagcagcaaaagcaggggaattggaattattttcaagtgcagatcatcctcaatttccattaatcaagaaagatgttagtaaagcaaaaagtcgtgaagttgttgaattttttgaatctggatttggtatacacaatgctggaatgatgcgatctgacagaagtttgatggagcgcttgtttggtgacgggcttttgaaagtccttgtttgtacagcaactttggcttggggagtaaacttaccagctcatacagttgttataaagggcacacagctatatgatcctaaagctggtgggtggcgagacttggggatgcttgatgtgatgcagatctttggacgtgctggaaggccacagtttgataaaagtggcgaaggaattattatcacaacacatgacaaattggcttattacttgaggttattgacaagtcagcttccaatagagagccagttccttggatctctgaaagataatttaaatgctgaagttgctttgggcactgtaacaaatgtcagggaggcttgtacctggcttggctatacatacttatttataaggatgaagactaatcctctggtgtatgggataacttgggaagaggttatgggagatccttctatgggtgcaaagcaaagaacatttattattgatgctgcacgagcactggacaaagctaagatgatgcgctttgatgaaaagagtggtaacttctactgcaccgaacttggtcgaattgcaagtcatttttaccttcagtactccagtgtcgagacttacaatgagatgcttcgacgtcacatgagtgaaagtgagttgattactatggtggcccattcctctgaatttgagaatatcgtagtaagagaagaagaacaggatgaattagaagcccttgcaaggaaagcatgccctttagaaattaagggtgggccgactgacaaacatgggaaaatttcaattctcatacaggtttatatttcccgtgctccaatcgatagctcctctttacattctgatgctcaatacattagtcaaagtttggcacgcataatgagggcactatttgagatttgtctgcgtcggggatggtctgagatgtcatccttattgttgcaatattgcaaggccgtggaccgcaagatatggccccatcttcatccacttaggcagtttgataaggatctttctcctcaggtattgtggaaactcgaggaaagaaatgttgatctggatcatctttatgagatggaggaaaatgaaattggagctctgatccggttttctcatcagggaaagttggtcaagcaatacgttggatacttcccgtatgtcaacctatctgcaaccgtgagcccaatcactaggacagttcttaaagtggacctgcatataactcctgaatttgtgtggaaagatcgttatcatggcatgtcagaacgatggtggatcattgttgaggattctgaaaatgataccatttatcattcagagctattcacattaacgaagaagatggcaagaggaacacctacaaagatatcttttaatgtaccaatatttgaacctcatccgccacagtactatatacatgccatctcagactcatggctacatgctgaaacactcttcactgtttcttttcataatttgacattgccacagacacaaataacacacacagaactcttggacttgaagcctcttccactgagtgctcttggcaacaaaacgtatgaggatctgtacagattttcccatttcaacccgatacaaactcaggcttttcatgttctttatcacactgataacaatgtactcttgggagctccaactgggagtggcaaaacaatttcggcagaacttgcaatgctccatcttttcagtacacaaccagacatgaaggtagtttacattgctcctctaaaggcaatagtacgagaaagaatgaatgattggagaaaacgtcttgtaattcagcttgggaagaagatggttgagatgactggtgacttcactccagatttgatggccctattgtcagctgacatcatcatttctacccctgaaaaatgggatgggattagtcgaaattggcatagcagaagttacgttatgaaggtcgggctcatgatattggatgagatacatcttctgggagctgaccgtggacccatccttgaggtcattgtatcaagaatgcgatacatatcatcacaaacagaacgttcaattcggtttgttggtttatcaacggcattagcaaatgctcgtgatttagctgattggttgggcgttacagatgacggtctattcaatttcaagcctagtgtgagacctgtacctcttgaagtgcatatccagggatatcctgggaaattctattgtccaagaatgaatagcatgaacaaaccagcttatgcagccatatgcactcattcacccaataaaccagttctcatttttgtgtcatcacgtcgacagacaagacttacagctcttgatatcattcagcttgcagcatcagatgaaaaaccaaggcagttcctgagcattgaagacaactccctagacatggttctttcacaggtttctgacagtaatttgaggcatactctgcaatttggcataggtctgcatcatgctggtttaaatgacagagacagatccttggttgaggagcttttttcaaacaataagattcaggtgctggtatgtaccagcacattggcgtggggtgtcaatcttccagctcacctggtcataatcaagggcactgaatactatgatgggaaaacaaaaagatacatagattatgatatcacagatattctgcagatgatgggtcgtgcaggtcggccgcaatacgaccaacatggcaaagctgttattcttgtccatgaaccaaaaaagagcttttacaagaagttcctctacgaaccgtttcctgtggaaagtaatctgagggagcacttgcatgaccacataaatgcagaaattgtttctggcaccatcagcaacaaggaggaggcgattatttatctcacctggacttacctatatcgcagattggttgttaatccggcctattatggattggaggatactgaaacaaacacattgaattcttatctatcaaggttagtcgaaactacatttgaagatcttgaggacagtggatgcataaaagtggatgaccactctgtaaagtacttgattttggggaaaatagcttcacagtattacctgagctacctcactgtttcaatgtttgggtcaaatattggccccaacacaacgttggaagtctttctacacatactgtcagctgcatcagaatttgatgagcttcctgtacggcacaatgaggacaatttgaatcgaatactcagcggaaatgtcccgtatccagttgatcaacaccaccttgatgatccacatgttaaagccaacttactctttcaggcacatttctccagagcagaattgccaataagcgactatgtcactgacttgaaatcagttcttgatcagagcatacgcatcatacaggcaatgattgatgtatgcgcgaatagtggatggcttacgagtgcattgacttgcatgcatctcttgcagatgatcatacagggtctctggtttgagagagattatgaatccctctggatgttgccatccatgaatgatgatatattagaccatctcaagagtagaggagtctcaacagtcccctccttactagatctttcccgtgaagaattgcgtagggtacttcaaccattttctgcgtcagagttgtatcaggatctgcaacatttccctcatgttgatgtgaaagttaagcttcataatgaacaggagcgatccaaacctccaactttaaacatcaggttgcaattgaaaaattcgcgacggtcagcatcaagagcatttgcccctagatttcccaaggcaaaacaagaagcttggtggcttgtcctggggaatgctacaagttcagagctgtatggtctgaaaagaattagttttgcagatcgggtgattaatactcgcatggaattgccacagacgttcaatgtgcaggagacgaagctgatcttggtgtcggattgctacctaggttttgacttggagtattctcttgagcatctcaccaagggttgagtgctttattcagagctgtttgggctgtttcattttgtatgggttcagcaaccagctcatcctagattgatcctgtaatcacgagacatgagttcattccatgaatttttgtttgtatgactacatccctcgtgttcatggttatattatatttaatagctatatatacgagtggataggtttataactttcatgaaatatcttttccgtaagcatagtagatgtttgagctctaaggttatgaccaacaaattgtgtatatggtcgtgcaaaatactattttataatataaactatattatttacatggtgaagtttgaaatagaagatcgagatgagtaagttgctggaattagcctaagg

SEQ ID NO: 81568 - DNA, 6645 bp, Zea Mays
ttgacttattcaattttgactctcgtcggctccggtatttcgacttccaaaatagccctaacatttaccgaagctcctcccgccggcgcgctgcgatccaactccgagatgctcgcaccgcttccgcgcctgacgagcgcgctccgcggccactacgacgctgatcaggcctacctcctccgcaagagcgccctccaggctctcaccctccccaggccgcatgacgagtggaagttcgctcggaaaatcgtgcctggctgggacgatgcttccagcgaagtgcgtcaggcgtataaacaatttatcggggccgttgtggagttgttgagcggagaggcagtgtctgaagaactctaccaagttgcgcagactgtatatactctatttggtggcgatgacacggagtatgttggtgctaaaaaagtcctttccaaaaggaatgagttggagagccttgtgggctacactgtacaagactcagttttgaaaaagctagctcagttagctcagaagctcgattcccttcaacgagcaagtgcctatgaatctgtacacagaatagcggatgatgtaaatgaaaatgatagaattgaatttggagcagacttcgatttcaagccacttgcccgtttcattgttgatgtttctcttgacgcacccttagaaagtgctgaattgggcagtggtccatttgaaaaatggcagtatgatgcttggagcacatccacaactagtcattcaactgctgttaggggttctatagctggtgaacttttggacctggttggcgacaccgcttttgaaatagttcaagatcttcttttgaggacttcagacttcaactctgatcctttgttgctttggttcattagtttgcatgcttccgcttttatcatgataagaatccaaggaactacagttaacctggaattatatttgaggcataggaaagagctagtggatgcaattcaacatggattgtcgatactgaaatctgagaaaatgacctcaggtaatcaaccaaagatgccaacttatggtacacaggtaactgtacaaacagagtctgaacgccagcttgataagattaggaggaaagaggaaagacgtagcaagcgcagtgcagacagtggcaataatgatattggtgttgatgatttttcatcccttcttttggcaagtgaacggaaggaggcatttgatgacgtgattggtagtggagaagggtcagacagttttacagtaacttcccttcctcaaggaaccacaaggaaacacatgaagggttatgaagaagtgaagattccaccaactccaacagcatcactgaaacccaatgagaagctgattgaaataaaagaattagatgagtttgcccaagctgccttccagggatacaagtcactcaatcgtgtgcagagtcgtattttccaagctacatactacaccaatgagaatattttagtttgtgccccaacaggtgctgggaaaacaaatattgcaatgattgcagttcttcatgaggttaaacagcacttcagggatggtattttacataaaaacgagtttaagatagtctatgttgctccaatgaaggccttggccgcagaggtaacagcaacattcagtcgccgattatctccattgaacctggttgttagagaacttacaggagatatgcagttgaccaaaaatgagattgaagaaactcagatgatagtgactactcctgagaagtgggatgttattacacgcaaaagcagtgacatgtcactttcaatgctggttaagctgatcatcattgatgaagtacaccttttaaatgacgatagaggttcagtaattgaggcgctagtagctcggactctccgccaggttgagtctatgcaatcaatgattcgcattgttggcctatctgctaccctgcctacctacttagaggtcgcacattttttgcgggttaatccagacactggacttttcttttttgactcaagctatcgtccagttcctcttgctcagcagtacattgggatcagtgaaagggattacacaaagagaagtgaattattcaatactttgtgttatgagaaggtcttttctctatgaatagcatggttctcttgatttctgtatctgtaccttcgtattactcttacatcaaattgataggttgttgagtccattaagcaaggtcaccaagcattggtttttgtccatacccgtaaggatactgggaaaaccgctagaaccctgattgacctagcagcaaaagcaggggaattggaattattttcaagtgcagatcatcctcaatttccattaatcaagaaagatgttagtaaagcaaaaagtcgtgaagttgttgaattttttgaatctggatttggtatacacaatgctggaatgatgcgatctgacagaagtttgatggagcgcttgtttggtgacgggcttttgaaagtccttgtttgtacagcaactttggcttggggagtaaacttaccagctcatacagttgttataaagggcacacagctatatgatcctaaagctggtgggtggcgagacttggggatgcttgatgtgatgcagatctttggacgtgctggaaggccacagtttgataaaagtggcgaaggaattattatcacaacacatgacaaattggcttattacttgaggttattgacaagtcagcttccaatagagagccagttccttggatctctgaaagataatttaaatgctgaagttgctttgggcactgtaacaaatgtcagggaggcttgtacctggcttggctatacatacttatttataaggatgaagactaatcctctggtgtatgggataacttgggaagaggttatgggagatccttctatgggtgcaaagcaaagaacatttattattgatgctgcacgagcactggacaaagctaagatgatgcgctttgatgaaaagagtggtaacttctactgcaccgaacttggtcgaattgcaagtcatttttaccttcagtactccagtgtcgagacttacaatgagatgcttcgacgtcacatgagtgaaagtgagttgattactatggtggcccattcctctgaatttgagaatatcgtagtaagagaagaagaacaggatgaattagaagcccttgcaaggaaagcatgccctttagaaattaagggtgggccgactgacaaacatgggaaaatttcaattctcatacaggtttatatttcccgtgctccaatcgatagctcctctttacattctgatgctcaatacattagtcaaagtttggcacgcataatgagggcactatttgagatttgtctgcgtcggggatggtctgagatgtcatccttattgttgcaatattgcaaggccgtggaccgcaagatatggccccatcttcatccacttaggcagtttgataaggatctttctcctcaggtattgtggaaactcgaggaaagaaatgttgatctggatcatctttatgagatggaggaaaatgaaattggagctctgatccggttttctcatcagggaaagttggtcaagcaatacgttggatacttcccgtatgtcaacctatctgcaaccgtgagcccaatcactaggacagttcttaaagtggacctgcatataactcctgaatttgtgtggaaagatcgttatcatggcatgtcagaacgatggtggatcattgttgaggattctgaaaatgataccatttatcattcagagctattcacattaacgaagaagatggcaagaggaacacctacaaagatatcttttaatgtaccaatatttgaacctcatccgccacagtactatatacatgccatctcagactcatggctacatgctgaaacactcttcactgtttcttttcataatttgacattgccacagacacaaataacacacacagaactcttggacttgaagcctcttccactgagtgctcttggcaacaaaacgtatgaggatctgtacagattttcccatttcaacccgatacaaactcaggcttttcatgttctttatcacactgataacaatgtactcttgggagctccaactgggagtggcaaaacaatttcggcagaacttgcaatgctccatcttttcagtacacaaccagacatgaaggtagtttacattgctcctctaaaggcaatagtacgagaaagaatgaatgattggagaaaacgtcttgtaattcagcttgggaagaagatggttgagatgactggtgacttcactccagatttgatggccctattgtcagctgacatcatcatttctacccctgaaaaatgggatgggattagtcgaaattggcatagcagaagttacgttatgaaggtcgggctcatgatattggatgagatacatcttctgggagctgaccgtggacccatccttgaggtcattgtatcaagaatgcgatacatatcatcacaaacagaacgttcaattcggtttgttggtttatcaacggcattagcaaatgctcgtgatttagctgattggttgggcgttacagatgacggtctattcaatttcaagcctagtgtgagacctgtacctcttgaagtgcatatccagcttgcagcatcagatgaaaaaccaaggcagttcctgagcattgaagacaactccctagacatggttctttcacaggtttctgacagtaatttgaggcatactctgcaatttggcataggtctgcatcatgctggtttaaatgacagagacagatccttggttgaggagcttttttcaaacaataagattcaggtgctggtatgtaccagcacattggcgtggggtgtcaatcttccagctcacctggtcataatcaagggcactgaatactatgatgggaaaacaaaaagatacatagattatgatatcacagatattctgcagatgatgggtcgtgcaggtcggccgcaatacgaccaacatggcaaagctgttattcttgtccatgaaccaaaaaagagcttttacaagaagttcctctacgaaccgtttcctgtggaaagtaatctgagggagcacttgcatgaccacataaatgcagaaattgtttctggcaccatcagcaacaaggaggaggcgattatttatctcacctggacttacctatatcgcagattggttgttaatccggcctattatggattggaggatactgaaacaaacacattgaattcttatctatcaaggttagtcgaaactacatttgaagatcttgaggacagtggatgcataaaagtggatgaccactctgtaaagtacttgattttggggaaaatagcttcacagtattacctgagctacctcactgtttcaatgtttgggtcaaatattggccccaacacaacgttggaagtctttctacacatactgtcagctgcatcagaatttgatgagcttcctgtacggcacaatgaggacaatttgaatcgaatactcagcggaaatgtcccgtatccagttgatcaacaccaccttgatgatccacatgttaaagccaacttactctttcaggcacatttctccagagcagaattgccaataagcgactatgtcactgacttgaaatcagttcttgatcagagcatacgcatcatacaggcaatgattgatgtatgcgcgaatagtggatggcttacgagtgcattgacttgcatgcatctcttgcagatgatcatacagggtctctggtttgagagagattatgaatccctctggatgttgccatccatgaatgatgatatattagaccatctcaagagtagaggagtctcaacagtcccctccttactagatctttcccgtgaagaattgcgtagggtacttcaaccattttctgcgtcagagttgtatcaggatctgcaacatttccctcatgttgatgtgaaagttaagcttcataatgaacaggagcgatccaaacctccaactttaaacatcaggttgcaattgaaaaattcgcgacggtcagcatcaagagcatttgcccctagatttcccaaggcaaaacaagaagcttggtggcttgtcctggggaatgctacaagttcagagctgtatggtctgaaaagaattagttttgcagatcgggtgattaatactcgcatggaattgccacagacgttcaatgtgcaggagacgaagctgatcttggtgtcggattgctacctaggttttgacttggagtattctcttgagcatctcaccaagggttgagtgctttattcagagctgtttgggctgtttcattttgtatgggttcagcaaccagctcatcctagattgatcctgtaatcacgagacatgagttcattccatgaatttttgtttgtatgactacatccctcgtgttcatggttatattatatttaatagctatatatacgagtggataggtttataactttcatgaaatatcttttccgtaagcatagtagatgtttgagctctaaggttatgaccaacaaattgtgtatatggtcgtgcaaaatactattttataatataaactatattatttacatggtgaagtttgaaatagaagatcgagatgagtaagttgctggaattagcctaagg

SEQ ID NO: 81569 - DNA, 6584 bp, Zea Mays
ttgacttattcaattttgactctcgtcggctccggtatttcgacttccaaaatagccctaacatttaccgaagctcctcccgccggcgcgctgcgatccaactccgagatgctcgcaccgcttccgcgcctgacgagcgcgctccgcggccactacgacgctgatcaggcctacctcctccgcaagagcgccctccaggctctcaccctccccaggccgcatgacgagtggaagttcgctcggaaaatcgtgcctggctgggacgatgcttccagcgaagtgcgtcaggcgtataaacaatttatcggggccgttgtggagttgttgagcggagaggcagtgtctgaagaactctaccaagttgcgcagactgtatatactctatttggtggcgatgacacggagtatgttggtgctaaaaaagtcctttccaaaaggaatgagttggagagccttgtgggctacactgtacaagactcagttttgaaaaagctagctcagttagctcagaagctcgattcccttcaacgagcaagtgcctatgaatctgtacacagaatagcggatgatgtaaatgaaaatgatagaattgaatttggagcagacttcgatttcaagccacttgcccgtttcattgttgatgtttctcttgacgcacccttagaaagtgctgaattgggcagtggtccatttgaaaaatggcagtatgatgcttggagcacatccacaactagtcattcaactgctgttaggggttctatagctggtgaacttttggacctggttggcgacaccgcttttgaaatagttcaagatcttcttttgcataggaaagagctagtggatgcaattcaacatggattgtcgatactgaaatctgagaaaatgacctcaggtaatcaaccaaagatgccaacttatggtacacaggtaactgtacaaacagagtctgaacgccagcttgataagattaggaggaaagaggaaagacgtagcaagcgcagtgcagacagtggcaataatgatattggtgttgatgatttttcatcccttcttttggcaagtgaacggaaggaggcatttgatgacgtgattggtagtggagaagggtcagacagttttacagtaacttcccttcctcaaggaaccacaaggaaacacatgaagggttatgaagaagtgaagattccaccaactccaacagcatcactgaaacccaatgagaagctgattgaaataaaagaattagatgagtttgcccaagctgccttccagggatacaagtcactcaatcgtgtgcagagtcgtattttccaagctacatactacaccaatgagaatattttagtttgtgccccaacaggtgctgggaaaacaaatattgcaatgattgcagttcttcatgaggttaaacagcacttcagggatggtattttacataaaaacgagtttaagatagtctatgttgctccaatgaaggccttggccgcagaggtaacagcaacattcagtcgccgattatctccattgaacctggttgttagagaacttacaggagatatgcagttgaccaaaaatgagattgaagaaactcagatgatagtgactactcctgagaagtgggatgttattacacgcaaaagcagtgacatgtcactttcaatgctggttaagctgatcatcattgatgaagtacaccttttaaatgacgatagaggttcagtaattgaggcgctagtagctcggactctccgccaggttgagtctatgcaatcaatgattcgcattgttggcctatctgctaccctgcctacctacttagaggtcgcacattttttgcgggttaatccagacactggacttttcttttttgactcaagctatcgtccagttcctcttgctcagcagtacattgggatcagtgaaagggattacacaaagagaagtgaattattcaatactttgtgttatgagaaggttgttgagtccattaagcaaggtcaccaagcattggtttttgtccatacccgtaaggatactgggaaaaccgctagaaccctgattgacctagcagcaaaagcaggggaattggaattattttcaagtgcagatcatcctcaatttccattaatcaagaaagatgttagtaaagcaaaaagtcgtgaagttgttgaattttttgaatctggatttggtatacacaatgctggaatgatgcgatctgacagaagtttgatggagcgcttgtttggtgacgggcttttgaaacaactttggcttggggagtaaacttaccagctcatacagttgttataaagggcacacagctatatgatcctaaagctggtgggtggcgagacttggggatgcttgatgtgatgcagatctttggacgtgctggaaggccacagtttgataaaagtggcgaaggaattattatcacaacacatgacaaattggcttattacttgaggttattgacaagtcagcttccaatagagagccagttccttggatctctgaaagataatttaaatgctgaagttgctttgggcactgtaacaaatgtcagggaggcttgtacctggcttggctatacatacttatttataaggatgaagactaatcctctggtgtatgggataacttgggaagaggttatgggagatccttctatgggtgcaaagcaaagaacatttattattgatgctgcacgagcactggacaaagctaagatgatgcgctttgatgaaaagagtggtaacttctactgcaccgaacttggtcgaattgcaagtcatttttaccttcagtactccagtgtcgagacttacaatgagatgcttcgacgtcacatgagtgaaagtgagttgattactatggtggcccattcctctgaatttgagaatatcgtagtaagagaagaagaacaggatgaattagaagcccttgcaaggaaagcatgccctttagaaattaagggtgggccgactgacaaacatgggaaaatttcaattctcatacaggtttatatttcccgtgctccaatcgatagctcctctttacattctgatgctcaatacattagtcaaagtttggcacgcataatgagggcactatttgagatttgtctgcgtcggggatggtctgagatgtcatccttattgttgcaatattgcaaggccgtggaccgcaagatatggccccatcttcatccacttaggcagtttgataaggatctttctcctcaggtattgtggaaactcgaggaaagaaatgttgatctggatcatctttatgagatggaggaaaatgaaattggagctctgatccggttttctcatcagggaaagttggtcaagcaatacgttggatacttcccgtatgtcaacctatctgcaaccgtgagcccaatcactaggacagttcttaaagtggacctgcatataactcctgaatttgtgtggaaagatcgttatcatggcatgtcagaacgatggtggatcattgttgaggattctgaaaatgataccatttatcattcagagctattcacattaacgaagaagatggcaagaggaacacctacaaagatatcttttaatgtaccaatatttgaacctcatccgccacagtactatatacatgccatctcagactcatggctacatgctgaaacactcttcactgtttcttttcataatttgacattgccacagacacaaataacacacacagaactcttggacttgaagcctcttccactgagtgctcttggcaacaaaacgtatgaggatctgtacagattttcccatttcaacccgatacaaactcaggcttttcatgttctttatcacactgataacaatgtactcttgggagctccaactgggagtggcaaaacaatttcggcagaacttgcaatgctccatcttttcagtacacaaccagacatgaaggtagtttacattgctcctctaaaggcaatagtacgagaaagaatgaatgattggagaaaacgtcttgtaattcagcttgggaagaagatggttgagatgactggtgacttcactccagatttgatggccctattgtcagctgacatcatcatttctacccctgaaaaatgggatgggattagtcgaaattggcatagcagaagttacgttatgaaggtcgggctcatgatattggatgagatacatcttctgggagctgaccgtggacccatccttgaggtcattgtatcaagaatgcgatacatatcatcacaaacagaacgttcaattcggtttgttggtttatcaacggcattagcaaatgctcgtgatttagctgattggttgggcgttacagatgacggtctattcaatttcaagcctagtgtgagacctgtacctcttgaagtgcatatccagggatatcctgggaaattctattgtccaagaatgaatagcatgaacaaaccagcttatgcagccatatgcactcattcacccaataaaccagttctcatttttgtgtcatcacgtcgacagacaagacttacagctcttgatatcattcagcttgcagcatcagatgaaaaaccaaggcagttcctgagcattgaagacaactccctagacatggttctttcacaggtttctgacagtaatttgaggcatactctgcaatttggcataggtctgcatcatgctggtttaaatgacagagacagatccttggttgaggagcttttttcaaacaataagattcaggtgctggtatgtaccagcacattggcgtggggtgtcaatcttccagctcacctggtcataatcaagggcactgaatactatgatgggaaaacaaaaagatacatagattatgatatcacagatattctgcagatgatgggtcgtgcaggtcggccgcaatacgaccaacatggcaaagctgttattcttgtccatgaaccaaaaaagagcttttacaagaagttcctctacgaaccgtttcctgtggaaagtaatctgagggagcacttgcatgaccacataaatgcagaaattgtttctggcaccatcagcaacaaggaggaggcgattatttatctcacctggacttacctatatcgcagattggttgttaatccggcctattatggattggaggatactgaaacaaacacattgaattcttatctatcaaggttagtcgaaactacatttgaagatcttgaggacagtggatgcataaaagtggatgaccactctgtaaagtacttgattttggggaaaatagcttcacagtattacctgagctacctcactgtttcaatgtttgggtcaaatattggccccaacacaacgttggaagtctttctacacatactgtcagctgcatcagaatttgatgagcttcctgtacggcacaatgaggacaatttgaatcgaatactcagcggaaatgtcccgtatccagttgatcaacaccaccttgatgatccacatgttaaagccaacttactctttcaggcacatttctccagagcagaattgccaataagcgactatgtcactgacttgaaatcagttcttgatcagagcatacgcatcatacaggcaatgattgatgtatgcgcgaatagtggatggcttacgagtgcattgacttgcatgcatctcttgcagatgatcatacagggtctctggtttgagagagattatgaatccctctggatgttgccatccatgaatgatgatatattagaccatctcaagagtagaggagtctcaacagtcccctccttactagatctttcccgtgaagaattgcgtagggtacttcaaccattttctgcgtcagagttgtatcaggatctgcaacatttccctcatgttgatgtgaaagttaagcttcataatgaacaggagcgatccaaacctccaactttaaacatcaggttgcaattgaaaaattcgcgacggtcagcatcaagagcatttgcccctagatttcccaaggcaaaacaagaagcttggtggcttgtcctggggaatgctacaagttcagagctgtatggtctgaaaagaattagttttgcagatcgggtgattaatactcgcatggaattgccacagacgttcaatgtgcaggagacgaagctgatcttggtgtcggattgctacctaggttttgacttggagtattctcttgagcatctcaccaagggttgagtgctttattcagagctgtttgggctgtttcattttgtatgggttcagcaaccagctcatcctagattgatcctgtaatcacgagacatgagttcattccatgaatttttgtttgtatgactacatccctcgtgttcatggttatattatatttaatagctatatatacgagtggataggtttataactttcatgaaatatcttttccgtaagcatagtagatgtttgagctctaaggttatgaccaacaaattgtgtatatggtcgtgcaaaatactattttataatataaactatattatttacatggtgaagtttgaaatagaagatcgagatgagtaagttgctggaattagcctaagg

SEQ ID NO: 81570 - DNA, 6727 bp, Zea Mays
gacttattcaattttgactctcgtcggctccggtatttcgacttccaaaatagccctaacatttaccgaagctcctcccgccggcgcgctgcgatccaactccgagatgctcgcaccgcttccgcgcctgacgagcgcgctccgcggccactacgacgctgatcaggcctacctcctccgcaagagcgccctccaggctctcaccctccccaggccgcatgacgagtggaagttcgctcggaaaatcgtgcctggctgggacgatgcttccagcgaagtgcgtcaggcgtataaacaatttatcggggccgttgtggagttgttgagcggagaggcagtgtctgaagaactctaccaagttgcgcagactgtatatactctatttggtggcgatgacacggagtatgttggtgctaaaaaagtcctttccaaaaggaatgagttggagagccttgtgggctacactgtacaagactcagttttgaaaaagctagctcagttagctcagaagctcgattcccttcaacgagcaagtgcctatgaatctgtacacagaatagcggatgatgtaaatgaaaatgatagaattgaatttggagcagacttcgatttcaagccacttgcccgtttcattgttgatgtttctcttgacgcacccttagaaagtgctgaattgggcagtggtccatttgaaaaatggcagtatgatgcttggagcacatccacaactagtcattcaactgctgttaggggttctgtgagtttgaggtggctgaaagatcagtgtgctttgataactaaaagtggtggctcaatgctctcaggagatgaacttgcaatgaccttgtgcagagtgctcctatcaaataaagcaggcgatcagatagctggtgaacttttggacctggttggcgacaccgcttttgaaatagttcaagatcttcttttgcataggaaagagctagtggatgcaattcaacatggattgtcgatactgaaatctgagaaaatgacctcaggtaatcaaccaaagatgccaacttatggtacacaggtaactgtacaaacagagtctgaacgccagcttgataagattaggaggaaagaggaaagacgtagcaagcgcagtgcagacagtggcaataatgatattggtgttgatgatttttcatcccttcttttggcaagtgaacggaaggaggcatttgatgacgtgattggtagtggagaagggtcagacagttttacagtaacttcccttcctcaaggaaccacaaggaaacacatgaagggttatgaagaagtgaagattccaccaactccaacagcatcactgaaacccaatgagaagctgattgaaataaaagaattagatgagtttgcccaagctgccttccagggatacaagtcactcaatcgtgtgcagagtcgtattttccaagctacatactacaccaatgagaatattttagtttgtgccccaacaggtgctgggaaaacaaatattgcaatgattgcagttcttcatgaggttaaacagcacttcagggatggtattttacataaaaacgagtttaagatagtctatgttgctccaatgaaggccttggccgcagaggtaacagcaacattcagtcgccgattatctccattgaacctggttgttagagaacttacaggagatatgcagttgaccaaaaatgagattgaagaaactcagatgatagtgactactcctgagaagtgggatgttattacacgcaaaagcagtgacatgtcactttcaatgctggttaagctgatcatcattgatgaagtacaccttttaaatgacgatagaggttcagtaattgaggcgctagtagctcggactctccgccaggttgagtctatgcaatcaatgattcgcattgttggcctatctgctaccctgcctacctacttagaggtcgtcgcacattttttgcgggttaatccagacactggacttttcttttttgactcaagctatcgtccagttcctcttgctcagcagtacattgggatcagtgaaagggattacacaaagagaagtgaattattcaatactttgtgttatgagaaggttgttgagtccattaagcaaggtcaccaagcattggtttttgtccatacccgtaaggatactgggaaaaccgctagaaccctgattgacctagcagcaaaagcaggggaattggaattattttcaagtgcagatcatcctcaatttccattaatcaagaaagatgttagtaaagcaaaaagtcgtgaagttgttgaattttttgaatctggatttggtatacacaatgctggaatgatgcgatctgacagaagtttgatggagcgcttgtttggtgacgggcttttgaaagtccttgtttgtacagcaactttggcttggggagtaaacttaccagctcatacagttgttataaagggcacacagctatatgatcctaaagctggtgggtggcgagacttggggatgcttgatgtgatgcagatctttggacgtgctggaaggccacagtttgataaaagtggcgaaggaattattatcacaacacatgacaaattggcttattacttgaggttattgacaagtcagcttccaatagagagccagttccttggatctctgaaagataatttaaatgctgaagttgctttgggcactgtaacaaatgtcagggaggcttgtacctggcttggctatacatacttatttataaggatgaagactaatcctctggtgtatgggataacttgggaagaggttatgggagatccttctatgggtgcaaagcaaagaacatttattattgatgctgcacgagcactggacaaagctaagatgatgcgctttgatgaaaagagtggtaacttctactgcaccgaacttggtcgaattgcaagtcatttttaccttcagtactccagtgtcgagacttacaatgagatgcttcgacgtcacatgagtgaaagtgagttgattactatggtggcccattcctctgaatttgagaatatcgtagtaagagaagaagaacaggatgaattagaagcccttgcaaggaaagcatgccctttagaaattaagggtgggccgactgacaaacatgggaaaatttcaattctcatacaggtttatatttcccgtgctccaatcgatagctcctctttacattctgatgctcaatacattagtcaaagtttggcacgcataatgagggcactatttgagatttgtctgcgtcggggatggtctgagatgtcatccttattgttgcaatattgcaaggccgtggaccgcaagatatggccccatcttcatccacttaggcagtttgataaggatctttctcctcaggtattgtggaaactcgaggaaagaaatgttgatctggatcatctttatgagatggaggaaaatgaaattggagctctgatccggttttctcatcagggaaagttggtcaagcaatacgttggatacttcccgtatgtcaacctatctgcaaccgtgagcccaatcactaggacagttcttaaagtggacctgcatataactcctgaatttgtgtggaaagatcgttatcatggcatgtcagaacgatggtggatcattgttgaggattctgaaaatgataccatttatcattcagagctattcacattaacgaagaagatggcaagaggaacacctacaaagatatcttttaatgtaccaatatttgaacctcatccgccacagtactatatacatgccatctcagactcatggctacatgctgaaacactcttcactgtttcttttcataatttgacattgccacagacacaaataacacacacagaactcttggacttgaagcctcttccactgagtgctcttggcaacaaaacgtatgaggatctgtacagattttcccatttcaacccgatacaaactcaggcttttcatgttctttatcacactgataacaatgtactcttgggagctccaactgggagtggcaaaacaatttcggcagaacttgcaatgctccatcttttcagtacacaaccagacatgaaggtagtttacattgctcctctaaaggcaatagtacgagaaagaatgaatgattggagaaaacgtcttgtaattcagcttgggaagaagatggttgagatgactggtgacttcactccagatttgatggccctattgtcagctgacatcatcatttctacccctgaaaaatgggatgggattagtcgaaattggcatagcagaagttacgttatgaaggtcgggctcatgatattggatgagatacatcttctgggagctgaccgtggacccatccttgaggtcattgtatcaagaatgcgatacatatcatcacaaacagaacgttcaattcggtttgttggtttatcaacggcattagcaaatgctcgtgatttagctgattggttgggcgttacagatgacggtctattcaatttcaagcctagtgtgagacctgtacctcttgaagtgcatatccagggatatcctgggaaattctattgtccaagaatgaatagcatgaacaaaccagcttatgcagccatatgcactcattcacccaataaaccagttctcatttttgtgtcatcacgtcgacagacaagacttacagctcttgatatcattcagcttgcagcatcagatgaaaaaccaaggcagttcctgagcattgaagacaactccctagacatggttctttcacaggtttctgacagtaatttgaggcatactctgcaatttggcataggtctgcatcatgctggtttaaatgacagagacagatccttggttgaggagcttttttcaaacaataagattcaggtgctggtatgtaccagcacattggcgtggggtgtcaatcttccagctcacctggtcataatcaagggcactgaatactatgatgggaaaacaaaaagatacatagattatgatatcacagatattctgcagatgatgggtcgtgcaggtcggccgcaatacgaccaacatggcaaagctgttattcttgtccatgaaccaaaaaagagcttttacaagaagttcctctacgaaccgtttcctgtggaaagtaatctgagggagcacttgcatgaccacataaatgcagaaattgtttctggcaccatcagcaacaaggaggaggcgattatttatctcacctggacttacctatatcgcagattggttgttaatccggcctattatggattggaggatactgaaacaaacacattgaattcttatctatcaaggttagtcgaaactacatttgaagatcttgaggacagtggatgcataaaagtggatgaccactctgtaaagtacttgattttggggaaaatagcttcacagtattacctgagctacctcactgtttcaatgtttgggtcaaatattggccccaacacaacgttggaagtctttctacacatactgtcagctgcatcagaatttgatgagcttcctgtacggcacaatgaggacaatttgaatcgaatactcagcggaaatgtcccgtatccagttgatcaacaccaccttgatgatccacatgttaaagccaacttactctttcaggcacatttctccagagcagaattgccaataagcgactatgtcactgacttgaaatcagttcttgatcagagcatacgcatcatacaggcaatgattgatgtatgcgcgaatagtggatggcttacgagtgcattgacttgcatgcatctcttgcagatgatcatacagggtctctggtttgagagagattatgaatccctctggatgttgccatccatgaatgatgatatattagaccatctcaagagtagaggagtctcaacagtcccctccttactagatctttcccgtgaagaattgcgtagggtacttcaaccattttctgcgtcagagttgtatcaggatctgcaacatttccctcatgttgatgtgaaagttaagcttcataatgaacaggagcgatccaaacctccaactttaaacatcaggttgcaattgaaaaattcgcgacggtcagcatcaagagcatttgcccctagatttcccaaggcaaaacaagaagcttggtggcttgtcctggggaatgctacaagttcagagctgtatggtctgaaaagaattagttttgcagatcgggtgattaatactcgcatggaattgccacagacgttcaatgtgcaggagacgaagctgatcttggtgtcggattgctacctaggttttgacttggagtattctcttgagcatctcaccaagggttgagtgctttattcagagctgtttgggctgtttcattttgtatgggttcagcaaccagctcatcctagattgatcctgtaatcacgagacatgagttcattccatgaatttttgtttgtatgactacatccctcgtgttcatggttatattatatttaatagctatatatacgagtggataggtttataactttcatgaaatatcttttccgtaagcatagtagatgtttgagctctaaggttatgaccaacaaattgtgtatatggtcgtgcaaaatactattttataatataaactatattatttacatggtgaagtttgaaatagaagatcgagatgagtaagttgctggaattagcctaagg

SEQ ID NO: 81571 - DNA, 2252 bp, Zea Mays
cttattcaattttgactctcgtcggctccggtatttcgacttccaaaatagccctaacatttaccgaagctcctcccgccggcgcgctgcgatccaactccgagatgctcgcaccgcttccgcgcctgacgagcgcgctccgcggccactacgacgctgatcaggcctacctcctccgcaagagcgccctccaggctctcaccctccccaggccgcatgacgagtggaagttcgctcggaaaatcgtgcctggctgggacgatgcttccagcgaagtgcgtcaggcgtataaacaatttatcggggccgttgtggagttgttgagcggagaggcagtgtctgaagaactctaccaagttgcgcagactgtatatactctatttggtggcgatgacacggagtatgttggtgctaaaaaagtcctttccaaaaggaatgagttggagagccttgtgggctacactgtacaagactcagttttgaaaaagctagctcagttagctcagaagctcgattcccttcaacgagcaagtgcctatgaatctgtacacagaatagcggatgatgtaaatgaaaatgatagaattgaatttggagcagacttcgatttcaagccacttgcccgtttcattgttgatgtttctcttgacgcacccttagaaagtgctgaattgggcagtggtccatttgaaaaatggcagtatgatgcttggagcacatccacaactagtcattcaactgctgttaggggttctgtgagtttgaggtggctgaaagatcagtgtgctttgataactaaaagtggtggctcaatgctctcaggagatgaacttgcaatgaccttgtgcagagtgctcctatcaaataaagcaggcgatcagatagctggtgaacttttggacctggttggcgacaccgcttttgaaatagttcaagatcttcttttgcataggaaagagctagtggatgcaattcaacatggattgtcgatactgaaatctgagaaaatgacctcaggtaatcaaccaaagatgccaacttatggtacacaggtaactgtacaaacagagtctgaacgccagcttgataagattaggaggaaagaggaaagacgtagcaagcgcagtgcagacagtggcaataatgatattggtgttgatgatttttcatcccttcttttggcaagtgaacggaaggaggcatttgatgacgtgattggtagtggagaagggtcagacagttttacagtaacttcccttcctcaaggaaccacaaggaaacacatgaagggttatgaagaagtgaagattccaccaactccaacagcatcactgaaacccaatgagaagctgattgaaataaaagaattagatgagtttgcccaagctgccttccagggatacaagtcactcaatcgtgtgcagagtcgtattttccaagctacatactacaccaatgagaatattttagtttgtgccccaacaggtgctgggaaaacaaatattgcaatgattgcagttcttcatgaggttaaacagcacttcagggatggtattttacataaaaacgagtttaagatagtctatgttgctccaatgaaggccttggccgcagaggtaacagcaacattcagtcgccgattatctccattgaacctggttgttagagaacttacaggagatatgcagttgaccaaaaatgagattgaagaaactcagatgatagtgactactcctgagaagtgggatgttattacacgcaaaagcagtgacatgtcactttcaatgctggttaagctgatcatcattgatgaagtacaccttttaaatgacgatagaggttcagtaattgaggcgctagtagctcggactctccgccaggttgagtctatgcaatcaatgattcgcattgttggcctatctgctaccctgcctacctacttagaggtcgcacattttttgcgggttaatccagacactggacttttcttttttgactcaagctatcgtccagttcctcttgctcagcagtacattgggatcagtgaaagggattacacaaagagaagtgaattattcaatactttgtgttatgagaaggttgttgagtccattaagcaaggtcaccaagcattggtttttgtccatacccgtaaggatactgggaaaaccgctagaaccctgggtgcttatgccacgtgaatggggctgtagcctatttggtcacaagagccttagtatggtaaccacctg

SEQ ID NO: 81572 - DNA, 2443 bp, Zea Mays
cttattcaattttgactctcgtcggctccggtatttcgacttccaaaatagccctaacatttaccgaagctcctcccgccggcgcgctgcgatccaactccgagatgctcgcaccgcttccgcgcctgacgagcgcgctccgcggccactacgacgctgatcaggcctacctcctccgcaagagcgccctccaggctctcaccctccccaggccgcatgacgagtggaagttcgctcggaaaatcgtgcctggctgggacgatgcttccagcgaagtgcgtcaggcgtataaacaatttatcggggccgttgtggagttgttgagcggagaggcagtgtctgaagaactctaccaagttgcgcagactgtatatactctatttggtggcgatgacacggagtatgttggtgctaaaaaagtcctttccaaaaggaatgagttggagagccttgtgggctacactgtacaagactcagttttgaaaaagctagctcagttagctcagaagctcgattcccttcaacgagcaagtgcctatgaatctgtacacagaatagcggatgatgtaaatgaaaatgatagaattgaatttggagcagacttcgatttcaagccacttgcccgtttcattgttgatgtttctcttgacgcacccttagaaagtgctgaattgggcagtggtccatttgaaaaatggcagtatgatgcttggagcacatccacaactagtcattcaactgctgttaggggttctgtgagtttgaggtggctgaaagatcagtgtgctttgataactaaaagtggtggctcaatgctctcaggagatgaacttgcaatgaccttgtgcagagtgctcctatcaaataaagcaggcgatcagatagctggtgaacttttggacctggttggcgacaccgcttttgaaatagttcaagatcttcttttgcataggaaagagctagtggatgcaattcaacatggattgtcgatactgaaatctgagaaaatgacctcaggtaatcaaccaaagatgccaacttatggtacacaggtaactgtacaaacagagtctgaacgccagcttgataagattaggaggaaagaggaaagacgtagcaagcgcagtgcagacagtggcaataatgatattggtgttgatgatttttcatcccttcttttggcaagtgaacggaaggaggcatttgatgacgtgattggtagtggagaagggtcagacagttttacagtaacttcccttcctcaaggaaccacaaggaaacacatgaagggttatgaagaagtgaagattccaccaactccaacagcatcactgaaacccaatgagaagctgattgaaataaaagaattagatgagtttgcccaagctgccttccagggatacaagtcactcaatcgtgtgcagagtcgtattttccaagctacatactacaccaatgagaatattttagtttgtgccccaacaggtgctgggaaaacaaatattgcaatgattgcagttcttcatgaggttaaacagcacttcagggatggtattttacataaaaacgagtttaagatagtctatgttgctccaatgaaggccttggccgcagaggtaacagcaacattcagtcgccgattatctccattgaacctggttgttagagaacttacaggagatatgcagttgaccaaaaatgagattgaagaaactcagatgatagtgactactcctgagaagtgggatgttattacacgcaaaagcagtgacatgtcactttcaatgctggttaagctgatcatcattgatgaagtacaccttttaaatgacgatagaggttcagtaattgaggcgctagtagctcggactctccgccaggttgagtctatgcaatcaatgattcgcattgttggcctatctgctaccctgcctacctacttagaggtcgcacattttttgcgggttaatccagacactggacttttcttttttgactcaagctatcgtccagttcctcttgctcagcagtacattgggatcagtgaaagggattacacaaagagaagtgaattattcaatactttgtgttatgagaaggttgttgagtccattaagcaaggtcaccaagcattggtttttgtccatacccgtaaggatactgggaaaaccgctagaaccctgattgacctagcagcaaaagcaggggaattggaattattttcaagtgcagatcatcctcaatttccattaatcaagaaagatgttagtaaagcaaaaagtcgtgaagttgttgaattttttgaatctggatttggtatacacaatgctggaatgatgcgatctgacagaagtttgatggagcgcttgtttggtgacgggcttttgaaacaactttggcttggggagtaaacttaccagctcatacagttgttataaagggc

SEQ ID NO: 81573 - DNA, 6708 bp, Zea Mays
cttattcaattttgactctcgtcggctccggtatttcgacttccaaaatagccctaacatttaccgaagctcctcccgccggcgcgctgcgatccaactccgagatgctcgcaccgcttccgcgcctgacgagcgcgctccgcggccactacgacgctgatcaggcctacctcctccgcaagagcgccctccaggctctcaccctccccaggccgcatgacgagtggaagttcgctcggaaaatcgtgcctggctgggacgatgcttccagcgaagtgcgtcaggcgtataaacaatttatcggggccgttgtggagttgttgagcggagaggcagtgtctgaagaactctaccaagttgcgcagactgtatatactctatttggtggcgatgacacggagtatgttggtgctaaaaaagtcctttccaaaaggaatgagttggagagccttgtgggctacactgtacaagactcagttttgaaaaagctagctcagttagctcagaagctcgattcccttcaacgagcaagtgcctatgaatctgtacacagaatagcggatgatgtaaatgaaaatgatagaattgaatttggagcagacttcgatttcaagccacttgcccgtttcattgttgatgtttctcttgacgcacccttagaaagtgctgaattgggcagtggtccatttgaaaaatggcagtatgatgcttggagcacatccacaactagtcattcaactgctgttaggggttctgtgagtttgaggtggctgaaagatcagtgtgctttgataactaaaagtggtggctcaatgctctcaggagatgaacttgcaatgaccttgtgcagagtgctcctatcaaataaagcaggcgatcagatagctggtgaacttttggacctggttggcgacaccgcttttgaaatagttcaagatcttcttttgcataggaaagagctagtggatgcaattcaacatggattgtcgatactgaaatctgagaaaatgacctcaggtaatcaaccaaagatgccaacttatggtacacaggtaactgtacaaacagagtctgaacgccagcttgataagattaggaggaaagaggaaagacgtagcaagcgcagtgcagacagtggcaataatgatattggtgttgatgatttttcatcccttcttttggcaagtgaacggaaggaggcatttgatgacgtgattggtagtggagaagggtcagacagttttacagtaacttcccttcctcaaggaaccacaaggaaacacatgaagggttatgaagaagtgaagattccaccaactccaacagcatcactgaaacccaatgagaagctgattgaaataaaagaattagatgagtttgcccaagctgccttccagggatacaagtcactcaatcgtgtgcagagtcgtattttccaagctacatactacaccaatgagaatattttagtttgtgccccaacaggtgctgggaaaacaaatattgcaatgattgcagttcttcatgaggttaaacagcacttcagggatggtattttacataaaaacgagtttaagatagtctatgttgctccaatgaaggccttggccgcagaggtaacagcaacattcagtcgccgattatctccattgaacctggttgttagagaacttacaggagatatgcagttgaccaaaaatgagattgaagaaactcagatgatagtgactactcctgagaagtgggatgttattacacgcaaaagcagtgacatgtcactttcaatgctggttaagctgatcatcattgatgaagtacaccttttaaatgacgatagaggttcagtaattgaggcgctagtagctcggactctccgccaggttgagtctatgcaatcaatgattcgcattgttggcctatctgctaccctgcctacctacttagaggtcgcacattttttgcgggttaatccagacactggacttttcttttttgactcaagctatcgtccagttcctcttgctcagcagtacattgggatcagtgaaagggattacacaaagagaagtgaattattcaatactttgtgttatgagaaggttgttgagtccattaagcaaggtcaccaagcattggtttttgtccatacccgtaaggatactgggaaaaccgctagaaccctgattgacctagcagcaaaagcaggggaattggaattattttcaagtgcagatcatcctcaatttccattaatcaagaaagatgttagtaaagcaaaaagtcgtgaagttgttgaattttttgaatctggatttggtatacacaatgctggaatgatgcgatctgacagaagtttgatggagcgcttgtttggtgacgggcttttgaaagtccttgtttgtacagcaactttggcttggggagtaaacttaccagctcatacagttgttataaagggcacacagctatatgatcctaaagctggtgggtggcgagacttggggatgcttgatgtgatgcagatctttggacgtgctggaaggccacagtttgataaaagtggcgaaggaattattatcacaacacatgacaaattggcttattacttgaggttattgacaagtcagcttccaatagagagccagttccttggatctctgaaagataatttaaatgctgaagttgctttgggcactgtaacaaatgtcagggaggcttgtacctggcttggctatacatacttatttataaggatgaagactaatcctctggtgtatgggataacttgggaagaggttatgggagatccttctatgggtgcaaagcaaagaacatttattattgatgctgcacgagcactggacaaagctaagatgatgcgctttgatgaaaagagtggtaacttctactgcaccgaacttggtcgaattgcaagtcatttttaccttcagtactccagtgtcgagacttacaatgagatgcttcgacgtcacatgagtgaaagtgagttgattactatggtggcccattcctctgaatttgagaatatcgtagtaagagaagaagaacaggatgaattagaagcccttgcaaggaaagcatgccctttagaaattaagggtgggccgactgacaaacatgggaaaatttcaattctcatacaggtttatatttcccgtgctccaatcgatagctcctctttacattctgatgctcaatacattagtcaaagtttggcacgcataatgagggcactatttgagatttgtctgcgtcggggatggtctgagatgtcatccttattgttgcaatattgcaaggccgtggaccgcaagatatggccccatcttcatccacttaggcagtttgataaggatctttctcctcaggtattgtggaaactcgaggaaagaaatgttgatctggatcatctttatgagatggaggaaaatgaaattggagctctgatccggttttctcatcagggaaagttggtcaagcaatacgttggatacttcccgtatgtcaacctatctgcaaccgtgagcccaatcactaggacagttcttaaagtggacctgcatataactcctgaatttgtgtggaaagatcgttatcatggcatgtcagaacgatggtggatcattgttgaggattctgaaaatgataccatttatcattcagagctattcacattaacgaagaagatggcaagaggaacacctacaaagatatcttttaatgtaccaatatttgaacctcatccgccacagtactatatacatgccatctcagactcatggctacatgctgaaacactcttcactgtttcttttcataatttgacattgccacagacacaaataacacacacagaactcttggacttgaagcctcttccactgagtgctcttggcaacaaaacgtatgaggatctgtacagattttcccatttcaacccgatacaaactcaggcttttcatgttctttatcacactgataacaatgtactcttgggagctccaactgggagtggcaaaacaatttcggcagaacttgcaatgctccatcttttcagtacacaaccagacatgaaggtagtttacattgctcctctaaaggcaatagtacgagaaagaatgaatgattggagaaaacgtcttgtaattcagcttgggaagaagatggttgagatgactggtgacttcactccagatttgatggccctattgtcagctgacatcatcatttctacccctgaaaaatgggatgggattagtcgaaattggcatagcagaagtcgggctcatgatattggatgagatacatcttctgggagctgaccgtggacccatccttgaggtcattgtatcaagaatgcgatacatatcatcacaaacagaacgttcaattcggtttgttggtttatcaacggcattagcaaatgctcgtgatttagctgattggttgggcgttacagatgacggtctattcaatttcaagcctagtgtgagacctgtacctcttgaagtgcatatccagggatatcctgggaaattctattgtccaagaatgaatagcatgaacaaaccagcttatgcagccatatgcactcattcacccaataaaccagttctcatttttgtgtcatcacgtcgacagacaagacttacagctcttgatatcattcagcttgcagcatcagatgaaaaaccaaggcagttcctgagcattgaagacaactccctagacatggttctttcacaggtttctgacagtaatttgaggcatactctgcaatttggcataggtctgcatcatgctggtttaaatgacagagacagatccttggttgaggagcttttttcaaacaataagattcaggtgctggtatgtaccagcacattggcgtggggtgtcaatcttccagctcacctggtcataatcaagggcactgaatactatgatgggaaaacaaaaagatacatagattatgatatcacagatattctgcagatgatgggtcgtgcaggtcggccgcaatacgaccaacatggcaaagctgttattcttgtccatgaaccaaaaaagagcttttacaagaagttcctctacgaaccgtttcctgtggaaagtaatctgagggagcacttgcatgaccacataaatgcagaaattgtttctggcaccatcagcaacaaggaggaggcgattatttatctcacctggacttacctatatcgcagattggttgttaatccggcctattatggattggaggatactgaaacaaacacattgaattcttatctatcaaggttagtcgaaactacatttgaagatcttgaggacagtggatgcataaaagtggatgaccactctgtaaagtacttgattttggggaaaatagcttcacagtattacctgagctacctcactgtttcaatgtttgggtcaaatattggccccaacacaacgttggaagtctttctacacatactgtcagctgcatcagaatttgatgagcttcctgtacggcacaatgaggacaatttgaatcgaatactcagcggaaatgtcccgtatccagttgatcaacaccaccttgatgatccacatgttaaagccaacttactctttcaggcacatttctccagagcagaattgccaataagcgactatgtcactgacttgaaatcagttcttgatcagagcatacgcatcatacaggcaatgattgatgtatgcgcgaatagtggatggcttacgagtgcattgacttgcatgcatctcttgcagatgatcatacagggtctctggtttgagagagattatgaatccctctggatgttgccatccatgaatgatgatatattagaccatctcaagagtagaggagtctcaacagtcccctccttactagatctttcccgtgaagaattgcgtagggtacttcaaccattttctgcgtcagagttgtatcaggatctgcaacatttccctcatgttgatgtgaaagttaagcttcataatgaacaggagcgatccaaacctccaactttaaacatcaggttgcaattgaaaaattcgcgacggtcagcatcaagagcatttgcccctagatttcccaaggcaaaacaagaagcttggtggcttgtcctggggaatgctacaagttcagagctgtatggtctgaaaagaattagttttgcagatcgggtgattaatactcgcatggaattgccacagacgttcaatgtgcaggagacgaagctgatcttggtgtcggattgctacctaggttttgacttggagtattctcttgagcatctcaccaagggttgagtgctttattcagagctgtttgggctgtttcattttgtatgggttcagcaaccagctcatcctagattgatcctgtaatcacgagacatgagttcattccatgaatttttgtttgtatgactacatccctcgtgttcatggttatattatatttaatagctatatatacgagtggataggtttataactttcatgaaatatcttttccgtaagcatagtagatgtttgagctctaaggttatgaccaacaaattgtgtatatggtcgtgcaaaatactattttataatataaactatattatttacatggtgaagtttgaaatagaagatcgagatgagtaagttgctggaattagcctaagg

SEQ ID NO: 81574 - DNA, 7021 bp, Zea Mays
cttattcaattttgactctcgtcggctccggtatttcgacttccaaaatagccctaacatttaccgaagctcctcccgccggcgcgctgcgatccaactccgagatgctcgcaccgcttccgcgcctgacgagcgcgctccgcggccactacgacgctgatcaggcctacctcctccgcaagagcgccctccaggctctcaccctccccaggccgcatgacgagtggaagttcgctcggaaaatcgtgcctggctgggacgatgcttccagcgaagtgcgtcaggcgtataaacaatttatcggggccgttgtggagttgttgagcggagaggcagtgtctgaagaactctaccaagttgcgcagactgtatatactctatttggtggcgatgacacggagtatgttggtgctaaaaaagtcctttccaaaaggaatgagttggagagccttgtgggctacactgtacaagactcagttttgaaaaagctagctcagttagctcagaagctcgattcccttcaacgagcaagtgcctatgaatctgtacacagaatagcggatgatgtaaatgaaaatgatagaattgaatttggagcagacttcgatttcaagccacttgcccgtttcattgttgatgtttctcttgacgcacccttagaaagtgctgaattgggcagtggtccatttgaaaaatggcagtatgatgcttggagcacatccacaactagtcattcaactgctgttaggggttctgtgagtttgaggtggctgaaagatcagtgtgctttgataactaaaagtggtggctcaatgctctcaggagatgaacttgcaatgaccttgtgcagagtgctcctatcaaataaagcaggcgatcagatagctggtgaacttttggacctggttggcgacaccgcttttgaaatagttcaagatcttcttttgcataggaaagagctagtggatgcaattcaacatggattgtcgatactgaaatctgagaaaatgacctcaggtaatcaaccaaagatgccaacttatggtacacaggtaactgtacaaacagagtctgaacgccagcttgataagattaggaggaaagaggaaagacgtagcaagcgcagtgcagacagtggcaataatgatattggtgttgatgatttttcatcccttcttttggcaagtgaacggaaggaggcatttgatgacgtgattggtagtggagaagggtcagacagttttacagtaacttcccttcctcaaggaaccacaaggaaacacatgaagggttatgaagaagtgaagattccaccaactccaacagcatcactgaaacccaatgagaagctgattgaaataaaagaattagatgagtttgcccaagctgccttccagggatacaagtcactcaatcgtgtgcagagtcgtattttccaagctacatactacaccaatgagaatattttagtttgtgccccaacaggtgctgggaaaacaaatattgcaatgattgcagttcttcatgaggttaaacagcacttcagggatggtattttacataaaaacgagtttaagatagtctatgttgctccaatgaaggccttggccgcagaggtaacagcaacattcagtcgccgattatctccattgaacctggttgttagagaacttacaggagatatgcagttgaccaaaaatgagattgaagaaactcagatgatagtgactactcctgagaagtgggatgttattacacgcaaaagcagtgacatgtcactttcaatgctggttaagctgatcatcattgatgaagtacaccttttaaatgacgatagaggttcagtaattgaggcgctagtagctcggactctccgccaggtaagttcttacacaaaaaaggaacaacttctctctgccttggtgttggcagaattcacagtttaatgattcgtaaagatgagatgaaatataggtgggtatacttcaaattatgcctgtagacattgatgacactatttatccttgttttacatcttatacatgtaatttcttgtgcattaacgatctcaagaatcatggcacaataattaaaaaaacggagacgtaaagacattgtctacctttacatgttttgttgcctgtggttcatatttatgaatcgatcgaatgcaacaggttgagtctatgcaatcaatgattcgcattgttggcctatctgctaccctgcctacctacttagaggtcgcacattttttgcgggttaatccagacactggacttttcttttttgactcaagctatcgtccagttcctcttgctcagcagtacattgggatcagtgaaagggattacacaaagagaagtgaattattcaatactttgtgttatgagaaggttgttgagtccattaagcaaggtcaccaagcattggtttttgtccatacccgtaaggatactgggaaaaccgctagaaccctgattgacctagcagcaaaagcaggggaattggaattattttcaagtgcagatcatcctcaatttccattaatcaagaaagatgttagtaaagcaaaaagtcgtgaagttgttgaattttttgaatctggatttggtatacacaatgctggaatgatgcgatctgacagaagtttgatggagcgcttgtttggtgacgggcttttgaaagtccttgtttgtacagcaactttggcttggggagtaaacttaccagctcatacagttgttataaagagggcacacagctatatgatcctaaagctggtgggtggcgagacttggggatgcttgatgtgatgcagatctttggacgtgctggaaggccacagtttgataaaagtggcgaaggaattattatcacaacacatgacaaattggcttattacttgaggttattgacaagtcagcttccaatagagagccagttccttggatctctgaaagataatttaaatgctgaagttgctttgggcactgtaacaaatgtcagggaggcttgtacctggcttggctatacatacttatttataaggatgaagactaatcctctggtgtatgggataacttgggaagaggttatgggagatccttctatgggtgcaaagcaaagaacatttattattgatgctgcacgagcactggacaaagctaagatgatgcgctttgatgaaaagagtggtaacttctactgcaccgaacttggtcgaattgcaagtcatttttaccttcagtactccagtgtcgagacttacaatgagatgcttcgacgtcacatgagtgaaagtgagttgattactatggtggcccattcctctgaatttgagaatatcgtagtaagagaagaagaacaggatgaattagaagcccttgcaaggaaagcatgccctttagaaattaagggtgggccgactgacaaacatgggaaaatttcaattctcatacaggtttatatttcccgtgctccaatcgatagctcctctttacattctgatgctcaatacattagtcaaagtttggcacgcataatgagggcactatttgagatttgtctgcgtcggggatggtctgagatgtcatccttattgttgcaatattgcaaggccgtggaccgcaagatatggccccatcttcatccacttaggcagtttgataaggatctttctcctcaggtattgtggaaactcgaggaaagaaatgttgatctggatcatctttatgagatggaggaaaatgaaattggagctctgatccggttttctcatcagggaaagttggtcaagcaatacgttggatacttcccgtatgtcaacctatctgcaaccgtgagcccaatcactaggacagttcttaaagtggacctgcatataactcctgaatttgtgtggaaagatcgttatcatggcatgtcagaacgatggtggatcattgttgaggattctgaaaatgataccatttatcattcagagctattcacattaacgaagaagatggcaagaggaacacctacaaagatatcttttaatgtaccaatatttgaacctcatccgccacagtactatatacatgccatctcagactcatggctacatgctgaaacactcttcactgtttcttttcataatttgacattgccacagacacaaataacacacacagaactcttggacttgaagcctcttccactgagtgctcttggcaacaaaacgtatgaggatctgtacagattttcccatttcaacccgatacaaactcaggcttttcatgttctttatcacactgataacaatgtactcttgggagctccaactgggagtggcaaaacaatttcggcagaacttgcaatgctccatcttttcagtacacaaccagacatgaaggtagtttacattgctcctctaaaggcaatagtacgagaaagaatgaatgattggagaaaacgtcttgtaattcagcttgggaagaagatggttgagatgactggtgacttcactccagatttgatggccctattgtcagctgacatcatcatttctacccctgaaaaatgggatgggattagtcgaaattggcatagcagaagttacgttatgaaggtcgggctcatgatattggatgagatacatcttctgggagctgaccgtggacccatccttgaggtcattgtatcaagaatgcgatacatatcatcacaaacagaacgttcaattcggtttgttggtttatcaacggcattagcaaatgctcgtgatttagctgattggttgggcgttacagatgacggtctattcaatttcaagcctagtgtgagacctgtacctcttgaagtgcatatccagggatatcctgggaaattctattgtccaagaatgaatagcatgaacaaaccagcttatgcagccatatgcactcattcacccaataaaccagttctcatttttgtgtcatcacgtcgacagacaagacttacagctcttgatatcattcagcttgcagcatcagatgaaaaaccaaggcagttcctgagcattgaagacaactccctagacatggttctttcacaggtttctgacagtaatttgaggcatactctgcaatttggcataggtctgcatcatgctggtttaaatgacagagacagatccttggttgaggagcttttttcaaacaataagattcaggtgctggtatgtaccagcacattggcgtggggtgtcaatcttccagctcacctggtcataatcaagggcactgaatactatgatgggaaaacaaaaagatacatagattatgatatcacagatattctgcagatgatgggtcgtgcaggtcggccgcaatacgaccaacatggcaaagctgttattcttgtccatgaaccaaaaaagagcttttacaagaagttcctctacgaaccgtttcctgtggaaagtaatctgagggagcacttgcatgaccacataaatgcagaaattgtttctggcaccatcagcaacaaggaggaggcgattatttatctcacctggacttacctatatcgcagattggttgttaatccggcctattatggattggaggatactgaaacaaacacattgaattcttatctatcaaggttagtcgaaactacatttgaagatcttgaggacagtggatgcataaaagtggatgaccactctgtaaagtacttgattttggggaaaatagcttcacagtattacctgagctacctcactgtttcaatgtttgggtcaaatattggccccaacacaacgttggaagtctttctacacatactgtcagctgcatcagaatttgatgagcttcctgtacggcacaatgaggacaatttgaatcgaatactcagcggaaatgtcccgtatccagttgatcaacaccaccttgatgatccacatgttaaagccaacttactctttcaggcacatttctccagagcagaattgccaataagcgactatgtcactgacttgaaatcagttcttgatcagagcatacgcatcatacaggcaatgattgatgtatgcgcgaatagtggatggcttacgagtgcattgacttgcatgcatctcttgcagatgatcatacagggtctctggtttgagagagattatgaatccctctggatgttgccatccatgaatgatgatatattagaccatctcaagagtagaggagtctcaacagtcccctccttactagatctttcccgtgaagaattgcgtagggtacttcaaccattttctgcgtcagagttgtatcaggatctgcaacatttccctcatgttgatgtgaaagttaagcttcataatgaacaggagcgatccaaacctccaactttaaacatcaggttgcaattgaaaaattcgcgacggtcagcatcaagagcatttgcccctagatttcccaaggcaaaacaagaagcttggtggcttgtcctggggaatgctacaagttcagagctgtatggtctgaaaagaattagttttgcagatcgggtgattaatactcgcatggaattgccacagacgttcaatgtgcaggagacgaagctgatcttggtgtcggattgctacctaggttttgacttggagtattctcttgagcatctcaccaagggttgagtgctttattcagagctgtttgggctgtttcattttgtatgggttcagcaaccagctcatcctagattgatcctgtaatcacgagacatgagttcattccatgaatttttgtttgtatgactacatccctcgtgttcatggttatattatatttaatagctatatatacgagtggataggtttataactttcatgaaatatcttttccgtaagcatagtagatgtttgagctctaaggttatgaccaacaaattgtgtatatggtcgtgcaaaatactattttataatataaactatattatttacatggtgaagtttgaaatagaagatcgagatgagtaagttgctggaattagcctaagg

SEQ ID NO: 81575 - DNA, 6530 bp, Zea Mays
attcaattttgactctcgtcggctccggtatttcgacttccaaaatagccctaacatttaccgaagctcctcccgccggcgcgctgcgatccaactccgagatgctcgcaccgcttccgcgcctgacgagcgcgctccgcggccactacgacgctgatcaggcctacctcctccgcaagagcgccctccaggctctcaccctccccaggccgcatgacgagtggaagttcgctcggaaaatcgtgcctggctgggacgatgcttccagcgaagtgcgtcaggcgtataaacaatttatcggggccgttgtggagttgttgagcggagaggcagtgtctgaagaactctaccaagttgcgcagactgtatatactctatttggtggcgatgacacggagtatgttggtgctaaaaaagtcctttccaaaaggaatgagttggagagccttgtgggctacactgtacaagactcagttttgaaaaagctagctcagttagctcagaagctcgattcccttcaacgagcaagtgcctatgaatctgtacacagaatagcggatgatgtaaatgaaaatgatagaattgaatttggagcagacttcgatttcaagccacttgcccgtttcattgttgatgtttctcttgacgcacccttagaaagtgctgaattgggcagtggtccatttgaaaaatggcagtatgatgcttggagcacatccacaactagtcattcaactgctgttaggggttctgtgagtttgaggtggctgaaagatcagtgtgctttgataactaaaagtggtggctcaatgctctcaggagatgaacttgcaatgaccttgtgcagagtgctcctatcaaataaagcaggcgatcagatagctggtgaacttttggacctggttggcgacaccgcttttgaaatagttcaagatcttcttttgcataggaaagagctagtggatgcaattcaacatggattgtcgatactgaaatctgagaaaatgacctcaggtaatcaaccaaagatgccaacttatggtacacaggtaactgtacaaacagagtctgaacgccagcttgataagattaggaggaaagaggaaagacgtagcaagcgcagtgcagacagtggcaataatgatattggtgttgatgatttttcatcccttcttttggcaagtgaacggaaggaggcatttgatgacgtgattggtagtggagaagggtcagacagttttacagtaacttcccttcctcaaggaaccacaaggaaacacatgaagggttatgaagaagtgaagattccaccaactccaacagcatcactgaaacccaatgagaagctgattgaaataaaagaattagatgagtttgcccaagctgccttccagggatacaagtcactcaatcgtgtgcagagtcgtattttccaagctacatactacaccaatgagaatattttagtttgtgccccaacaggtgctgggaaaacaaatattgcaatgattgcagttcttcatgaggttaaacagcacttcagggatggtattttacataaaaacgagtttaagatagtctatgttgctccaatgaaggccttggccgcagaggtaacagcaacattcagtcgccgattatctccattgaacctggttgttagagaacttacaggagatatgcagttgaccaaaaatgagattgaagaaactcagatgatagtgactactcctgagaagtgggatgttattacacgcaaaagcagtgacatgtcactttcaatgctggttaagctgatcatcattgatgaagtacaccttttaaatgacgatagaggttcagtaattgaggcgctagtagctcggactctccgccaggtaagttcttacacaaaaaaggaacaacttctctctgccttggtgttggcagaattcacagtttaatgattcgtaaagatgagatgaaatataggtgggtatacttcaaattatgcctgtagacattgatgacactatttatccttgttttacatcttatacatgtaatttcttgtgcattaacgatctcaagaatcatggcacaataattaaaaaaacggagacgtaaagacattgtctacctttacatgttttgttgcctgtggttcatatttatgaatcgatcgaatgcaacaggttgagtctatgcaatcaatgattcgcattgttggcctatctgctaccctgcctacctacttagaggtcgcacattttttgcgggttaatccagacactggacttttcttttttgactcaagctatcgtccagttcctcttgctcagcagtacattgggatcagtgaaagggattacacaaagagaagtgaattattcaatactttgtgttatgagaaggttgttgagtccattaagcaaggtcaccaagcattggtttttgtccatacccgtaaggatactgggaaaaccgctagaaccctgattgacctagcagcaaaagcaggggaattggaattattttcaagtgcagatcatcctcaatttccattaatcaagaaagatgttagtaaagcaaaaagtcgtgaagttgttgaattttttgaatctggatttggtatacacaatgctggaatgatgcgatctgacagaagtttgatggagcgcttgtttggtgacgggcttttgaaagtccttgtttgtacagcaactttggcttggggagtaaacttaccagctcatacagttgttataaaggggcacacagctatatgatcctaaagctggtgggtggcgagacttggggatgcttgatgtgatgcagatctttggacgtgctggaaggccacagtttgataaaagtggcgaaggaattattatcacaacacatgacaaattggcttattacttgagggaggcttgtacctggcttggctatacatacttatttataaggatgaagactaatcctctggtgtatgggataacttgggaagaggttatgggagatccttctatgggtgcaaagcaaagaacatttattattgatgctgcacgagcactggacaaagctaagatgatgcgctttgatgaaaagagtggtaacttctactgcaccgaacttggtcgaattgcaagtcatttttaccttcagtactccagtgtcgagacttacaatgagatgcttcgacgtcacatgagtgaaagtgagttgattactatggtggcccattcctctgaatttgagaatatcgtagtaagagaagaagaacaggatgaattagaagcccttgcaaggaaagcatgccctttagaaattaagggtgggccgactgacaaacatgggaaaatttcaattctcatacaggtttatatttcccgtgctccaatcgatagctcctctttacattctgatgctcaatacattagtcaaagtttggcacgcataatgagggcactatttgagatttgtctgcgtcggggatggtctgagatgtcatccttattgttgcaatattgcaaggccgtggaccgcaagatatggccccatcttcatccacttaggcagtttgataaggatctttctcctcaggtattgtggaaactcgaggaaagaaatgttgatctggatcatctttatgagatggaggaaaatgaaattggagctctgatccggttttctcatcagggaaagttggtcaagcaatacgttggatacttcccgtatgtcaacctatctgcaaccgtgagcccaatcactaggacagttcttaaagtggacctgcatataactcctgaatttgtgtggaaagatcgttatcatggcatgtcagaacgatggtggatcattgttgaggattctgaaaatgataccatttatcattcagagctattcacattaacgaagaagatggcaagaggaacacctacaaagatatcttttaatgtaccaatatttgaacctcatccgccacagtactatatacatgccatctcagactcatggctacatgctgaaacactcttcactgtttcttttcataatttgacattgccacagacacaaataacacacacagaactcttggacttgaagcctcttccactgagtgctcttggcaacaaaacgtatgaggatctgtacagattttcccatttcaacccgatacaaactcaggcttttcatgttctttatcacactgataacaatgtactcttgggagctccaactgggagtggcaaaacaatttcggcagaacttgcaatgctccatcttttcagtacacaaccagacatgaaggtagtttacattgctcctctaaaggcaatagtacgagaaagaatgaatgattggagaaaacgtcttgtaattcagcttgggaagaagatggttgagatgactggtgacttcactccagatttgatggccctattgtcagctgacatcatcatttctacccctgaaaaatgggatgggattagtcgaaattggcatagcagaagttacgttatgaaggtcgggctcatgatattggatgagatacatcttctgggagctgaccgtggacccatccttgaggtcattgtatcaagaatgcgatacatatcatcacaaacagaacgttcaattcggtttgttggtttatcaacggcattagcaaatgctcgatgacggtctattcaatttcaagcctagtgtgagacctgtacctcttgaagtgcatatccagggatatcctgggaaattctattgtccaagaatgaatagcatgaacaaaccagcttatgcagccatatgcactcattcacccaataaaccagttctcatttttgtgtcatcacgtcgacagacaagacttacagctcttgatatcattcagcttgcagcatcagatgaaaaaccaaggcagttcctgagcattgaagacaactccctagacatggttctttcacaggtttctgacagtaatttgaggcatactctgcaatttggcataggtctgcatcatgctggtttaaatgacagagacagatccttggttgaggagcttttttcaaacaataagattcaggtgctggtatgtaccagcacattggcgtggggtgtcaatcttccagctcacctggtcataatcaagggcactgaatactatgatgggaaaacaaaaagatacatagattatgatatcacagatattctgcagatgatgggtcgtgcaggtcggccgcaatacgaccaacatggcaaagctgttattcttgtccatgaaccaaaaaagagcttttacaagaagttcctctacgaaccgtttcctgtggaaagtaatctgagggagcacttgcatgaccacataaatgcagaaattgtttctggcaccatcagcaacaaggaggaggcgattatttatctcacctggacttacctatatcgcagattggttgttaatccggcctattatggattggaggatactgaaacaaacacattgaattcttatctatcaaggttagtcgaaactacatttgaagatcttgaggacagtggatgcataaaagtggatgaccactctgtaaagtacttgattttggggaaaatagcttcacagtattacctgagctacctcactgtttcaatgtttgggtcaaatattggccccaacacaacgttggaagtctttctacacatactgtcagctgcatcagaatttgatgagcttcctgtacggcacaatgaggacaatttgaatcgaatactcagcggaaatgtcccgtatccagttgatcaacaccaccttgatgatccacatgttaaagccaacttactctttcaggcacatttctccagagcagaattgccaataagcgactatgtcactgacttgaaatcagttcttgatcagagcatacgcatcatacaggcaatgattgatgtatgcgcgaatagtggatggcttacgagtgcattgacttgcatgcatctcttgcagatgatcatacagggtctctggtttgagagagattatgaatccctctggatgttgccatccatgaatgatgatatattagaccatctcaagagtagaggagtctcaacagtcccctccttactagatctttcccgtgaagaattgcgtagggtacttcaaccattttctgcgtcagagttgtatcaggatctgcaacatttccctcatgttgatgtgaaagttaagcttcataatgaacaggagcgatccaaacctccaactttaaacatcaggttgcaattgaaaaattcgcgacggtcagcatcaagagcatttgcccctagatttcccaaggcaaaacaagaagcttggtggcttgtcctggggaatgctacaagttcagagctgtatggtctgaaaagaattagttttgcagatcgggtgattaatactcgcatggaattgccacagacgttcaatgtgcagattgtacagttgcgcctgagacatctattactacacagttggctttttacttgtcgggataccattacatcctgttagtctgctg

SEQ ID NO: 81576 - DNA, 6657 bp, Zea Mays
attcaattttgactctcgtcggctccggtatttcgacttccaaaatagccctaacatttaccgaagctcctcccgccggcgcgctgcgatccaactccgagatgctcgcaccgcttccgcgcctgacgagcgcgctccgcggccactacgacgctgatcaggcctacctcctccgcaagagcgccctccaggctctcaccctccccaggccgcatgacgagtggaagttcgctcggaaaatcgtgcctggctgggacgatgcttccagcgaagtgcgtcaggcgtataaacaatttatcggggccgttgtggagttgttgagcggagaggcagtgtctgaagaactctaccaagttgcgcagactgtatatactctatttggtggcgatgacacggagtatgttggtgctaaaaaagtcctttccaaaaggaatgagttggagagccttgtgggctacactgtacaagactcagttttgaaaaagctagctcagttagctcagaagctcgattcccttcaacgagcaagtgcctatgaatctgtacacagaatagcggatgatgtaaatgaaaatgatagaattgaatttggagcagacttcgatttcaagccacttgcccgtttcattgttgatgtttctcttgacgcacccttagaaagtgctgaattgggcagtggtccatttgaaaaatggcagtatgatgcttggagcacatccacaactagtcattcaactgctgttaggggttctgtgagtttgaggtggctgaaagatcagtgtgctttgataactaaaagtggtggctcaatgctctcaggagatgaacttgcaatgaccttgtgcagagtgctcctatcaaataaagcaggcgatcagatagctggtgaacttttggacctggttggcgacaccgcttttgaaatagttcaagatcttcttttgcataggaaagagctagtggatgcaattcaacatggattgtcgatactgaaatctgagaaaatgacctcaggtaatcaaccaaagatgccaacttatggtacacaggtaactgtacaaacagagtctgaacgccagcttgataagattaggaggaaagaggaaagacgtagcaagcgcagtgcagacagtggcaataatgatattggtgttgatgatttttcatcccttcttttggcaagtgaacggaaggaggcatttgatgacgtgattggtagtggagaagggtcagacagttttacagtaacttcccttcctcaaggaaccacaaggaaacacatgaagggttatgaagaagtgaagattccaccaactccaacagcatcactgaaacccaatgagaagctgattgaaataaaagaattagatgagtttgcccaagctgccttccagggatacaagtcactcaatcgtgtgcagagtcgtattttccaagctacatactacaccaatgagaatattttagtttgtgccccaacaggtgctgggaaaacaaatattgcaatgattgcagttcttcatgaggttaaacagcacttcagggatggtattttacataaaaacgagtttaagatagtctatgttgctccaatgaaggccttggccgcagaggtaacagcaacattcagtcgccgattatctccattgaacctggttgttagagaacttacaggagatatgcagttgaccaaaaatgagattgaagaaactcagatgatagtgactactcctgagaagtgggatgttattacacgcaaaagcagtgacatgtcactttcaatgctggttaagctgatcatcattgatgaagtacaccttttaaatgacgatagaggttcagtaattgaggcgctagtagctcggactctccgccaggttgagtctatgcaatcaatgattcgcattgttggcctatctgctaccctgcctacctacttagaggtgtcgcacattttttgcgggttaatccagacactggacttttcttttttgactcaagctatcgtccagttcctcttgctcagcagtacattgggatcagtgaaagggattacacaaagagaagtgaattattcaatactttgtgttatgagaaggttgttgagtccattaagcaaggtcaccaagcattggtttttgtccatacccgtaaggatactgggaaaaccgctagaaccctgattgacctagcagcaaaagcaggggaattggaattattttcaagtgcagatcatcctcaatttccattaatcaagaaagatgttagtaaagcaaaaagtcgtgaagttgttgaattttttgaatctggatttggtatacacaatgctggaatgatgcgatctgacagaagtttgatggagcgcttgtttggtgacgggcttttgaaagtccttgtttgtacagcaactttggcttggggagtaaacttaccagctcatacagttgttataaagggcacacagctatatgatcctaaagctggtgggtggcgagacttggggatgcttgatgtgatgcagatctttggacgtgctggaaggccacagtttgataaaagtggcgaaggaattattatcacaacacatgacaaattggcttattacttgaggttattgacaagtcagcttccaatagagagccagggaggcttgtacctggcttggctatacatacttatttataaggatgaagactaatcctctggtgtatgggataacttgggaagaggttatgggagatccttctatgggtgcaaagcaaagaacatttattattgatgctgcacgagcactggacaaagctaagatgatgcgctttgatgaaaagagtggtaacttctactgcaccgaacttggtcgaattgcaagtcatttttaccttcagtactccagtgtcgagacttacaatgagatgcttcgacgtcacatgagtgaaagtgagttgattactatggtggcccattcctctgaatttgagaatatcgtagtaagagaagaagaacaggatgaattagaagcccttgcaaggaaagcatgccctttagaaattaagggtgggccgactgacaaacatgggaaaatttcaattctcatacaggtttatatttcccgtgctccaatcgatagctcctctttacattctgatgctcaatacattagtcaaagtttggcacgcataatgagggcactatttgagatttgtctgcgtcggggatggtctgagatgtcatccttattgttgcaatattgcaaggccgtggaccgcaagatatggccccatcttcatccacttaggcagtttgataaggatctttctcctcaggtattgtggaaactcgaggaaagaaatgttgatctggatcatctttatgagatggaggaaaatgaaattggagctctgatccggttttctcatcagggaaagttggtcaagcaatacgttggatacttcccgtatgtcaacctatctgcaaccgtgagcccaatcactaggacagttcttaaagtggacctgcatataactcctgaatttgtgtggaaagatcgttatcatggcatgtcagaacgatggtggatcattgttgaggattctgaaaatgataccatttatcattcagagctattcacattaacgaagaagatggcaagaggaacacctacaaagatatcttttaatgtaccaatatttgaacctcatccgccacagtactatatacatgccatctcagactcatggctacatgctgaaacactcttcactgtttcttttcataatttgacattgccacagacacaaataacacacacagaactcttggacttgaagcctcttccactgagtgctcttggcaacaaaacgtatgaggatctgtacagattttcccatttcaacccgatacaaactcaggcttttcatgttctttatcacactgataacaatgtactcttgggagctccaactgggagtggcaaaacaatttcggcagaacttgcaatgctccatcttttcagtacacaaccagacatgaaggtagtttacattgctcctctaaaggcaatagtacgagaaagaatgaatgattggagaaaacgtcttgtaattcagcttgggaagaagatgggttgagatgactggtgacttcactccagatttgatggccctattgtcagctgacatcatcatttctacccctgaaaaatgggatgggattagtcgaaattggcatagcagaagttacgttatgaaggtcgggctcatgatattggatgagatacatcttctgggagctgaccgtggacccatccttgaggtcattgtatcaagaatgcgatacatatcatcacaaacagaacgttcaattcggtttgttggtttatcaacggcattagcaaatgctcgtgatttagctgattggttgggcgttacagatgacggtctattcaatttcaagcctagtgtgagacctgtacctcttgaagtgcatatccagggatatcctgggaaattctattgtccaagaatgaatagcatgaacaaaccagcttatgcagccatatgcactcattcacccaataaaccagttctcatttttgtgtcatcacgtcgacagacaagacttacagctcttgatatcattcagcttgcagcatcagatgaaaaaccaaggcagttcctgagcattgaagacaactccctagacatggttctttcacaggtttctgacagtaatttgaggcatactctgcaatttggcataggtctgcatcatgctggtttaaatgacagagacagatccttggttgaggagcttttttcaaacaataagattcaggtgctggtatgtaccagcacattggcgtggggtgtcaatcttccagctcacctggtcataatcaagggcactgaatactatgatgggaaaacaaaaagatacatagattatgatatcacagatattctgcagatgatgggtcgtgcaggtcggccgcaatacgaccaacatggcaaagctgttattcttgtccatgaaccaaaaaagagcttttacaagaagttcctctacgaaccgtttcctgtggaaagtaatctgagggagcacttgcatgaccacataaatgcagaaattgtttctggcaccatcagcaacaaggaggaggcgattatttatctcacctggacttacctatatcgcagattggttgttaatccggcctattatggattggaggatactgaaacaaacacattgaattcttatctatcaaggttagtcgaaactacatttgaagatcttgaggacagtggatgcataaaagtggatgaccactctgtaaagtacttgattttggggaaaatagcttcacagtattacctgagctacctcactgtttcaatgtttgggtcaaatattggccccaacacaacgttggaagtctttctacacatactgtcagctgcatcagaatttgatgagcttcctgtacggcacaatgaggacaatttgaatcgaatactcagcggaaatgtcccgtatccagttgatcaacaccaccttgatgatccacatgttaaagccaacttactctttcaggcacatttctccagagcagaattgccaataagcgactatgtcactgacttgaaatcagttcttgatcagagcatacgcatcatacaggcaatgattgatgtatgcgcgaatagtggatggcttacgagtgcattgacttgcatgcatctcttgcagatgatcatacagggtctctggtttgagagagattatgaatccctctggatgttgccatccatgaatgatgatatattagaccatctcaagagtagaggagtctcaacagtcccctccttactagatctttcccgtgaagaattgcgtagggtacttcaaccattttctgcgtcagagttgtatcaggatctgcaacatttccctcatgttgatgtgaaagttaagcttcataatgaacaggagcgatccaaacctccaactttaaacatcaggttgcaattgaaaaattcgcgacggtcagcatcaagagcatttgcccctagatttcccaaggcaaaacaagaagcttggtggcttgtcctggggaatgctacaagttcagagctgtatggtctgaaaagaattagttttgcagatcgggtgattaatactcgcatggaattgccacagacgttcaatgtgcaggagacgaagctgatcttggtgtcggattgctacctaggttttgacttggagtattctcttgagcatctcaccaagggttgagtgctttattcagagctgtttgggctgtttcattttgtatgggttcagcaaccagctcatcctagattgatcctgtaatcacgagacatgagttcattccatgaatttttgtttgtatgactacatccctcgtgttcatggttatattatatttaatagctatatatacgagtggataggtttataactttcatgaaatatcttttccgtaagcatagtagatgtttgagctctaaggttatgaccaacaaattgtgtatatggtcgtgcaaaatactattttataatataaactatattatttacatggtgaagtttgaaatagaagatcgagatgagtaagttgctggaattagcctaagg

SEQ ID NO: 81577 - DNA, 6719 bp, Zea Mays
attcaattttgactctcgtcggctccggtatttcgacttccaaaatagccctaacatttaccgaagctcctcccgccggcgcgctgcgatccaactccgagatgctcgcaccgcttccgcgcctgacgagcgcgctccgcggccactacgacgctgatcaggcctacctcctccgcaagagcgccctccaggctctcaccctccccaggccgcatgacgagtggaagttcgctcggaaaatcgtgcctggctgggacgatgcttccagcgaagtgcgtcaggcgtataaacaatttatcggggccgttgtggagttgttgagcggagaggcagtgtctgaagaactctaccaagttgcgcagactgtatatactctatttggtggcgatgacacggagtatgttggtgctaaaaaagtcctttccaaaaggaatgagttggagagccttgtgggctacactgtacaagactcagttttgaaaaagctagctcagttagctcagaagctcgattcccttcaacgagcaagtgcctatgaatctgtacacagaatagcggatgatgtaaatgaaaatgatagaattgaatttggagcagacttcgatttcaagccacttgcccgtttcattgttgatgtttctcttgacgcacccttagaaagtgctgaattgggcagtggtccatttgaaaaatggcagtatgatgcttggagcacatccacaactagtcattcaactgctgttaggggttctgtgagtttgaggtggctgaaagatcagtgtgctttgataactaaaagtggtggctcaatgctctcaggagatgaacttgcaatgaccttgtgcagagtgctcctatcaaataaagcaggcgatcagatagctggtgaacttttggacctggttggcgacaccgcttttgaaatagttcaagatcttcttttgcataggaaagagctagtggatgcaattcaacatggattgtcgatactgaaatctgagaaaatgacctcaggtaatcaaccaaagatgccaacttatggtacacaggtaactgtacaaacagagtctgaacgccagcttgataagattaggaggaaagaggaaagacgtagcaagcgcagtgcagacagtggcaataatgatattggtgttgatgatttttcatcccttcttttggcaagtgaacggaaggaggcatttgatgacgtgattggtagtggagaagggtcagacagttttacagtaacttcccttcctcaaggaaccacaaggaaacacatgaagggttatgaagaagtgaagattccaccaactccaacagcatcactgaaacccaatgagaagctgattgaaataaaagaattagatgagtttgcccaagctgccttccagggatacaagtcactcaatcgtgtgcagagtcgtattttccaagctacatactacaccaatgagaatattttagtttgtgccccaacaggtgctgggaaaacaaatattgcaatgattgcagttcttcatgaggttaaacagcacttcagggatggtattttacataaaaacgagtttaagatagtctatgttgctccaatgaaggccttggccgcagaggtaacagcaacattcagtcgccgattatctccattgaacctggttgttagagaacttacaggagatatgcagttgaccaaaaatgagattgaagaaactcagatgatagtgactactcctgagaagtgggatgttattacacgcaaaagcagtgacatgtcactttcaatgctggttaagctgatcatcattgatgaagtacaccttttaaatgacgatagaggttcagtaattgaggcgctagtagctcggactctccgccaggttgagtctatgcaatcaatgattcgcattgttggcctatctgctaccctgcctacctacttagaggtcgcacattttttgcgggttaatccagacactggacttttcttttttgactcaagctatcgtccagttcctcttgctcagcagtacattgggatcagtgaaagggattacacaaagagaagtgaattattcaatactttgtgttatgagaaggttgttgagtccattaagcaaggtcaccaagcattggtttttgtccatacccgtaaggatactgggaaaaccgctagaaccctgattgacctagcagcaaaagcaggggaattggaattattttcaagtgcagatcatcctcaatttccattaatcaagaaagatgttagtaaagcaaaaagtcgtgaagttgttgaattttttgaatctggatttggtatacacaatgctggaatgatgcgatctgacagaagtttgatggagcgcttgtttggtgacgggcttttgaaagtccttgtttgtacagcaactttggcttggggagtaaacttaccagctcatacagttgttataaagggcacacagctatatgatcctaaagctggtgggtggcgagacttggggatgcttgatgtgatgcagatctttggacgtgctggaaggccacagtttgataaaagtggcgaaggaattattatcacaacacatgacaaattggcttattacttgaggttattgacaagtcagcttccaatagagagccagttccttggatctctgaaagataatttaaatgctgaagttgctttgggcactgtaacaaatgtcagggaggcttgtacctggcttggctatacatacttatttataaggatgaagactaatcctctggtgtatgggataacttgggaagaggttatgggagatccttctatgggtgcaaagcaaagaacatttattattgatgctgcacgagcactggacaaagctaagatgatgcgctttgatgaaaagagtggtaacttctactgcaccgaacttggtcgaattgcaagtcatttttaccttcagtactccagtgtcgagacttacaatgagatgcttcgacgtcacatgagtgaaagtgagttgattactatggtggcccattcctctgaatttgagaatatcgtagtaagagaagaagaacaggatgaattagaagcccttgcaaggaaagcatgccctttagaaattaagggtgggccgactgacaaacatgggaaaatttcaattctcatacaggtttatatttcccgtgctccaatcgatagctcctctttacattctgatgctcaatacattagtcaaagtttggcacgcataatgagggcactatttgagatttgtctgcgtcggggatggtctgagatgtcatccttattgttgcaatattgcaaggccgtggaccgcaagatatggccccatcttcatccacttaggcagtttgataaggatctttctcctcaggtattgtggaaactcgaggaaagaaatgttgatctggatcatctttatgagatggaggaaaatgaaattggagctctgatccggttttctcatcagggaaagttggtcaagcaatacgttggatacttcccgtatgtcaacctatctgcaaccgtgagcccaatcactaggacagttcttaaagtggacctgcatataactcctgaatttgtgtggaaagatcgttatcatggcatgtcagaacgatggtggatcattgttgaggattctgaaaatgataccatttatcattcagagctattcacattaacgaagaagatggcaagaggaacacctacaaagatatcttttaatgtaccaatatttgaacctcatccgccacagtactatatacatgccatctcagactcatggctacatgctgaaacactcttcactgtttcttttcataatttgacattgccacagacacaaataacacacacagaactcttggacttgaagcctcttccactgagtgctcttggcaacaaaacgtatgaggatctgtacagattttcccatttcaacccgatacaaactcaggcttttcatgttctttatcacactgataacaatgtactcttgggagctccaactgggagtggcaaaacaatttcggcagaacttgcaatgctccatcttttcagtacacaaccagacatgaaggtagtttacattgctcctctaaaggcaatagtacgagaaagaatgaatgattggagaaaacgtcttgtaattcagcttgggaagaagatggttgagatgactggtgacttcactccagatttgatggccctattgtcagctgacatcatcatttctacccctgaaaaatgggatgggattagtcgaaattggcatagcagaagttacgttatgaaggtcgggctcatgatattggatgagatacatcttctgggagctgaccgtggacccatccttgaggtcattgtatcaagaatgcgatacatatcatcacaaacagaacgttcaattcggtttgttggtttatcaacggcattagcaaatgctcgtgatttagctgattggttgggcgttacagatgacggtctattcaatttcaagcctagtgtgagacctgtacctcttgaagtgcatatccagggatatcctgggaaattctattgtccaagaatgaatagcatgaacaaaccagcttatgcagccatatgcactcattcacccaataaaccagttctcatttttgtgtcatcacgtcgacagacaagacttacagctcttgatatcattcagcttgcagcatcagatgaaaaaccaaggcagttcctgagcattgaagacaactccctagacatggttctttcacaggtttctgacagtaatttgaggcatactctgcaatttggcataggtctgcatcatgctggtttaaatgacagagacagatccttggttgaggagcttttttcaaacaataagattcaggtgctggtatgtaccagcacattggcgtggggtgtcaatcttccagctcacctggtcataatcaaggtgactgaatactatgatgggaaaacaaaaagatacatagattatgatatcacagatattctgcagatgatgggtcgtgcaggtcggccgcaatacgaccaacatggcaaagctgttattcttgtccatgaaccaaaaaagagcttttacaagaagttcctctacgaaccgtttcctgtggaaagtaatctgagggagcacttgcatgaccacataaatgcagaaattgtttctggcaccatcagcaacaaggaggaggcgattatttatctcacctggacttacctatatcgcagattggttgttaatccggcctattatggattggaggatactgaaacaaacacattgaattcttatctatcaaggttagtcgaaactacatttgaagatcttgaggacagtggatgcataaaagtggatgaccactctgtaaagtacttgattttggggaaaatagcttcacagtattacctgagctacctcactgtttcaatgtttgggtcaaatattggccccaacacaacgttggaagtctttctacacatactgtcagctgcatcagaatttgatgagcttcctgtacggcacaatgaggacaatttgaatcgaatactcagcggaaatgtcccgtatccagttgatcaacaccaccttgatgatccacatgttaaagccaacttactctttcaggcacatttctccagagcagaattgccaataagcgactatgtcactgacttgaaatcagttcttgatcagagcatacgcatcatacaggcaatgattgatgtatgcgcgaatagtggatggcttacgagtgcattgacttgcatgcatctcttgcagatgatcatacagggtctctggtttgagagagattatgaatccctctggatgttgccatccatgaatgatgatatattagaccatctcaagagtagaggagtctcaacagtcccctccttactagatctttcccgtgaagaattgcgtagggtacttcaaccattttctgcgtcagagttgtatcaggatctgcaacatttccctcatgttgatgtgaaagttaagcttcataatgaacaggagcgatccaaacctccaactttaaacatcaggttgcaattgaaaaattcgcgacggtcagcatcaagagcatttgcccctagatttcccaaggcaaaacaagaagcttggtggcttgtcctggggaatgctacaagttcagagctgtatggtctgaaaagaattagttttgcagatcgggtgattaatactcgcatggaattgccacagacgttcaatgtgcaggagacgaagctgatcttggtgtcggattgctacctaggttttgacttggagtattctcttgagcatctcaccaagggttgagtgctttattcagagctgtttgggctgtttcattttgtatgggttcagcaaccagctcatcctagattgatcctgtaatcacgagacatgagttcattccatgaatttttgtttgtatgactacatccctcgtgttcatggttatattatatttaatagctatatatacgagtggataggtttataactttcatgaaatatcttttccgtaagcatagtagatgtttgagctctaaggttatgaccaacaaattgtgtatatggtcgtgcaaaatactattttataatataaactatattatttacatggtgaagtttgaaatagaagatcgagatgagtaagttgctggaattagcctaagg

SEQ ID NO: 81578 - DNA, 6697 bp, Zea Mays
attcaattttgactctcgtcggctccggtatttcgacttccaaaatagccctaacatttaccgaagctcctcccgccggcgcgctgcgatccaactccgagatgctcgcaccgcttccgcgcctgacgagcgcgctccgcggccactacgacgctgatcaggcctacctcctccgcaagagcgccctccaggctctcaccctccccaggccgcatgacgagtggaagttcgctcggaaaatcgtgcctggctgggacgatgcttccagcgaagtgcgtcaggcgtataaacaatttatcggggccgttgtggagttgttgagcggagaggcagtgtctgaagaactctaccaagttgcgcagactgtatatactctatttggtggcgatgacacggagtatgttggtgctaaaaaagtcctttccaaaaggaatgagttggagagccttgtgggctacactgtacaagactcagttttgaaaaagctagctcagttagctcagaagctcgattcccttcaacgagcaagtgcctatgaatctgtacacagaatagcggatgatgtaaatgaaaatgatagaattgaatttggagcagacttcgatttcaagccacttgcccgtttcattgttgatgtttctcttgacgcacccttagaaagtgctgaattgggcagtggtccatttgaaaaatggcagtatgatgcttggagcacatccacaactagtcattcaactgctgttaggggttctgtgagtttgaggtggctgaaagatcagtgtgctttgataactaaaagtggtggctcaatgctctcaggagatgaacttgcaatgaccttgtgcagagtgctcctatcaaataaagcaggcgatcagatagctggtgaacttttggacctggttggcgacaccgcttttgaaatagttcaagatcttcttttgcataggaaagagctagtggatgcaattcaacatggattgtcgatactgaaatctgagaaaatgacctcaggtaatcaaccaaagatgccaacttatggtacacaggtaactgtacaaacagagtctgaacgccagcttgataagattaggaggaaagaggaaagacgtagcaagcgcagtgcagacagtggcaataatgatattggtgttgatgatttttcatcccttcttttggcaagtgaacggaaggaggcatttgatgacgtgattggtagtggagaagggtcagacagttttacagtaacttcccttcctcaaggaaccacaaggaaacacatgaagggttatgaagaagtgaagattccaccaactccaacagcatcactgaaacccaatgagaagctgattgaaataaaagaattagatgagtttgcccaagctgccttccagggatacaagtcactcaatcgtgtgcagagtcgtattttccaagctacatactacaccaatgagaatattttagtttgtgccccaacaggtgctgggaaaacaaatattgcaatgattgcagttcttcatgaggttaaacagcacttcagggatggtattttacataaaaacgagtttaagatagtctatgttgctccaatgaaggccttggccgcagaggtaacagcaacattcagtcgccgattatctccattgaacctggttgttagagaacttacaggagatatgcagttgaccaaaaatgagattgaagaaactcagatgatagtgactactcctgagaagtgggatgttattacacgcaaaagcagtgacatgtcactttcaatgctggttaagctgatcatcattgatgaagtacaccttttaaatgacgatagaggttcagtaattgaggcgctagtagctcggactctccgccaggttgagtctatgcaatcaatgattcgcattgttggcctatctgctaccctgcctacctacttagaggtcgcacattttttgcgggttaatccagacactggacttttcttttttgactcaagctatcgtccagttcctcttgctcagcagtacattgggatcagtgaaagggattacacaaagagaagtgaattattcaatactttgtgttatgagaaggtcaccaagcattggtttttgtccatacccgtaaggatactgggaaaaccgctagaaccctgattgacctagcagcaaaagcaggggaattggaattattttcaagtgcagatcatcctcaatttccattaatcaagaaagatgttagtaaagcaaaaagtcgtgaagttgttgaattttttgaatctggatttggtatacacaatgctggaatgatgcgatctgacagaagtttgatggagcgcttgtttggtgacgggcttttgaaagtccttgtttgtacagcaactttggcttggggagtaaacttaccagctcatacagttgttataaagggcacacagctatatgatcctaaagctggtgggtggcgagacttggggatgcttgatgtgatgcagatctttggacgtgctggaaggccacagtttgataaaagtggcgaaggaattattatcacaacacatgacaaattggcttattacttgaggttattgacaagtcagcttccaatagagagccagttccttggatctctgaaagataatttaaatgctgaagttgctttgggcactgtaacaaatgtcagggaggcttgtacctggcttggctatacatacttatttataaggatgaagactaatcctctggtgtatgggataacttgggaagaggttatgggagatccttctatgggtgcaaagcaaagaacatttattattgatgctgcacgagcactggacaaagctaagatgatgcgctttgatgaaaagagtggtaacttctactgcaccgaacttggtcgaattgcaagtcatttttaccttcagtactccagtgtcgagacttacaatgagatgcttcgacgtcacatgagtgaaagtgagttgattactatggtggcccattcctctgaatttgagaatatcgtagtaagagaagaagaacaggatgaattagaagcccttgcaaggaaagcatgccctttagaaattaagggtgggccgactgacaaacatgggaaaatttcaattctcatacaggtttatatttcccgtgctccaatcgatagctcctctttacattctgatgctcaatacattagtcaaagtttggcacgcataatgagggcactatttgagatttgtctgcgtcggggatggtctgagatgtcatccttattgttgcaatattgcaaggccgtggaccgcaagatatggccccatcttcatccacttaggcagtttgataaggatctttctcctcaggtattgtggaaactcgaggaaagaaatgttgatctggatcatctttatgagatggaggaaaatgaaattggagctctgatccggttttctcatcagggaaagttggtcaagcaatacgttggatacttcccgtatgtcaacctatctgcaaccgtgagcccaatcactaggacagttcttaaagtggacctgcatataactcctgaatttgtgtggaaagatcgttatcatggcatgtcagaacgatggtggatcattgttgaggattctgaaaatgataccatttatcattcagagctattcacattaacgaagaagatggcaagaggaacacctacaaagatatcttttaatgtaccaatatttgaacctcatccgccacagtactatatacatgccatctcagactcatggctacatgctgaaacactcttcactgtttcttttcataatttgacattgccacagacacaaataacacacacagaactcttggacttgaagcctcttccactgagtgctcttggcaacaaaacgtatgaggatctgtacagattttcccatttcaacccgatacaaactcaggcttttcatgttctttatcacactgataacaatgtactcttgggagctccaactgggagtggcaaaacaatttcggcagaacttgcaatgctccatcttttcagtacacaaccagacatgaaggtagtttacattgctcctctaaaggcaatagtacgagaaagaatgaatgattggagaaaacgtcttgtaattcagcttgggaagaagatggttgagatgactggtgacttcactccagatttgatggccctattgtcagctgacatcatcatttctacccctgaaaaatgggatgggattagtcgaaattggcatagcagaagttacgttatgaaggtcgggctcatgatattggatgagatacatcttctgggagctgaccgtggacccatccttgaggtcattgtatcaagaatgcgatacatatcatcacaaacagaacgttcaattcggtttgttggtttatcaacggcattagcaaatgctcgtgatttagctgattggttgggcgttacagatgacggtctattcaatttcaagcctagtgtgagacctgtacctcttgaagtgcatatccagggatatcctgggaaattctattgtccaagaatgaatagcatgaacaaaccagcttatgcagccatatgcactcattcacccaataaaccagttctcatttttgtgtcatcacgtcgacagacaagacttacagctcttgatatcattcagcttgcagcatcagatgaaaaaccaaggcagttcctgagcattgaagacaactccctagacatggttctttcacaggtttctgacagtaatttgaggcatactctgcaatttggcataggtctgcatcatgctggtttaaatgacagagacagatccttggttgaggagcttttttcaaacaataagattcaggtgctggtatgtaccagcacattggcgtggggtgtcaatcttccagctcacctggtcataatcaagggcactgaatactatgatgggaaaacaaaaagatacatagattatgatatcacagatattctgcagatgatgggtcgtgcaggtcggccgcaatacgaccaacatggcaaagctgttattcttgtccatgaaccaaaaaagagcttttacaagaagttcctctacgaaccgtttcctgtggaaagtaatctgagggagcacttgcatgaccacataaatgcagaaattgtttctggcaccatcagcaacaaggaggaggcgattatttatctcacctggacttacctatatcgcagattggttgttaatccggcctattatggattggaggatactgaaacaaacacattgaattcttatctatcaaggttagtcgaaactacatttgaagatcttgaggacagtggatgcataaaagtggatgaccactctgtaaagtacttgattttggggaaaatagcttcacagtattacctgagctacctcactgtttcaatgtttgggtcaaatattggccccaacacaacgttggaagtctttctacacatactgtcagctgcatcagaatttgatgagcttcctgtacggcacaatgaggacaatttgaatcgaatactcagcggaaatgtcccgtatccagttgatcaacaccaccttgatgatccacatgttaaagccaacttactctttcaggcacatttctccagagcagaattgccaataagcgactatgtcactgacttgaaatcagttcttgatcagagcatacgcatcatacaggcaatgattgatgtatgcgcgaatagtggatggcttacgagtgcattgacttgcatgcatctcttgcagatgatcatacagggtctctggtttgagagagattatgaatccctctggatgttgccatccatgaatgatgatatattagaccatctcaagagtagaggagtctcaacagtcccctccttactagatctttcccgtgaagaattgcgtagggtacttcaaccattttctgcgtcagagttgtatcaggatctgcaacatttccctcatgttgatgtgaaagttaagcttcataatgaacaggagcgatccaaacctccaactttaaacatcaggttgcaattgaaaaattcgcgacggtcagcatcaagagcatttgcccctagatttcccaaggcaaaacaagaagcttggtggcttgtcctggggaatgctacaagttcagagctgtatggtctgaaaagaattagttttgcagatcgggtgattaatactcgcatggaattgccacagacgttcaatgtgcaggagacgaagctgatcttggtgtcggattgctacctaggttttgacttggagtattctcttgagcatctcaccaagggttgagtgctttattcagagctgtttgggctgtttcattttgtatgggttcagcaaccagctcatcctagattgatcctgtaatcacgagacatgagttcattccatgaatttttgtttgtatgactacatccctcgtgttcatggttatattatatttaatagctatatatacgagtggataggtttataactttcatgaaatatcttttccgtaagcatagtagatgtttgagctctaaggttatgaccaacaaattgtgtatatggtcgtgcaaaatactattttataatataaactatattatttacatggtgaagtttgaaatagaagatcgagatgagtaagttgctggaattagcctaagg

SEQ ID NO: 81579 - DNA, 6903 bp, Zea Mays
tcaattttgactctcgtcggctccggtatttcgacttccaaaatagccctaacatttaccgaagctcctcccgccggcgcgctgcgatccaactccgagatgctcgcaccgcttccgcgcctgacgagcgcgctccgcggccactacgacgctgatcaggcctacctcctccgcaagagcgccctccaggctctcaccctccccaggccgcatgacgagtggaagttcgctcggaaaatcgtgcctggctgggacgatgcttccagcgaagtgcgtcaggcgtataaacaatttatcggggccgttgtggagttgttgagcggagaggcagtgtctgaagaactctaccaagttgcgcagactgtatatactctatttggtggcgatgacacggagtatgttggtgctaaaaaagtcctttccaaaaggaatgagttggagagccttgtgggctacactgtacaagactcagttttgaaaaagctagctcagttagctcagaagctcgattcccttcaacgagcaagtgcctatgaatctgtacacagaatagcggatgatgtaaatgaaaatgatagaattgaatttggagcagacttcgatttcaagccacttgcccgtttcattgttgatgtttctcttgacgcacccttagaaagtgctgaattgggcagtggtccatttgaaaaatggcagtatgatgcttggagcacatccacaactagtcattcaactgctgttaggggttctgtgagtttgaggtggctgaaagatcagtgtgctttgataactaaaagtggtggctcaatgctctcaggagatgaacttgcaatgaccttgtgcagagtgctcctatcaaataaagcaggcgatcagatagctggtgaacttttggacctggttggcgacaccgcttttgaaatagttcaagatcttcttttgaggacttcagacttcaactctgatcctttgttgctttggttcattagtttgcatgcttccgcttttatcatgataagaatccaaggaactacagttaacctggaattatatttgaggcataggaaagagctagtggatgcaattcaacatggattgtcgatactgaaatctgagaaaatgacctcaggtaatcaaccaaagatgccaacttatggtacacaggtaactgtacaaacagagtctgaacgccagcttgataagattaggaggaaagaggaaagacgtagcaagcgcagtgcagacagtggcaataatgatattggtgttgatgatttttcatcccttcttttggcaagtgaacggaaggaggcatttgatgacgtgattggtagtggagaagggtcagacagttttacagtaacttcccttcctcaaggaaccacaaggaaacacatgaagggttatgaagaagtgaagattccaccaactccaacagcatcactgaaacccaatgagaagctgattgaaataaaagaattagatgagtttgcccaagctgccttccagggatacaagtcactcaatcgtgtgcagagtcgtattttccaagctacatactacaccaatgagaatattttagtgtgtaactggatccagtatctatgcaatatttcctcactcacccccttttcttaactactgtcttctgctatcatagctaactttcataaattttcaggtttgtgccccaacaggtgctgggaaaacaaatattgcaatgattgcagttcttcatgaggttaaacagcacttcagggatggtattttacataaaaacgagtttaagatagtctatgttgctccaatgaaggccttggccgcagaggtaacagcaacattcagtcgccgattatctccattgaacctggttgttagagaacttacaggagatatgcagttgaccaaaaatgagattgaagaaactcagatgatagtgactactcctgagaagtgggatgttattacacgcaaaagcagtgacatgtcactttcaatgctggttaagctgatcatcattgatgaagtacaccttttaaatgacgatagaggttcagtaattgaggcgctagtagctcggactctccgccaggttgagtctatgcaatcaatgattcgcattgttggcctatctgctaccctgcctacctacttagaggtcgcacattttttgcgggttaatccagacactggacttttcttttttgactcaagctatcgtccagttcctcttgctcagcagtacattgggatcagtgaaagggattacacaaagagaagtgaattattcaatactttgtgttatgagaaggttgttgagtccattaagcaaggtcaccaagcattggtttttgtccatacccgtaaggatactgggaaaaccgctagaaccctgattgacctagcagcaaaagcaggggaattggaattattttcaagtgcagatcatcctcaatttccattaatcaagaaagatgttagtaaagcaaaaagtcgtgaagttgttgaattttttgaatctggatttggtatacacaatgctggaatgatgcgatctgacagaagtttgatggagcgcttgtttggtgacgggcttttgaaagtccttgtttgtacagcaactttggcttggggagtaaacttaccagctcatacagttgttataaagggcacacagctatatgatcctaaagctggtgggtggcgagacttggggatgcttgatgtgatgcagatctttggacgtgctggaaggccacagtttgataaaagtggcgaaggaattattatcacaacacatgacaaattggcttattacttgaggttattgacaagtcagcttccaatagagagccagttccttggatctctgaaagataatttaaatgctgaagttgctttgggcactgtaacaaatgtcagggaggcttgtacctggcttggctatacatacttatttataaggatgaagactaatcctctggtgtatgggataacttgggaagaggttatgggagatccttctatgggtgcaaagcaaagaacatttattattgatgctgcacgagcactggacaaagctaagatgatgcgctttgatgaaaagagtggtaacttctactgcaccgaacttggtcgaattgcaagtcatttttaccttcagtactccagtgtcgagacttacaatgagatgcttcgacgtcacatgagtgaaagtgagttgattactatggtggcccattcctctgaatttgagaatatcgtagtaagagaagaagaacaggatgaattagaagcccttgcaaggaaagcatgccctttagaaattaagggtgggccgactgacaaacatgggaaaatttcaattctcatacaggtttatatttcccgtgctccaatcgatagctcctctttacattctgatgctcaatacattagtcaaagtttggcacgcataatgagggcactatttgagatttgtctgcgtcggggatggtctgagatgtcatccttattgttgcaatattgcaaggccgtggaccgcaagatatggccccatcttcatccacttaggcagtttgataaggatctttctcctcaggtattgtggaaactcgaggaaagaaatgttgatctggatcatctttatgagatggaggaaaatgaaattggagctctgatccggttttctcatcagggaaagttggtcaagcaatacgttggatacttcccgtatgtcaacctatctgcaaccgtgagcccaatcactaggacagttcttaaagtggacctgcatataactcctgaatttgtgtggaaagatcgttatcatggcatgtcagaacgatggtggatcattgttgagagctattcacattaacgaagaagatggcaagaggaacacctacaaagatatcttttaatgtaccaatatttgaacctcatccgccacagtactatatacatgccatctcagactcatggctacatgctgaaacactcttcactgtttcttttcataatttgacattgccacagacacaaataacacacacagaactcttggacttgaagcctcttccactgagtgctcttggcaacaaaacgtatgaggatctgtacagattttcccatttcaacccgatacaaactcaggcttttcatgttctttatcacactgataacaatgtactcttgggagctccaactgggagtggcaaaacaatttcggcagaacttgcaatgctccatcttttcagtacacaaccagacatgaaggtagtttacattgctcctctaaaggcaatagtacgagaaagaatgaatgattggagaaaacgtcttgtaattcagcttgggaagaagatggttgagatgactggtgacttcactccagatttgatggccctattgtcagctgacatcatcatttctacccctgaaaaatgggatgggattagtcgaaattggcatagcagaagttacgttatgaaggtcgggctcatgatattggatgagatacatcttctgggagctgaccgtggacccatccttgaggtcattgtatcaagaatgcgatacatatcatcacaaacagaacgttcaattcggtttgttggtttatcaacggcattagcaaatgctcgtgatttagctgattggttgggcgttacagatgacggtctattcaatttcaagcctagtgtgagacctgtacctcttgaagtgcatatccagggatatcctgggaaattctattgtccaagaatgaatagcatgaacaaaccagcttatgcagccatatgcactcattcacccaataaaccagttctcatttttgtgtcatcacgtcgacagacaagacttacagctcttgatatcattcagcttgcagcatcagatgaaaaaccaaggcagttcctgagcattgaagacaactccctagacatggttctttcacaggtttctgacagtaatttgaggcatactctgcaatttggcataggtctgcatcatgctggtttaaatgacagagacagatccttggttgaggagcttttttcaaacaataagattcaggtgctggtatgtaccagcacattggcgtggggtgtcaatcttccagctcacctggtcataatcaagggcactgaatactatgatgggaaaacaaaaagatacatagattatgatatcacagatattctgcagatgatgggtcgtgcaggtcggccgcaatacgaccaacatggcaaagctgttattcttgtccatgaaccaaaaaagagcttttacaagaagttcctctacgaaccgtttcctgtggaaagtaatctgagggagcacttgcatgaccacataaatgcagaaattgtttctggcaccatcagcaacaaggaggaggcgattatttatctcacctggacttacctatatcgcagattggttgttaatccggcctattatggattggaggatactgaaacaaacacattgaattcttatctatcaaggttagtcgaaactacatttgaagatcttgaggacagtggatgcataaaagtggatgaccactctgtaaagtacttgattttggggaaaatagcttcacagtattacctgagctacctcactgtttcaatgtttgggtcaaatattggccccaacacaacgttggaagtctttctacacatactgtcagctgcatcagaatttgatgagcttcctgtacggcacaatgaggacaatttgaatcgaatactcagcggaaatgtcccgtatccagttgatcaacaccaccttgatgatccacatgttaaagccaacttactctttcaggcacatttctccagagcagaattgccaataagcgactatgtcactgacttgaaatcagttcttgatcagagcatacgcatcatacaggcaatgattgatgtatgcgcgaatagtggatggcttacgagtgcattgacttgcatgcatctcttgcagatgatcatacagggtctctggtttgagagagattatgaatccctctggatgttgccatccatgaatgatgatatattagaccatctcaagagtagaggagtctcaacagtcccctccttactagatctttcccgtgaagaattgcgtagggtacttcaaccattttctgcgtcagagttgtatcaggatctgcaacatttccctcatgttgatgtgaaagttaagcttcataatgaacaggagcgatccaaacctccaactttaaacatcaggttgcaattgaaaaattcgcgacggtcagcatcaagagcatttgcccctagatttcccaaggcaaaacaagaagcttggtggcttgtcctggggaatgctacaagttcagagctgtatggtctgaaaagaattagttttgcagatcgggtgattaatactcgcatggaattgccacagacgttcaatgtgcaggagacgaagctgatcttggtgtcggattgctacctaggttttgacttggagtattctcttgagcatctcaccaagggttgagtgctttattcagagctgtttgggctgtttcattttgtatgggttcagcaaccagctcatcctagattgatcctgtaatcacgagacatgagttcattccatgaatttttgtttgtatgactacatccctcgtgttcatggttatattatatttaatagctatatatacgagtggataggtttataactttcatgaaatatcttttccgtaagcatagtagatgtttgagctctaaggttatgaccaacaaattgtgtatatggtcgtgcaaaatactattttataatataaactatattatttacatggtgaagtttgaaatagaagatcgagatgagtaagttgctggaattagcctaagg

SEQ ID NO: 81580 - DNA, 6864 bp, Zea Mays
caattttgactctcgtcggctccggtatttcgacttccaaaatagccctaacatttaccgaagctcctcccgccggcgcgctgcgatccaactccgagatgctcgcaccgcttccgcgcctgacgagcgcgctccgcggccactacgacgctgatcaggcctacctcctccgcaagagcgccctccaggctctcaccctccccaggccgcatgacgagtggaagttcgctcggaaaatcgtgcctggctgggacgatgcttccagcgaagtgcgtcaggcgtataaacaatttatcggggccgttgtggagttgttgagcggagaggcagtgtctgaagaactctaccaagttgcgcagactgtatatactctatttggtggcgatgacacggagtatgttggtgctaaaaaagtcctttccaaaaggaatgagttggagagccttgtgggctacactgtacaagactcagttttgaaaaagctagctcagttagctcagaagctcgattcccttcaacgagcaagtgcctatgaatctgtacacagaatagcggatgatgtaaatgaaaatgatagaattgaatttggagcagacttcgatttcaagccacttgcccgtttcattgttgatgtttctcttgacgcacccttagaaagtgctgaattgggcagtggtccatttgaaaaatggcagtatgatgcttggagcacatccacaactagtcattcaactgctgttaggggttctatagctggtgaacttttggacctggttggcgacaccgcttttgaaatagttcaagatcttcttttgcataggaaagagctagtggatgcaattcaacatggattgtcgatactgaaatctgagaaaatgacctcaggtaatcaaccaaagatgccaacttatggtacacaggtaactgtacaaacagagtctgaacgccagcttgataagattaggaggaaagaggaaagacgtagcaagcgcagtgcagacagtggcaataatgatattggtgttgatgatttttcatcccttcttttggcaagtgaacggaaggaggcatttgatgacgtgattggtagtggagaagggtcagacagttttacagtaacttcccttcctcaaggaaccacaaggaaacacatgaagggttatgaagaagtgaagattccaccaactccaacagcatcactgaaacccaatgagaagctgattgaaataaaagaattagatgagtttgcccaagctgccttccagggatacaagtcactcaatcgtgtgcagagtcgtattttccaagctacatactacaccaatgagaatattttagtttgtgccccaacaggtgctgggaaaacaaatattgcaatgattgcagttcttcatgaggttaaacagcacttcagggatggtattttacataaaaacgagtttaagatagtctatgttgctccaatgaaggccttggccgcagaggtaacagcaacattcagtcgccgattatctccattgaacctggttgttagagaacttacaggagatatgcagttgaccaaaaatgagattgaagaaactcagatgatagtgactactcctgagaagtgggatgttattacacgcaaaagcagtgacatgtcactttcaatgctggttaagctgatcatcattgatgaagtacaccttttaaatgacgatagaggttcagtaattgaggcgctagtagctcggactctccgccaggtaagttcttacacaaaaaaggaacaacttctctctgccttggtgttggcagaattcacagtttaatgattcgtaaagatgagatgaaatataggtgggtatacttcaaattatgcctgtagacattgatgacactatttatccttgttttacatcttatacatgtaatttcttgtgcattaacgatctcaagaatcatggcacaataattaaaaaaacggagacgtaaagacattgtctacctttacatgttttgttgcctgtggttcatatttatgaatcgatcgaatgcaacaggttgagtctatgcaatcaatgattcgcattgttggcctatctgctaccctgcctacctacttagaggtcgcacattttttgcgggttaatccagacactggacttttcttttttgactcaagctatcgtccagttcctcttgctcagcagtacattgggatcagtgaaagggattacacaaagagaagtgaattattcaatactttgtgttatgagaaggttgttgagtccattaagcaaggtcaccaagcattggtttttgtccatacccgtaaggatactgggaaaaccgctagaaccctgattgacctagcagcaaaagcaggggaattggaattattttcaagtgcagatcatcctcaatttccattaatcaagaaagatgttagtaaagcaaaaagtcgtgaagttgttgaattttttgaatctggatttggtatacacaatgctggaatgatgcgatctgacagaagtttgatggagcgcttgtttggtgacgggcttttgaaagtccttgtttgtacagcaactttggcttggggagtaaacttaccagctcatacagttgttataaagggcacacagctatatgatcctaaagctggtgggtggcgagacttggggatgcttgatgtgatgcagatctttggacgtgctggaaggccacagtttgataaaagtggcgaaggaattattatcacaacacatgacaaattggcttattacttgaggttattgacaagtcagcttccaatagagagccagttccttggatctctgaaagataatttaaatgctgaagttgctttgggcactgtaacaaatgtcagggaggcttgtacctggcttggctatacatacttatttataaggatgaagactaatcctctggtgtatgggataacttgggaagaggttatgggagatccttctatgggtgcaaagcaaagaacatttattattgatgctgcacgagcactggacaaagctaagatgatgcgctttgatgaaaagagtggtaacttctactgcaccgaacttggtcgaattgcaagtcatttttaccttcagtactccagtgtcgagacttacaatgagatgcttcgacgtcacatgagtgaaagtgagttgattactatggtggcccattcctctgaatttgagaatatcgtagtaagagaagaagaacaggatgaattagaagcccttgcaaggaaagcatgccctttagaaattaagggtgggccgactgacaaacatgggaaaatttcaattctcatacaggtttatatttcccgtgctccaatcgatagctcctctttacattctgatgctcaatacattagtcaaagtttggcacgcataatgagggcactatttgagatttgtctgcgtcggggatggtctgagatgtcatccttattgttgcaatattgcaaggccgtggaccgcaagatatggccccatcttcatccacttaggcagtttgataaggatctttctcctcaggtattgtggaaactcgaggaaagaaatgttgatctggatcatctttatgagatggaggaaaatgaaattggagctctgatccggttttctcatcagggaaagttggtcaagcaatacgttggatacttcccgtatgtcaacctatctgcaaccgtgagcccaatcactaggacagttcttaaagtggacctgcatataactcctgaatttgtgtggaaagatcgttatcatggcatgtcagaacgatggtggatcattgttgaggattctgaaaatgataccatttatcattcagagctattcacattaacgaagaagatggcaagaggaacacctacaaagatatcttttaatgtaccaatatttgaacctcatccgccacagtactatatacatgccatctcagactcatggctacatgctgaaacactcttcactgtttcttttcataatttgacattgccacagacacaaataacacacacagaactcttggacttgaagcctcttccactgagtgctcttggcaacaaaacgtatgaggatctgtacagattttcccatttcaacccgatacaaactcaggcttttcatgttctttatcacactgataacaatgtactcttgggagctccaactgggagtggcaaaacaatttcggcagaacttgcaatgctccatcttttcagtacacaaccagacatgaaggtagtttacattgctcctctaaaggcaatagtacgagaaagaatgaatgattggagaaaacgtcttgtaattcagcttgggaagaagatggttgagatgactggtgacttcactccagatttgatggccctattgtcagctgacatcatcatttctacccctgaaaaatgggatgggattagtcgaaattggcatagcagaagttacgttatgaaggtcgggctcatgatattggatgagatacatcttctgggagctgaccgtggacccatccttgaggtcattgtatcaagaatgcgatacatatcatcacaaacagaacgttcaattcggtttgttggtttatcaacggcattagcaaatgctcgtgatttagctgattggttgggcgttacagatgacggtctattcaatttcaagcctagtgtgagacctgtacctcttgaagtgcatatccagggatatcctgggaaattctattgtccaagaatgaatagcatgaacaaaccagcttatgcagccatatgcactcattcacccaataaaccagttctcatttttgtgtcatcacgtcgacagacaagacttacagctcttgatatcattcagcttgcagcatcagatgaaaaaccaaggcagttcctgagcattgaagacaactccctagacatggttctttcacaggtttctgacagtaatttgaggcatactctgcaatttggcataggtctgcatcatgctggtttaaatgacagagacagatccttggttgaggagcttttttcaaacaataagattcaggtgctggtatgtaccagcacattggcgtggggtgtcaatcttccagctcacctggtcataatcaagggcactgaatactatgatgggaaaacaaaaagatacatagattatgatatcacagatattctgcagatgatgggtcgtgcaggtcggccgcaatacgaccaacatggcaaagctgttattcttgtccatgaaccaaaaaagagcttttacaagaagttcctctacgaaccgtttcctgtggaaagtaatctgagggagcacttgcatgaccacataaatgcagaaattgtttctggcaccatcagcaacaaggaggaggcgattatttatctcacctggacttacctatatcgcagattggttgttaatccggcctattatggattggaggatactgaaacaaacacattgaattcttatctatcaaggttagtcgaaactacatttgaagatcttgaggacagtggatgcataaaagtggatgaccactctgtaaagtacttgattttggggaaaatagcttcacagtattacctgagctacctcactgtttcaatgtttgggtcaaatattggccccaacacaacgttggaagtctttctacacatactgtcagctgcatcagaatttgatgagcttcctgtacggcacaatgagcggaaatgtcccgtatccagttgatcaacaccaccttgatgatccacatgttaaagccaacttactctttcaggcacatttctccagagcagaattgccaataagcgactatgtcactgacttgaaatcagttcttgatcagagcatacgcatcatacaggcaatgattgatgtatgcgcgaatagtggatggcttacgagtgcattgacttgcatgcatctcttgcagatgatcatacagggtctctggtttgagagagattatgaatccctctggatgttgccatccatgaatgatgatatattagaccatctcaagagtagaggagtctcaacagtcccctccttactagatctttcccgtgaagaattgcgtagggtacttcaaccattttctgcgtcagagttgtatcaggatctgcaacatttccctcatgttgatgtgaaagttaagcttcataatgaacaggagcgatccaaacctccaactttaaacatcaggttgcaattgaaaaattcgcgacggtcagcatcaagagcatttgcccctagatttcccaaggcaaaacaagaagcttggtggcttgtcctggggaatgctacaagttcagagctgtatggtctgaaaagaattagttttgcagatcgggtgattaatactcgcatggaattgccacagacgttcaatgtgcaggagacgaagctgatcttggtgtcggattgctacctaggttttgacttggagtattctcttgagcatctcaccaagggttgagtgctttattcagagctgtttgggctgtttcattttgtatgggttcagcaaccagctcatcctagattgatcctgtaatcacgagacatgagttcattccatgaatttttgtttgtatgactacatccctcgtgttcatggttatattatatttaatagctatatatacgagtggataggtttataactttcatgaaatatcttttccgtaagcatagtagatgtttgagctctaaggttatgaccaacaaattgtgtatatggtcgtgcaaaatactattttataatataaactatattatttacatggtgaagtttgaaatagaagatcgagatgagtaagttgctggaattagcctaagg

SEQ ID NO: 81581 - DNA, 1856 bp, Zea Mays
ctgtattttgctgttatgggcactaggcccacagtgcacttccaggttatgggagatccttctatgggtgcaaagcaaagaacatttattattgatgctgcacgagcactggacaaagctaagatgatgcgctttgatgaaaagagtggtaacttctactgcaccgaacttggtcgaattgcaagtcatttttaccttcagtactccagtgtcgagacttacaatgagatgcttcgacgtcacatgagtgaaagtgagttgattactatggtggcccattcctctgaatttgagaatatcgtagtaagagaagaagaacaggatgaattagaagcccttgcaaggaaagcatgccctttagaaattaagggtgggccgactgacaaacatgggaaaatttcaattctcatacaggtttatatttcccgtgctccaatcgatagctcctctttacattctgatgctcaatacattagtcaaagtttggcacgcataatgagggcactatttgagatttgtctgcgtcggggatggtctgagatgtcatccttattgttgcaatattgcaaggccgtggaccgcaagatatggccccatcttcatccacttaggcagtttgataaggatctttctcctcaggtattgtggaaactcgaggaaagaaatgttgatctggatcatctttatgagatggaggaaaatgaaattggagctctgatccggttttctcatcagggaaagttggtcaagcaatacgttggatacttcccgtatgtcaacctatctgcaaccgtgagcccaatcactaggacagttcttaaagtggacctgcatataactcctgaatttgtgtggaaagatcgttatcatggcatgtcagaacgatggtggatcattgttgaggattctgaaaatgataccatttatcattcagagctattcacattaacgaagaagatggcaagaggaacacctacaaagatatcttttaatgtaccaatatttgaacctcatccgccacagtactatatacatgccatctcagactcatggctacatgctgaaacactcttcactgtttcttttcataatttgacattgccacagacacaaataacacacacagaactcttggacttgaagcctcttccactgagtgctcttggcaacaaaacgtatgaggatctgtacagattttcccatttcaacccgatacaaactcaggcttttcatgttctttatcacactgataacaatgtactcttgggagctccaactgggagtggcaaaacaatttcggcagaacttgcaatgctccatcttttcagtacacaaccagacatgaaggtagtttacattgctcctctaaaggcaatagtacgagaaagaatgaatgattggagaaaacgtcttgtaattcagcttgggaagaagatggttgagatgactggtgacttcactccagatttgatggccctattgtcagctgacatcatcatttctacccctgaaaaatgggatgggattagtcgaaattggcatagcagaagttacgttatgaaggtcgggctcatgatattggatgagatacatcttctgggagctgaccgtggacccatccttgaggtcattgtatcaagaatgcgatacatatcatcacaaacagaacgttcaattcggtttgttggtttatcaacggcattagcaaatgctcgtgatttagctgattggttgggcgttacagatgacggtctattcaatttcaagcctagtgtgagacctgtacctcttgaagtgcatatccaggggatatcctgggaaattctattgtccaagaatgaatagcatgaacaaac

SEQ ID NO: 81582 - DNA, 3966 bp, Zea Mays
tttgctgttatgggcactaggcccacagtgcacttccaggttatgggagatccttctatgggtgcaaagcaaagaacatttattattgatgctgcacgagcactggacaaagctaagatgatgcgctttgatgaaaagagtggtaacttctactgcaccgaacttggtcgaattgcaagtcatttttaccttcagtactccagtgtcgagacttacaatgagatgcttcgacgtcacatgagtgaaagtgagttgattactatggtggcccattcctctgaatttgagaatatcgtagtaagagaagaagaacaggatgaattagaagcccttgcaaggaaagcatgccctttagaaattaagggtgggccgactgacaaacatgggaaaatttcaattctcatacaggtttatatttcccgtgctccaatcgatagctcctctttacattctgatgctcaatacattagtcaaagtttggcacgcataatgagggcactatttgagatttgtctgcgtcggggatggtctgagatgtcatccttattgttgcaatattgcaaggccgtggaccgcaagatatggccccatcttcatccacttaggcagtttgataaggatctttctcctcaggtattgtggaaactcgaggaaagaaatgttgatctggatcatctttatgagatggaggaaaatgaaattggagctctgatccggttttctcatcagggaaagttggtcaagcaatacgttggatacttcccgtatgtcaacctatctgcaaccgtgagcccaatcactaggacagttcttaaagtggacctgcatataactcctgaatttgtgtggaaagatcgttatcatggcatgtcagaacgatggtggatcattgttgaggattctgaaaatgataccatttatcattcagagctattcacattaacgaagaagatggcaagaggaacacctacaaagatatcttttaatgtaccaatatttgaacctcatccgccacagtactatatacatgccatctcagactcatggctacatgctgaaacactcttcactgtttcttttcataatttgacattgccacagacacaaataacacacacagaactcttggacttgaagcctcttccactgagtgctcttggcaacaaaacgtatgaggatctgtacagattttcccatttcaacccgatacaaactcaggcttttcatgttctttatcacactgataacaatgtactcttgggagctccaactgggagtggcaaaacaatttcggcagaacttgcaatgctccatcttttcagtacacaaccagacatgaaggtagtttacattgctcctctaaaggcaatagtacgagaaagaatgaatgattggagaaaacgtcttgtaattcagcttgggaagaagatggttgagatgactggtgacttcactccagatttgatggccctattgtcagctgacatcatcatttctacccctgaaaaatgggatgggattagtcgaaattggcatagcagaagttacgttatgaaggtcgggctcatgatattggatgagatacatcttctgggagctgaccgtggacccatccttgaggtcattgtatcaagaatgcgatacatatcatcacaaacagaacgttcaattcggtttgttggtttatcaacggcattagcaaatgctcgtgatttagctgattggttgggcgttacagatgacggtctattcaatttcaagcctagtgtgagacctgtacctcttgaagtgcatatccagggatatcctgggaaattctattgtccaagaatgaatagcatgaacaaaccagcttatgcagccatatgcactcattcacccaataaaccagttctcatttttgtgtcatcacgtcgacagacaagacttacagctcttgatatcattcagcttgcagcatcagatgaaaaaccaaggcagttcctgagcattgaagacaactccctagacatggttctttcacaggtttctgacagtaatttgaggcatactctgcaatttggcataggtctgcatcatgctggtttaaatgacagagacagatccttggttgaggagcttttttcaaacaataagattcaggtgctggtatgtaccagcacattggcgtggggtgtcaatcttccagctcacctggtcataatcaagggcactgaatactatgatgggaaaacaaaaagatacatagattatgatatcacagatattctgcagatgatgggtcgtgcaggtcggccgcaatacgaccaacatggcaaagctgttattcttgtccatgaaccaaaaaagagcttttacaagaagttcctctacgaaccgtttcctgtggaaagtaatctgagggagcacttgcatgaccacataaatgcagaaattgtttctggcaccatcagcaacaaggaggaggcgattatttatctcacctggacttacctatatcgcagattggttgttaatccggcctattatggattggaggatactgaaacaaacacattgaattcttatctatcaaggttagtcgaaactacatttgaagatcttgaggacagtggatgcataaaagtggatgaccactctgtaaagtacttgattttggggaaaatagcttcacagtattacctgagctacctcactgtttcaatgtttgggtcaaatattggccccaacacaacgttggaagtctttctacacatactgtcagctgcatcagaatttgatgagcttcctgtacggcacaatgaggacaatttgaatcgaatactcagcggaaatgtcccgtatccagttgatcaacaccaccttgatgatccacatgttaaagccaacttactctttcaggcacatttctccagagcagaattgccaataagcgactatgtcactgacttgaaatcagttcttgatcagagcatacgcatcatacaggcaatgattgatgtatgcgcgaatagtggatggcttacgagtgcattgacttgcatgcatctcttgcagatgatcatacagggtctctggtttgagagagattatgaatccctctggatgttgccatccatgaatgatgatatattagaccatctcaagagtagaggagtctcaacagtcccctccttactagatctttcccgtgaagaattgcgtagggtacttcaaccattttctgcgtcagagttgtatcaggatctgcaacatttccctcatgttgatgtgaaagttaagcttcataatgaacaggagcgatccaaacctccaactttaaacatcaggttgcaattgaaaaattcgcgacggtcagcatcaagagcatttgcccctagatttcccaaggcaaaacaagaagcttggtggcttgtcctggggaatgctacaagttcagagctgtatggtctgaaaagaattagttttgcagatcgggtgattaatactcgcatggaattgccacagacgttcaatgtgcaggagacgaagctgatcttggtgtcggattgctacctaggttttgacttggagtattctcttgagcatctcaccaagggttgagtgctttattcagagctgtttgggctgtttcattttgtatgggttcagcaaccagctcatcctagattgatcctgtaatcacgagacatgagttcattccatgaatttttgtttgtatgactacatccctcgtgttcatggttatattatatttaatagctatatatacgagtggataggtttataactttcatgaaatatcttttccgtaagcatagtagatgtttgagctctaaggttatgaccaacaaattgtgtatatggtcgtgcaaaatactattttataatataaactatattatttacatggtgaagtttgaaatagaagatcgagatgagtaagttgctggaattagcctaagg

SEQ ID NO: 81583 - DNA, 1484 bp, Zea Mays
ccttgacttacctatatcgcagattggttgttaatccggcctattatggattggaggatactgaaacaaacacattgaattcttatctatcaaggttagtcgaaactacatttgaagatcttgaggacagtggatgcataaaagtggatgaccactctgtaaagtacttgattttggggaaaatagcttcacagtattacctgagctacctcactgtttcaatgtttgggtcaaatattggccccaacacaacgttggaagtctttctacacatactgtcagctgcatcagaatttgatgagcttcctgtacggcacaatgaggacaatttgaatcgaatactcagcggaaatgtcccgtatccagttgatcaacaccaccttgatgatccacatgttaaagccaacttactctttcaggcacatttctccagagcagaattgccaataagcgactatgtcactgacttgaaatcagttcttgatcagagcatacgcatcatacaggcaatgattgatgtatgcgcgaatagtggatggcttacgagtgcattgacttgcatgcatctcttgcagatgatcatacagggtctctggtttgagagagattatgaatccctctggatgttgccatccatgaatgatgatatattagaccatctcaagagtagaggagtctcaacagtcccctccttactagatctttcccgtgaagaattgcgtagggtacttcaaccattttctgcgtcagagttgtatcaggatctgcaacatttccctcatgttgatgtgaaagttaagcttcataatgaacaggagcgatccaaacctccaactttaaacatcaggttgcaattgaaaaattcgcgacggtcagcatcaagagcatttgcccctagatttcccaaggcaaaacaagaagcttggtggcttgtcctggggaatgctacaagttcagagctgtatggtctgaaaagaattagttttgcagatcgggtgattaatactcgcatggaattgccacagacgttcaatgtgcaggagacgaagctgatcttggtgtcggattgctacctaggttttgacttggagtattctcttgagcatctcaccaagggttgagtgctttattcagagctgtttgggctgtttcattttgtatgggttcagcaaccagctcatcctagattgatcctgtaatcacgagacatgagttcattccatgaatttttgtttgtatgactacatccctcgtgttcatggttatattatatttaatagctatatatacgagtggataggtttataactttcatgaaatatcttttccgtaagcatagtagatgtttgagctctaaggttatgaccaacaaattgtgtatatggtcgtgcaaaatactattttataatataaactatattatttacatggtgaagtttgaaatagaagatcgagatgagtaagttgctggaattagcctaagg

SEQ ID NO: 81584 - DNA, 595 bp, Zea Mays
cttacctatatcgcagattggttgttaatccggcctattatggattggaggatactgaaacaaacacattgaattcttatctatcaaggttagtcgaaactacatttgaagatcttgaggacagtggatgcataaaagtggatgaccactctgtaaagtacttgattttggggaaaatagcttcacagtattacctgagctacctcactgtttcaatgtttgggtcaaatattggccccaacacaacgttggaagtctttctacacatactgtcagctgcatcagaatttgatgagcttcctgtacggcacaatgaggacaatttgaatcgaatactcagcggaaatgtcccgtatccagttgatcaacaccaccttgatgatccacatgttaaagccaacttactctttcaggcacatttctccagagcagaattgccaataagcgactatgtcactgacttgaaatcagttcttgatcagagcatacgcatcatacaggcaatgattgatgtatgcgcgaatagtggatggcttacgagtgcattgacttgcatgcatctcttgcagatgatcatacagcttttctattttta

SEQ ID NO: 81585 - DNA, 1119 bp, Zea Mays
cttacctatatcgcagattggttgttaatccggcctattatggattggaggatactgaaacaaacacattgaattcttatctatcaaggttagtcgaaactacatttgaagatcttgaggacagtggatgcataaaagtggatgaccactctgtaaagtacttgattttggggaaaatagcttcacagtattacctgagctacctcactgtttcaatgtttgggtcaaatattggccccaacacaacgttggaagtctttctacacatactgtcagctgcatcagaatttgatgagcttcctgtacggcacaatgaggacaatttgaatcgaatactcagcggaaatgtcccgtatccagttgatcaacaccaccttgatgatccacatgttaaagccaacttactctttcaggcacatttctccagagcagaattgccaataagcgactatgtcactgacttgaaatcagttcttgatcagagcatacgcatcatacaggcaatgattgatgtatgcgcgaatagtggatggcttacgagtgcattgacttgcatgcatctcttgcagatgatcatacagggtctctggtttgagagagattatgaatccctctggatgttgccatccatgaatgatgatatattagaccatctcaagagtagaggagtctcaacagtcccctccttactagatctttcccgtgaagaattgcgtagggtacttcaaccattttctgcgtcagagttgtatcaggatctgcaacatttccctcatgttgatgtgaaagttaagcttcataatgaacaggagcgatccaaacctccaactttaaacatcaggttgcaattgaaaaattcgcgacggtcagcatcaagagcatttgcccctagatttcccaaggcaaaacaagaagcttggtggcttgtcctggggaatgctacaagttcagagctgtatggtctgaaaagaattagttttgcagatcgggtgattaatactcgcatggaattgccacagacgttcaatgtgcagattgtacagttgcgcctgagacatctattactacacagttggctttttacttgtcgggataccattacatcctgttagtctgctg

SEQ ID NO: 81586 - DNA, 300 bp, Zea Mays
cagcattatttggaaacatcatagactgaatgatgttgggtgtaatcttgttaggttgcataccagttaggcgctgtgctgatatgtttgtccatacattcttgaacactgttgcagagttgctttgctgaggctgctgctgcagcatgggtgcaggaccagatctatcatctgccataggatactgttggcctgatcctaattgggggaaacacgcaattggttgcccagtattttctgtttctgaactgtgaaatggtgaagatagagaattttgatgctgaggagtcagtgactggc

SEQ ID NO: 81587 - DNA, 1641 bp, Zea Mays
gagacagaccaatgttcattccagaactccccatagcacggttctgcaagatgtaagatcccattgcttgctgactagactgacctaaattttcagattccttcccagcagatacagaatgccttctgggggcagaatcacttgttatgtgtcgaccatggtttgaaatgtgtgtttctctttcgttagggattgcatttagatattcctgattgaaatcacctggtctttgttctgcgctttttcctggtgactcagaggtctctggagctctatgtgtcagattacggttcatgccaatttgctcaccactctgactagtgaccatctggtaatgatcctgtgtcatcattggcatgcttgagctcatcatgctaatatttttaccatctgaactttcattagtagcgcttacatcagacctcctctgctgaaatctctggactgaattggcattacctccagttgacttccaagagttctcattgctattaaagatattttggctattgcacatgtcttgtccaagtgcattgttagctttccagtcattttgattattactggactctctgttgatattgtgatcagttgcaatttgttgtgacatcccaaatccatgtccaccaggtggtgtagcatgtacaccagttgactgcaaattacttctgagcagttcagtcttttgatgcggccaggttccatttactaggtgcgcttgtccttgccttgcatcagagtgaatttgttttatgccttgctgaaagtaccccttgttgacttcagaagttgattgatgattgttaacaggagcattagaagattcatgagacatatggtcccttcgctcggatggaggccttatgacatgctgaaaactggcaaggtttgggttattcattgttccatcagcatagctggacgctggcgaaggacgtgcattttctaggtttgcaccacttaatccagtaaacttactaccattgcggcctgataaatttgcattgctagccatcacctgctcagttttatggaaactcaagccactccactcttctttgggactttcactggttgtagactggagagcttcctgcataagggcactccagctaccgctctgtagagatgagtagccaccaccatagttgtcattgtccaaagaattgacattgtcattgtcacccctcaacaaagctccccagttgctatcctcgtcactcccaaataagattttctcctcagtagggtcaaggctagccccacgactcgcttgccctacctgcattgctgatttctcttgcatgcccgcttgaagatcaacttggtttggcctaccatgaaaatcttgggtttgaaaaccatgttgtagttgattcattgtaaccggactgcctgccctgatattatcaccttgactttgcatcagactgttatttaagaagcccccttttccacgaaaattatgcatcaaactggtggtaccttgcatatgaagaccaagttcgttcattgaagagttgaatggtctggatgtcttttctgactgaactggaccaacccttgccgcttcactctgaggatcagcaggaatccctaaaaattgggaatactggtttccaggccctctactgctggtag

SEQ ID NO: 81588 - DNA, 697 bp, Zea Mays
aagatatgcataccaatatggatgatgaaagaaaccatcaaaaccaggaattcctcggagcacatcccagattaattgttagcccccgaattcaagctcagatcacatacaacaaacaagcaaaacaaaacaagcacagatacaatgtgaccttccaaaaattcccaaaactgaaatatccccaaaagaaccatccatgtatacaatgggaagcgggtggaggctcaccagatcggtaaaagtaagatctaagtacatacatttacgtagaggtaacattgtttgtcgttgtctagggaacatactctctgctggttcatccaagttagtccacttcttaactcgcctgcgactgcgaaaggcgaggagaggactaagcatctacatgacagcataagtttaacgtcgagcatctacacaaacacgaacagacataatgcaaggtcaacttccaagaactggcataataaataataatatcaaatcagtgaggagataaaccttatggtctgtagtctactgagcaaacaatgcacataacctagaattgagctgatcaggctcatacagtctcattcatggtcatttatatgtgtctcaattttagcttgtatctgttactatgcccttcagcattcttctcagttcttgttcccactgttcttcaattgccaaatctgccctcagttttcgagcg

SEQ ID NO: 81589 - DNA, 779 bp, Zea Mays
ctaaaagaaaaaaaggatcgacatcgttctctattagctgttattggctaaaagagcagaagataaaggtgcatcatgctacgaaagctgaaggcacttaaatagagtcagtgacaccagggtatatttaaaatcactcatgcgccaaatctgcacaaacaaaacataacaaatatacaaggcaattatatagaagatttagtaactctaattgactatggaatacagattgatatttgtcttataaaatcatttgtttacaatattgcaagaaagaggtggtacctgcagtggatataggattgcatcatgggagtcttccacttggattttctaacattctagatgcctatttccaatgcgcaaaggtgtgtcttatgagatttattatgtcaaaccaatttagcagctgcgatataaatcagataggtaacaaccttttaatagggattcaaacaaatgacaagaataaaaatattgtagttctccaaagtcatgtgctttttatcgagctatcattagatacaaactcatagttcagttttttgttgtactgaaattcagtggccgaagggcttcatccatgagtcaatcatttttaatagaattgaataggaaacaagggttaagaccgtatgaaaatgtaatctgcataactgagccttgcagtaatcctcctctagatcaggattatcttgaagggattcaagacatgcagcaacaaaatattcctagtcaatatcataacgtcaagaaccttcttgtactgattctaaaaa

SEQ ID NO: 81590 - DNA, 3598 bp, Zea Mays
gagcgcgagcgggggaggggaaggggagaagcaagcgagacgtcacgggagcagagcatagcctgatagctccattgccgcttgccggccatcgcctagccgccgcccggctcccgggaagagaaatcagcccccatccccaatccctcgcccccccaaaatcccctggggattcgccgatagggccccccccgtgccgccccgtattttgcactgctcgcacgcggcgacgagcattgctatttccttcttttttacctattagcatgtctctgcccaatgccaccgcctcgccgccgccgccgtcgccggaaccctaggccgccggactcggggctcccgtcggcgggggaggatgcagctgcggatctcgccgagcatgcgcagcatcaccatctccagcagcaatggcgtcgtcgactccatgaaggtgcgcgtcgcgccgcagccgcccccgcccccgccgccgccgcacggggccgcccggcgcggcgggggtggcggagggggatggtattggcgcgcggtcgcgttcccgcttgtcgttgcgctcggctgcctcctgcccttcgccttcatcctcgccgccgtccccgcgctcgaggcaggcggaagcaagtgctcctccgtcgattgcttggggaggcgaatagggcctagtttccttggtaggcagggaggtgattctacaaggctggtgcaagatctgtatagattttttgaccaagttaacaaggaggaattcccatccgatgagaagttaccagaatcattcagggatttccttttggagatgaaggataaccattatgatgctagaacatttgccgttaggttgaaagctacgatggaaaccatggataaggaggtaaagaggtcaaggttggcagaacagctgtataaacattatgctgcaacagctattcccaaaggaatccattgtttgtctctgcgccttacggatgaatactcctcaaatgctcatgcacggaaacagttaccgccaccagaactgttacctttgctttctgataattccctccaacattatattctagccagtgataatattcttgctgcttcagttgttgtcagctcaattgtacgatcttcctcactgcctgagaaagtagtctttcatgttattaccgataagaaaacatatcctgggatgcattcgtggtttgctcttaattccatagctcctgcaatagttgaagtaaaaggtgttcaccagtttgcttggctgacaagagaaaatgttccggtactagaggctatagaaaaccatcgtggagtcagaaatcactatcatggagatcatggaacagtttccagtgcaagtgacaatcctagggtgcttgcttcaaagttgcaggctcggagccctaaatacatatccctgctgaaccatctccgtatttatttgcctgaggtgcctggccatcagctttctatctgtcacgtttcatttttttaccggtttatttaaacatttcatattgatgtgtcaaccagattccatggtcatgctttctagtatatctttacagtagggcattaggttttttagggaaaaaattctttgcatccaggatgcaaagaatctcttttacatcccctcacatccaccacctggtggtccatataaatagaagaaaaacaaattactagaaggttaagttgcaaattttaatatgtttttgtgggccttcaagtgatggatgtgaggggctgtaaaggagcgtgtttgcatccgggatgtacataatttttttttccgttttttaggtgattgtctccaaggctcctgattaaatgagcttgtaaaatatatgctgcatgcttcattgatagaacaaaggtggatgggatagtctactattagatgtagtaggacataaccaacttcaatgtagtgactatgtgatatcgcatgcatttatgcatttaatttgactgaatgcttctatgagaagaacatttgtatgggctaaagcttactgaattagttagtatgacctttgcagttacctactagatcattagccattaccatgtgatgcatgctgaaacttgataattaacagatacccgactaaccattgcagtattaaggttcatgtttagttctctttctatatctgattcaaatgaagatattcaaatgtgtttctattttgtttggatcattatcacacgttaattgtgtacttttttgtgctgctaatgtgatgagctgttatattccaccacctccttttagtttccattatcgctttcccagttctagtaattatacagtacagctttaaaactagcttatacttgtactctgtagcaaagattgtgaaatttatcatgtacaattgtagattttgtacatctttttaacctaattcgttcacttctcttcaatcagctctttcccaacctcaacaaggtggtcttcctcgatgatgacattgttgttcagcgtgacttgtctcccctttgggcgatcaatcttgaagggaaggtgaatggagctgtggaaacatgcagaggggaagacagctgggtgatgtctaagcgtttcaggacatatttcaacttctcgcatcccgtgatagctcggagtcttgacccagatgaatgtgcttgggcatatggtatgaatatatttgatctggcagcttggaggaagacaaatatcagggatacatatcatttctggttgaaggagaatctaaaatctggtcttacactctggaaatttggtactttaccaccatcccttatagcatttaggggtcatgtgcatggcatagacccatcatggcacctgcttggcttaggataccaagacaagacagatattgagagtgtcaggagggctgcagtgatacattacaatggacagtgcaagccatggctagacattgcttttaagaacctacaaccattttggacaaagcatgtaaactactccaacgactttgttaaaaactgccatattttggagcctcagcatgtcaaggaatgacctgtaggctgtagcaaataccggacacacggagggagtatagtttatgattcgtttgttggctggagagactgactgttgctggatgataagtatactggttaatcaagaaagcaaccagcattcaatggaactgaccatcccctgtgaaaactgccaggagttttcatctgtaccataggggaacacaattcttaccatctgtatcatattggtgcatcattctttcctatactgtagctgcgcaaaaaggggctctgggactgggctgatccttggtcgcagaacaacatcagaaggctagaagattgaatgcttggttgatcaagacgaagaaaggaggcggatattatgaggtggcaagtttatatgctttacatccatccatttaattctttttacactcgagcattgaaattttgttctggtagttttgtgattgcttcggtaggttcgagatgattgtagtagagatgccattgtttctggagtaacctacaggatattgttacgattgttgacatactaaagatgtgcagataattctttcaagagtatttgcgctaaactgtg

SEQ ID NO: 81591 - DNA, 2472 bp, Zea Mays
gagcgcgagcgggggaggggaaggggagaagcaagcgagacgtcacgggagcagagcatagcctgatagctccattgccgcttgccggccatcgcctagccgccgcccggctcccgggaagagaaatcagcccccatccccaatccctcgcccccccaaaatcccctggggattcgccgatagggccccccccgtgccgccccgtattttgcactgctcgcacgcggcgacgagcattgctatttccttcttttttacctattagcatgtctctgcccaatgccaccgcctcgccgccgccgccgtcgccggaaccctaggccgccggactcggggctcccgtcggcgggggaggatgcagctgcggatctcgccgagcatgcgcagcatcaccatctccagcagcaatggcgtcgtcgactccatgaaggtgcgcgtcgcgccgcagccgcccccgcccccgccgccgccgcacggggccgcccggcgcggcgggggtggcggagggggatggtattggcgcgcggtcgcgttcccgcttgtcgttgcgctcggctgcctcctgcccttcgccttcatcctcgccgccgtccccgcgctcgaggcaggcggaagcaagtgctcctccgtcgattgcttggggaggcgaatagggcctagtttccttggtaggcagggaggtgattctacaaggctggtgcaagatctgtatagattttttgaccaagttaacaaggaggaattcccatccgatgagaagttaccagaatcattcagggatttccttttggagatgaaggataaccattatgatgctagaacatttgccgttaggttgaaagctacgatggaaaccatggataaggaggtaaagaggtcaaggttggcagaacagctgtataaacattatgctgcaacagctattcccaaaggaatccattgtttgtctctgcgccttacggatgaatactcctcaaatgctcatgcacggaaacagttaccgccaccagaactgttacctttgctttctgataattccctccaacattatattctagccagtgataatattcttgctgcttcagttgttgtcagctcaattgtacgatcttcctcactgcctgagaaagtagtctttcatgttattaccgataagaaaacatatcctgggatgcattcgtggtttgctcttaattccatagctcctgcaatagttgaagtaaaaggtgttcaccagtttgcttggctgacaagagaaaatgttccggtactagaggctatagaaaaccatcgtggagtcagaaatcactatcatggagatcatggaacagtttccagtgcaagtgacaatcctagggtgcttgcttcaaagttgcaggctcggagccctaaatacatatccctgctgaaccatctccgtatttatttgcctgagctctttcccaacctcaacaaggtggtcttcctcgatgatgacattgttgttcagcgtgacttgtctcccctttgggcgatcaatcttgaagggaaggtgaatggagctgtggaaacatgcagaggggaagacagctgggtgatgtctaagcgtttcaggacatatttcaacttctcgcatcccgtgatagctcggagtcttgacccagatgaatgtgcttgggcatatggtatgaatatatttgatctggcagcttggaggaagacaaatatcagggatacatatcatttctggttgaaggagaatctaaaatctggtcttacactctggaaatttggtactttaccaccatcccttatagcatttaggggtcatgtgcatggcatagacccatcatggcacctgcttggcttaggataccaagacaagacagatattgagagtgtcaggagggctgcagtgatacattacaatggacagtgcaagccatggctagacattgcttttaagaacctacaaccattttggacaaagcatgtaaactactccaacgactttgttaaaaactgccatattttggagcctcagcatgtcaaggaatgacctgtaggctgtagcaaataccggacacacggagggagtatagtttatgattcgtttgttggctggagagactgactgttgctggatgataagtatactggttaatcaagaaagcaaccagcattcaatggaactgaccatcccctgtgaaaactgccaggagttttcatctgtaccataggggaacacaattcttaccatctgtatcatattggtgcatcattctttcctatactgtagctgcgcaaaaaggggctctgggactgggctgatccttggtcgcagaacaacatcagaaggctagaagattgaatgcttggttgatcaagacgaagaaaggaggcggatattatgagctacgagatcaccggtcttttgttcttcgcgaggctagtcctaccttgtccgtagcactgtgctgaagcatgaacgcc

SEQ ID NO: 81592 - DNA, 1247 bp, Zea Mays
agaacgtgtgatttgcttgctcgcccatgagcttcagattcaagaagattgcttggggaggcgaatagggcctagtttccttggtaggcagggaggtgattctacaaggctggtgcaagatctgtatagattttttgaccaagttaacaaggaggaattcccatccgatgagaagttaccagaatcattcagggatttccttttggagatgaaggataaccattatgatgctagaacatttgccgttaggttgaaagctacgatggaaaccatggataaggaggtaaagaggtcaaggttggcagaacagctgtataaacattatgctgcaacagctattcccaaaggaatccattgtttgtctctgcgccttacggatgaatactcctcaaatgctcatgcacggaaacagttaccgccaccagaactgttacctttgctttctgataattccctccaacattatattctagccagtgataatattcttgctgcttcagttgttgtcagctcaattgtacgatcttcctcactgcctgagaaagtagtctttcatgttattaccgataagaaaacatatcctgggatgcattcgtggtttgctcttaattccatagctcctgcaatagttgaagtaaaaggtgttcaccagtttgcttggctgacaagagaaaatgttccggtactagaggctatagaaaaccatcgtggagtcagaaatcactatcatggagatcatggaacagtttccagtgcaagtgacaatcctagggtgcttgcttcaaagttgcaggctcggagccctaaatacatatccctgctgaaccatctccgtatttatttgcctgagctctttcccaacctcaacaaggtggtcttcctcgatgatgacattgttgttcagcgtgacttgtctcccctttgggcgatcaatcttgaagggaaggtgaatggagctgtggaaacatgcagaggggaagacagctgggtgatgtctaagcgtttcaggacatatttcaacttctcgcatcccgtgatagctcggagtcttgacccagatgaatgtgcttgggcatatggtatgaatatatttgatctggcagcttggaggaagacaaatatcagggatacatatcatttctggttgaaggagattttgtactgtgtacagtgttccaaaatctaaaaaagaaaccttgattcaacatttttgtgtaaatgtaaaaagtgaatatcttttttctgcc

SEQ ID NO: 81593 - DNA, 1837 bp, Zea Mays
aacggaggctggactggattcttgaagaggcttccattccatggggggtgtggttttctggagtaggaaagggaggtggaggtggacgccagtcttcagcggcaccaccgcaagaaagcgcgcctattggaagagcggaaatgaacagcagcggggaatttgatgctgcattcgcagccacaattgcagcagcagcatttgcaattgctgcccgtgaagagaagcttgcagctcagaagaagtctgtccccatcgaggaggtgccacgagccctgtcgctagtcaagagagctggaagcaccaaaaaacctgcgggaggcaacaaaatctcaagatggtttagcggcaaggagcctctagaacacgacgacgacggtccagtgagcaggccactgaaaccagcacctggaaagcccgagggtatgcctgcagatcacaaggtggcacccaagattcttgagacttctctgagtgtgaggaagggttcagggtcctccggcaagacaacagacaggaaagggagcaagaagtttgagcaagaacatgttcagaaagcgccatcgatcatcaggccatctacatcataccattctagacggaatggagaagacgcagcaggagtagctgctattggcggcacgagatctaaggctgatgagtgggagaaggcaaagcttgcaaaagttagagaggagtacgaaaagatgatggagaccatagctgaatgggaaactgagaagaagactgtgctggacagaaagagagcaaaagcactagaagaatacaaccaggagatgacaaggatcagcaagattgctggaggagcaaggtcgatggcagaggaacgaaaatacaacgacgagaataagatcaaagagaaggcgcacaagatacgatccacaagaaagcctccccgcacatgtgcttgcttttgagaatagttctatacactgaaatttggaaccgtatgaaagaagtgtgatttgaagtcactattgtaaaagtcacacaatagtgacgtactgtattgtaatatgtatttggctttgacaagatattagtgtagagttgtatcccccttcaaaaagagagttgtatccaacacgcaacatattgacgctttccactgaaagcaacatcagcatgtttgaaggacgtggaattcagatagagagagaggaagatacatgcatcaatattcaagatgaagcctggagtaggaactgcccccaacaactatgagaaaggagtacatatattcttcagaaaagaacgaaattcaggattctcatcgcagagtgtttgatacaagtacttcaaagaaaatgggaaggaagtgcatttgccttttgaaaggaaactattacatatggcagacagcagacagcaggtaataacacaaaacttgagacattgttaaaactatatatgtggttatggtcggactctgaccattgatgtctcactgcagttcctcatgatgccaatgagttgaagagctttaaacagcaagggcggagaaactaaaatgtaatttcaatcaccgctacagatcctcagcatcctgtttagatgatttggggtgcccttcatactctaacttcacccctaagcttgcagtgatgaccctgaatttcagccttatcttctccatcacgtcttgaatttgttcattctccggatcggacagcggataactgcccaccagtgcagccagttgctcgatattcttcctgacccgagctgtgaaggcattctgatcaatgagaattgcagacgtccacacatccagacagccctgaaagaaacccagttcttcaccgacctggaaacccat

SEQ ID NO: 81594 - DNA, 1845 bp, Zea Mays
cagacctccatctgctcaaggggtgtggttttctggagtaggaaagggaggtggaggtggacgccagtcttcagcggcaccaccgcaagaaagcgcgcctattggaagagcggaaatgaacagcagcggggaatttgatgctgcattcgcagccacaattgcagcagcagcatttgcaattgctgcccgtgaagagaagcttgcagctcagaagaagtctgtccccatcgaggaggtgccacgagccctgtcgctagtcaagagagctggaagcaccaaaaaacctgcgggaggcaacaaaatctcaagatggtttagcggcaaggagcctctagaacacgacgacgacggtccagtgagcaggccactgaaaccagcacctggaaagcccgagggtatgcctgcagatcacaaggtggcacccaagattcttgagacttctctgagtgtgaggaagggttcagggtcctccggcaagacaacagacaggaaagggagcaagaagtttgagcaagaacatgttcagaaagcgccatcgatcatcaggccatctacatcataccattctagacggaatggagaagacgcagcaggagtagctgctattggcggcacgagatctaaggctgatgagtgggagaaggcaaagcttgcaaaagttagagaggagtacgaaaagatgatggagaccatagctgaatgggaaactgagaagaaggtgaaggcgagacgccataaagaacagagagagactgtgctggacagaaagagagcaaaagcactagaagaatacaaccaggagatgacaaggatcagcaagattgctggaggagcaaggtcgatggcagaggaacgaaaatacaacgacgagaataagatcaaagagaaggcgcacaagatacgatccacaagaaagcctccccgcacatgtgcttgcttttgagaatagttctatacactgaaatttggaaccgtatgaaagaagtgtgatttgaagtcactattgtaaaagtcacacaatagtgacgtactgtattgtaatatgtatttggctttgacaagatattagtgtagagttgtatcccccttcaaaaagagagttgtatccaacacgcaacatattgacgctttccactgaaagcaacatcagcatgtttgaaggacgtggaattcagatagagagagaggaagatacatgcatcaatattcaagatgaagcctggagtaggaactgcccccaacaactatgagaaaggagtacatatattcttcagaaaagaacgaaattcaggattctcatcgcagagtgtttgatacaagtacttcaaagaaaatgggaaggaagtgcatttgccttttgaaaggaaactattacatatggcagacagcagacagcaggtaataacacaaaacttgagacattgttaaaactatatatgtggttatggtcggactctgaccattgatgtctcactgcagttcctcatgatgccaatgagttgaagagctttaaacagcaagggcggagaaactaaaatgtaatttcaatcaccgctacagatcctcagcatcctgtttagatgatttggggtgcccttcatactctaacttcacccctaagcttgcagtgatgaccctgaatttcagccttatcttctccatcacgtcttgaatttgttcattctccggatcggacagcggataactgcccaccagtgcagccagttgctcgatattcttcctgacccgagctgtgaaggcattctgatcaatgagaattgcagacgtccacacatccagacagccctgaaagaaacccagttcttcaccgacctggaaacccat

SEQ ID NO: 81595 - DNA, 1279 bp, Zea Mays
atggcagtcggcggtctccagggagcgaagaagcgcaagcgcgagcacgcggaagggaaggcaaagcctcggaagcaagtcaagggaggcggggacggagcgaagcggaagagccactcggccgccggcggctacacggcccatggcggcgccggcgaagttgtggcgaggaagaagaccccggttacccccaaggagaagcgcctcgcggccaagacactctatgagttcgatgatctcgagagcatcattgataggacactaaagcgcgattttgacaccgaggaagcactctggttgcttaagataggtcttgtgtgcatcccggatagccctaagatcaagccctccatgtcaatggttgctaagatactgcaaggtccatttggaggtccaggatgtcaaaatcaagaacatgagaagcactttgagcattttacacctaatatgagcaaaacacgaaatgaatctgcatttcctcaggatgaaattgactcacatagagagcatatttataatgaactgacctcagattcaattgcttcaaagaagccaaaaataaggaagagagaaaataacaattctgtttcaagttctgctcccaacattcctaatactcaagattttatcactaccttctgtgaggtggtggaggatttctgtggaaaaaccgaaattcctgaagatggaaattgcggtgactggttgtcaatcccacttggtgatgttaaggttctcgtgaatgaaattacatctgttcgatccaaaaggatattgcatgaggttcctatggatacagttacaaggttattggatgtgattgatcgtcagattcgatattctcaagtcagcatgaacaaggtcgaggcattgtacaggttgttcaagaagattggcaacaccttcattgatgatgggctgattaacaaggctctttcaaatggcaagcccactgttgttgagttttatgcaaactggtatgaagtctgcagggaactagctctagatatctacaaagctgaacaacaatacaagtctgcagggaactagactctgagaaccctgttgctgatgtggagagcattgtagccaagggcataagagatggtgcaataaatgccaccatagatcaagcaaatggctggatggtatggaaggaaactggtgatgtctactctacaaatgagccatagatcatacaaatgagcccttgatgccacccaggattggggttttgcagagcctgcgatttatgtgagttaacatatcgatcttgaat

SEQ ID NO: 81596 - DNA, 2104 bp, Zea Mays
atggcagtcggcggtctccagggagcgaagaagcgcaagcgcgagcacgcggaagggaaggcaaagcctcggaagcaagtcaagggaggcggggacggagcgaagcggaagagccactcggccgccggcggctacacggcccatggcggcgccggcgaagttgtggcgaggaagaagaccccggttacccccaaggagaagcgcctcgcggccaagacactctatgagttcgatgatctcgagagcatcattgataggacactaaagcgcgattttgacaccgaggaagcactctggttgcttaagataggtcttgtgtgcatcccggatagccctaagatcaagccctccatgtcaatggttgctaagatactgcaaggtccatttggaggtccaggatgtcaaaatcaagaacatgagaagcactttgagcattttacacctaatatgagcaaaacacgaaatgaatctgcatttcctcaggatgaaattgactcacatagagagcatatttataatgaactgacctcagattcaattgcttcaaagaagccaaaaataaggaagagagaaaataacaattctgtttcaagttctgctcccaacattcctaatactcaagattttatcactaccttctgtgaggtggtggaggatttctgtggaaaaaccgaaattcctgaagatggaaattgcggtgactggttgtcaatcccacttggtgatgttaaggttctcgtgaatgaaattacatctgttcgatccaaaaggatattgcatgaggttcctatggatacagttacaaggttattggatgtgattgatcgtcagattcgatattctcaaggtttgtcgatagatgtgaaagaaaattcagcatgaacaaggtcgaggcattgtacaggttgttcaagaagattggcaacaccttcattgatgatgggctgattaacaaggctctttcaaatggcaagcccactgttgttgagttttatgcaaactggtatgaagtctgcagggaactagctctagatatctacaaagctgaacaacaatacaagtctgcagggaactagactctgagaaccctgttgctgatgtggagagcattgtagccaagggcataagagatggtgcaataaatgccaccatagatcaagcaaatggctggatggtatggaaggaaactggtgatgtctactctacaaatgagccatagatcatacaaatgagcccttgatgccacccaggattgggtccgccccctatctttcagtattcattggtttctacgattctgctcctttgtgttgctactgtttgtatagaagacacgtggtatgggagttgggcgcaagctcaagagccaccgcaggaaccagaggtgggctgacaaagcatacaaaaagccacttgggcaatgagtggaaaaaaccttttgctggatcatctcacgctaagggcatcattctggagaaaattggtattgaggccaagcagccaaattcggccatccataagtgtgcccgtgttcagctggtgaaggatggaaagaagattgctgcctttgtgccgaatgatggttgcctaaactacatcgaggagaatgatgaggtgttgattgtaggacgaggagacattcctggtgtcaggttcaaggttgttaaggtttctggtgtgtcgctgcttgcactcttcaaggagaagaagccaaggtcttagatcacttttggtagtcaagaatggtgtaaactgcccaaggctctgttgtcaaagttaaagttttgctagcaacagagctgttaattctgagctgtacctttttgttaacattgacagttatgttacagtgtaaactgcccaaggctctgttgtcaaagttaaagttctgctagcaacagagctgttaattctgagctgtacctttttgttaacattgatagctctgttacacgacattattatttccttatgaaggtcagtttggaagaaacattctcctttattcacaaactatgttgattttctgaccaagtgtccttccatacagatccatagaaaatatagtacaggtggcagcacggagaagacgtttgaaagataa

SEQ ID NO: 81597 - DNA, 1842 bp, Zea Mays
atggcagtcggcggtctccagggagcgaagaagcgcaagcgcgagcacgcggaagggaaggcaaagcctcggaagcaagtcaagggaggcggggacggagcgaagcggaagagccactcggccgccggcggctacacggcccatggcggcgccggcgaagttgtggcgaggaagaagaccccggttacccccaaggagaagcgcctcgcggccaagacactctatgagttcgatgatctcgagagcatcattgataggacactaaagcgcgattttgacaccgaggaagcactctggttgcttaagataggtcttgtgtgcatcccggatagccctaagatcaagccctccatgtcaatggttgctaagatactgcaaggtccatttggaggtccaggatgtcaaaatcaagaacatgagaagcactttgagcattttacacctaatatgagcaaaacacgaaatgaatctgcatttcctcaggatgaaattgactcacatagagagcatatttataatgaactgacctcagattcaattgcttcaaagaagccaaaaataaggaagagagaaaataacaattctgtttcaagttctgctcccaacattcctaatactcaagattttatcactaccttctgtgaggtggtggaggatttctgtggaaaaaccgaaattcctgaagatggaaattgcggtgactggttgtcaatcccacttggtgatgttaaggttctcgtgaatgaaattacatctgttcgatccaaaaggatattgcatgaggttcctatggatacagttacaaggttattggatgtgattgatcgtcagattcgatattctcaaggtttgtcgatagatgtgaaagaaaattcagcatgaacaaggtcgaggcattgtacaggttgttcaagaagattggcaacaccttcattgatgatgggctgattaacaaggctctttcaaatggcaagcccactgttgttgagttttatgcaaactggtatgaagtctgcagggaactagctctagatatctacaaagctgaacaacaatacaagtctgcagggaactagactctgagaaccctgttgctgatgtggagagcattgtagccaagggcataagagatggtgcaataaatgccaccatagatcaagcaaatggctggatggtatggaaggaaactggtgatgtctactctacaaatgagccatagatcatacaaatgagcccttgatgccacccaggattgggtccgccccctatctttcagtattcattggtttctacgattctgctcctttgtgttgctactgtttgtatagaagacacgtggtatgggagttgggcgcaagctcaagagccaccgcaggaaccagaggtgggctgacaaagcatacaaaaagccacttgggcaatgagtggaaaaaaccttttgctggatcatctcacgctaagggcatcattctggagaaaattggtattgaggccaagcagccaaattcggccatccataagtgtgcccgtgttcagctggtgaaggatggaaagaagattgctgcctttgtgccgaatgatggttgcctaaactacatcgaggagaatgatgaggtgttgattgtaggacgaggagacattcctggtgtcaggttcaaggttgttaaggtttctggtgtgtcgctgcttgcactcttcaaggagaagaagccaaggtcagtttggaagaaacattctcctttattcacaaactatgttgattttctgaccaagtgtccttccatacagatccatagaaaatatagtacaggtggcagcacggagaagacgtttgaaagataa

SEQ ID NO: 81598 - DNA, 1712 bp, Zea Mays
aaaccacgcccgctccccacgcgatggccgctcatcccgtcgacgcgcccaccgcagttcacacccgcgccccggctcccccgcctcaccgcgcggctctgccagtgatcatcgattcgcctcgccgcgctgtctgagagaaggaaagaggagctcaggacagcggcggctggcgcgaggtgcccggaggcagacgtgacgacgacgaagcctttgtagatctcagcaggcacggcttgcctccgcgtgggcaagctctgaggcggcgtcccttcccttctcgtcggcttccattctccaccgcgctcactccatttttcgtcgtgatcccttcctctccatgggcttccatgaaccctagagctcgcccgtccatggagtacgtgctcaccatcagcggatccccaggtctagacactctatgagttcgatgatctcgagagcatcattgataggacactaaagcgcgattttgacaccgaggaagcactctggttgcttaagataggtcttgtgtgcatcccggatagccctaagatcaagccctccatgtcaatggttgctaagatactgcaaggtgagtgtgctgtgagtgacaggatcatgaggcctggcctgatcacagacgccatggacctgaaagtcaggatggtagagccgattcagttcaacttgacatcatgctcgagcactgccgcaccggaccttgtcaggtccatttggaggtccaggatgtcaaaatcaagaacatgagaagcactttgagcattttacacctaatatgagcaaaacacgaaatgaatctgcatttcctcaggatgaaattgactcacatagagagcatatttatgtaagttagataccaccagtttcttatagatgccagttctttgtgctaaggcctaaggggctttctgttgtagaatgaactgacctcagattcaattgcttcaaagaagccaaaaataaggaagagagaaaataacaattctgtttcaagttctgctcccaacattcctaatactcaagattttatcactaccttctgtgaggtggtggaggatttctgtggaaaaaccgaaattcctgaagatggaaattgcggtgactggttgtcaatcccacttggtgatgttaaggttctcgtgaatgaaattacatctgttcgatccaaaaggatattgcatgaggttcctatggatacagttacaaggttattggatgtgattgatcgtcagattcgatattctcaaggtttgtcgatagatgtgaaagaaaattcagcatgaacaaggtcgaggcattgtacaggttgttcaagaagattggcaacaccttcattgatgatgggctgattaacaaggctctttcaaatggcaagcccactgttgttgagttttatgcaaactggtatgaagtctgcagggaactagctctagatatctacaaagctgaacaacaatacaagtctgcagggaactagactctgagaaccctgttgctgatgtggagagcattgtagccaagggcataagagatggtgcaataaatgccaccatagatcaagcaaatggctggatggtatggaaggaaactggtgatgtctactctacaaatgagccatagatcatacaaatgagcccttgatgccacccaggattggggttttgcagagcctgcgatttatgtgagttaacatatcgatcttgaat

SEQ ID NO: 81599 - DNA, 2366 bp, Zea Mays
cggctcccccgcctcaccgcgcggctctgccagtgatcatcgattcgcctcgccgcgctgtctgagagaaggaaagaggagctcaggacagcggcggctggcgcgaggtgcccggaggcagacgtgacgacgacgaagcctttgtagatctcagcaggcacggcttgcctccgcgtgggcaagctctgaggcggcgtcccttcccttctcgtcggcttccattctccaccgcgctcactccatttttcgtcgtgatcccttcctctccatgggcttccatgaaccctagagctcgcccgtccatggagtacgtgctcaccatcagcggatccccaggtctagacactctatgagttcgatgatctcgagagcatcattgataggacactaaagcgcgattttgacaccgaggaagcactctggttgcttaagataggtcttgtgtgcatcccggatagccctaagatcaagccctccatgtcaatggttgctaagatactgcaaggtgagtgtgctgtgagtgacaggatcatgaggcctggcctgatcacagacgccatggacctgaaagtcaggatggtagagccgattcagttcaacttgacatcatgctcgagcactgccgcaccggaccttgtcaggtccatttggaggtccaggatgtcaaaatcaagaacatgagaagcactttgagcattttacacctaatatgagcaaaacacgaaatgaatctgcatttcctcaggatgaaattgactcacatagagagcatatttataatgaactgacctcagattcaattgcttcaaagaagccaaaaataaggaagagagaaaataacaattctgtttcaagttctgctcccaacattcctaatactcaagattttatcactaccttctgtgaggtggtggaggatttctgtggaaaaaccgaaattcctgaagatggaaattgcggtgactggttgtcaatcccacttggtgatgttaaggttctcgtgaatgaaattacatctgttcgatccaaaaggatattgcatgaggttcctatggatacagttacaaggttattggatgtgattgatcgtcagattcgatattctcaaggtttgtcgatagatgtgaaagaaaattcagcatgaacaaggtcgaggcattgtacaggttgttcaagaagattggcaacaccttcattgatgatgggctgattaacaaggctctttcaaatggcaagcccactgttgttgagttttatgcaaactggtatgaagtctgcagggaactagctctagatatctacaaagctgaacaacaatacaagtctgcagggaactagactctgagaaccctgttgctgatgtggagagcattgtagccaagggcataagagatggtgcaataaatgccaccatagatcaagcaaatggctggatggtatggaaggaaactggtgatgtctactctacaaatgagccatagatcatacaaatgagcccttgatgccacccaggattgggtccgccccctatctttcagtattcattggtttctacgattctgctcctttgtgttgctactgtttgtatagaagacacgtggtatgggagttgggcgcaagctcaagagccaccgcaggaaccagaggtgggctgacaaagcatacaaaaagccacttgggcaatgagtggaaaaaaccttttgctggatcatctcacgctaagggcatcattctggagaaaattggtattgaggccaagcagccaaattcggccatccataagtgtgcccgtgttcagctggtgaaggatggaaagaagattgctgcctttgtgccgaatgatggttgcctaaactacatcgaggagaatgatgaggtgttgattgtaggacgaggagacattcctggtgtcaggttcaaggttgttaaggtttctggtgtgtcgctgcttgcactcttcaaggagaagaagccaaggtcttagatcacttttggtagtcaagaatggtgtaaactgcccaaggctctgttgtcaaagttaaagttttgctagcaacagagctgttaattctgagctgtacctttttgttaacattgacagttatgttacagtgtaaactgcccaaggctctgttgtcaaagttaaagttctgctagcaacagagctgttaattctgagctgtacctttttgttaacattgatagctctgttacacgacattattatttccttatgaaggtcagtttggaagaaacattctcctttattcacaaactatgttgattttctgaccaagtgtccttccatacagatccatagaaaatatagtacaggtggcagcacggagaagacgtttgaaagataa

SEQ ID NO: 81600 - DNA, 1510 bp, Zea Mays
gcatctaccagaataggaaaaggttattattaataccaaggtctagacactctatgagttcgatgatctcgagagcatcattgataggacactaaagcgcgattttgacaccgaggaagcactctggttgcttaagataggtcttgtgtgcatcccggatagccctaagatcaagccctccatgtcaatggttgctaagatactgcaaggtccatttggaggtccaggatgtcaaaatcaagaacatgagaagcactttgagcattttacacctaatatgagcaaaacacgaaatgaatctgcatttcctcaggatgaaattgactcacatagagagcatatttataatgaactgacctcagattcaattgcttcaaagaagccaaaaataaggaagagagaaaataacaattctgtttcaagttctgctcccaacattcctaatactcaagattttatcactaccttctgtgaggtggtggaggatttctgtggaaaaaccgaaattcctgaagatggaaattgcggtgactggttgtcaatcccacttggtgatgttaaggttctcgtgaatgaaattacatctgttcgatccaaaaggatattgcatgaggttcctatggatacagttacaaggttattggatgtgattgatcgtcagattcgatattctcaagtcagcatgaacaaggtcgaggcattgtacaggttgttcaagaagattggcaacaccttcattgatgatgggctgattaacaaggctctttcaaatggcaagcccactgttgttgagttttatgcaaactgggaactagactctgagaaccctgttgctgatgtggagagcattgtagccaagggcataagagatggtgcaataaatgccaccatagatcaagcaaatggctggatggtatggaaggaaactggtgatgtctactctacaaatgagccatagatcatacaaatgagcccttgatgccacccaggattgggaagacacgtggtatgggagttgggcgcaagctcaagagccaccgcaggaaccagaggtgggctgacaaagcatacaaaaagccacttgggcaatgagtggaaaaaaccttttgctggatcatctcacgctaagggcatcattctggagaaaattggtattgaggccaagcagccaaattcggccatccataagtgtgcccgtgttcagctggtgaaggatggaaagaagattgctgcctttgtgccgaatgatggttgcctaaactacatcgaggagaatgatgaggtgttgattgtaggacgaggagacattcctggtgtcaggttcaaggttgttaaggtttctggtgtgtcgctgcttgcactcttcaaggagaagaagccaaggtcagtttggaagaaacattctcctttattcacaaactatgttgattttctgaccaagtgtccttccatacagatccatagaaaatatagtacaggtggcagcacggagaagacgtttgaaagataa

SEQ ID NO: 81601 - DNA, 2567 bp, Zea Mays
cccgaaccgcatgtctcctccccctcccagacacaaccctcccattgtcttcccctcctctcctcacgccgaccactccattcctcatcgccgcctccgcttactaatccccacaaccgcaccgatccatcgctcgccttaggttttctgctcgactacctcctggtgctccaccgttctggctcgattcgcgccgagggcggttgctccgagctcttagccacctgtcgccgctgtagcctgctgctgcgggggtgctctgccgtcggctgccgctggtgtcgaggaatagggttttgggactgccaggcagaggagggtgcattggttggcttgcgcatggggatggtgcccaacgggctcctgcccagtgcgtctgccgggatgacgcgacggctcgaccccgagcgctgggcggtcgcggaggaccgcacggcggagttgatcgcgtgcatccaacccaacgtgtactccgaggggcggaggctggccgtgtaccactacgtgcagcggctcatcatgaactgcctctcctgccaggtttttacctttgggtcagtccctctcaagacttacttacccgatggtgacattgatgtcactgcttttagtaatagtgaagaattaaaggagatttgggcaaatcttgtccgggatgcattggagcgtgaagagaaggatgaaaacgctgaatttcatgtaaaagaagtccagtatattcaggcagaggtcaagattataaagtgtcttgtggaaaacattgttgttgacatctcatttaatcaagtcggtggactatgcacactatgttttcttgaagagattgacaacttgatcagccaaaaccatttattcaagaggagtatcatattgataaaggcatggtgtttctacgagagccgtattcttggagctcatcatggtcttatatctacttatgcattggagacacttgttctgtacatatttcatatattcaacaactctttcactggacctcttgaggtgttgtaccgtttcttagaatttttcagcaactttgattgggagaaattttgtttgagcttgtggggcccagttcctattagttcacttccggatatgactgcgatccccccacggatggacagtggtgagttgttgctgaacaagtccttcctcgatacttgtagttctgcatatggagttgtgcctcacacccaggagaaccagggtcaaccatttgtttcaaaacattttaatgttattgatcctttacgtacaaacaacaatcttggaagaagtgtcagtaaagaaggttcattttagggaccgacactcaaattcaagaaactacagaggaggttataatggtgacaggggtgactataatgataaggagggaagctggataaactcaaaacaacgaaatccaaaccgcggctatggacgtagccagtcagagaggtccggcatgaggtctgatagacaggtcactgatgagagccggtctgataggcaacgacgaacttatagaaatgactcgtaccggcatgaggcaagctctcagtatcttgtgcagggccaaccttttggatccacaagctctatgcgcaaaccaggaaacacagtgcatggggtttatacaccaccatctacgtattcaaatggtaccagtgctttatctggccctccaggaccaccattttttatggtgtactcttatgaacaaggctcaaatcatgctgcttcctcatctgaaccaattgaatttggatctcttgggccacttcctgcagcagatggtgatgacataccaaggtcgacacgccaagtaatgcctaatgggttttatgggcaaagacgtggtcgatataggggtggttcctctcattcatctcctgatcaaccatcctcgcctcagcctcgtcggtagttgagtcttcgtatgatggcttgatcacttcgtatgaaaccttgcgatagcaatattttggtccaccccttgtgatcacatcctgcatgggtgaagatggttgggccttcagcagccacaaaaaaagtatatgccctagctggcttgttggtgctctgtgattctcagaagcactgaattgtgaataccatcaaaagaggcatcaatttaccggcaggttattttaccagtcacaatgatgcttcctggaatcaaaataactatcttccgaacaaatcatggaaccttcaatcctataatatcttcatacagaaatcagaactgaactgaaggttatgagcaaggatgaactgtgttccggccgtcccgttatatgaattgtgtcaagggtaataacaatattagtttggatggagcaggaacaagcattgctgcattggaaacaatctggaatgctttgggctttaaatcccgtaccgtttttaggtaggattaagctcatgtaacacagcaaacttttcacttagatgcactatgaatcaagtgaatcgtaggaaacggattctcgtgctgaagggagggatgactccagaatttactcttaaggcacgagtaaaaaagttatccatgtcaatcttcctcgtttcctttc

SEQ ID NO: 81602 - DNA, 4871 bp, Zea Mays
cccgaaccgcatgtctcctccccctcccagacacaaccctcccattgtcttcccctcctctcctcacgccgaccactccattcctcatcgccgcctccgcttactaatccccacaaccgcaccgatccatcgctcgccttaggttttctgctcgactacctcctggtgctccaccgttctggctcgattcgcgccgagggcggttgctccgagctcttagccacctgtcgccgctgtagcctgctgctgcgggggtgctctgccgtcggctgccgctggtgtcgaggaatagggttttgggactgccaggcagaggagggtgcattggttggcttgcgcatggggatggtgcccaacgggctcctgcccagtgcgtctgccgggatgacgcgacggctcgaccccgagcgctgggcggtcgcggaggaccgcacggcggagttgatcgcgtgcatccaacccaacgtgtactccgaggggcggaggctggccgtgtaccactacgtgcagcggctcatcatgaactgcctctcctgccagtaatagtgaagaattaaaggagatttgggcaaatcttgtccgggatgcattggagcgtgaagagaaggatgaaaacgctgaatttcatgtaaaagaagtccagtatattcaggcagaggtcaagattataaagtgtcttgtggaaaacattgttgttgacatctcatttaatcaagtcggtggactatgcacactatgttttcttgaagagattgacaacttgatcagccaaaaccatttattcaagaggagtatcatattgataaaggcatggtgtttctacgagagccgtattcttggagctcatcatggtcttatatctacttatgcattggagacacttgttctgtacatatttcatatattcaacaactctttcactggacctcttgaggtgttgtaccgtttcttagaatttttcagcaactttgattgggagaaattttgtttgagcttgtggggcccagttcctattagttcacttccggatatgactgcgatccccccacggatggacagtggtgagttgttgctgaacaagtccttcctcgatacttgtagttctgcatatggagttgtgcctcacacccaggagaaccagggtcaaccatttgtttcaaaacattttaatgttattgatcctttacgtacaaacaacaatcttggaagaagtgtcagtaaaggaaatttctttagaatacgcagtgcttttgcgtatggggcgaaaaggctcggaaagttacttgaatgtccaaaagaagctttaattcctgaattaaaccagttcttcacaaatacatggataagacatgggagtggaagtcgtcctgatgtgcctatcccaagtctggttgatgtgcggcctatgaaggttgtttcttctgtagtgtcaagcagccagagaagtttagcggcattcaagaaaaaagttgaaaatcctaaacttcatgttaatcaggataatcttcgtccgaatcaagataatctcactggagttggtgacatacattaccgtaatctaccaagaacagttaatccttcagtttctcatgttcagcaccaaaaaagttatacaccacaaggcaatgctaaggtctctgaacagcttgaaagaaataactcagacggattgatgcaaagtgcaagggataagagagtgccaaatggtctctttgtcaatgacagaaatgggcagaacaggtccagatttgcaaggacccgatcaagtcctgaactcacagactcgtctactgaaggatttcgtggtaggcggactaatgcagttggtatggaaaaatcttttggtgttgattacagcagaagaaacatcttgattccagaagtgtctagcaaccacagcactaagtcttcacaagatgaatcagtgtcttccatgaatggttcatctcaccctagtgcattggcagcttctgactcaaatagcgtttcaagcagctttcgtgatgataatggttttgtgatgaatgaagaactcccttctgtttctgaatcatcggatatgcaccacgatgaacaagttctggctaatttaatggaatccatgaagttgcatggattcaacggacagattcaattgccaatgcaaataccttctcatttgtctgtagcgcatccccctttactggctccaacaacttattcacaaaagcatttggctggggttccaccagctaacttaattgggacaccatggttgcccaatatgcagttcctgcatggatttgttccacctatggcccattacatacacaatccaaattttgcaccaaacatcgaggatggtactgagactgaaaaacctaatacatcagatgtgaatcatgatgctggcaaaacttggcaagagtatggtgttgggttttctagacattttgatcctgaagcaagagatcctcacttctatggtattgatggcaaggagcattcctctttgcctaatggtgtaccaggtgctcccttggaaaggcagatgaaattcacagttgagaataatgttgtaggtgatgaaacttatactggcatgttccaaattcatacaggtagagaacctgctgtagattattctaagaggagtggttatgggaatgttccgtcttcacatgccagttcatccaaaggcaaaactctggattcgagttcatgggatgaaatgactgtaaatacaacaataccaccaagagaaaattggggaaaaagacctgcctttgtggcacctgccacgactacacatggcaatactgggtggcagatgggaaatatcactgagcatctcgcagctgaagttaatgatggccccagaaatgggacagtggtaccaatcatcactgaagcttctgagatagtaacagggtctgattctttttcatcaaaatcaagaactagtcaagtacccaatgagcttgatccatcacaagttggcatgcctaatccagtgtttacaccttttcttattggatcaccacagcataggcaagctgatagctctggacttacttttgttccaacaggtccaccagttccttttgttgtgctcccgtttgttccagggaataatgatggttctggcccccagtttgagagaagcgaaggaattgatcagcttcctgccaatactgtaggtcaattttttggttcacttaatgatgttcaccaacaagattccagtgctatctcaacagtatcgtccagtactatgactgagccatctggtgaacacaagcctgatatcttgcatagtgattttgtcagccattggcacaatttacagtatgggcgactctgtcagaatcctcgtcccatgggtcctgttctataccctgttccagtgccaccgatgtatttacagggccatgttccatgggatgggcctggaagaccagctgcaccaaatgttaactggacacaaatggtgggcggtcaacgagtatttcctgtgatgcctgtacaaccggctacagaaagaactggtgtttttcagcactacggtgaagatgcacccagataccgtggaggcacaggaacctacttgccaaatcctaaggttcattttagggaccgacactcaaattcaagaaactacagaggaggttataatggtgacaggggtgactataatgataaggagggaagctggataaactcaaaacaacgaaatccaaaccgcggctatggacgtagccagtcagagaggtccggcatgaggtctgatagacaggtcactgatgagagccggtctgataggcaacgacgaacttatagaaatgactcgtaccggcatgaggcaagctctcagtatcttgtgcagggccaaccttttggatccacaagctctatgcgcaaaccaggaaacacagtgcatggggtttatacaccaccatctacgtattcaaatggtaccagtgctttatctggccctccaggaccaccattttttatggtgtactcttatgaacaaggctcaaatcatgctgcttcctcatctgaaccaattgaatttggatctcttgggccacttcctgcagcagatggtgatgacataccaaggtcgacacgccaagtaatgcctaatgggttttatgggcaaagacgtggtcgatataggggtggttcctctcattcatctcctgatcaaccatcctcgcctcagcctcgtcggtagttgagtcttcgtatgatggcttgatcacttcgtatgaaaccttgcgatagcaatattttggtccaccccttgtgatcacatcctgcatgggtgaagatggttgggccttcagcagccacaaaaaaagtatatgccctagctggcttgttggtgctctgtgattctcagaagcactgaattgtgaataccatcaaaagaggcatcaatttaccggcaggttattttaccagtcacaatgatgcttcctggaatcaaaataactatcttccgaacaaatcatggaaccttcaatcctataatatcttcatacagaaatcagaactgaactgaaggttatgagcaaggatgaactgtgttccggccgtcccgttatatgaattgtgtcaagggtaataacaatattagtttggatggagcaggaacaagcattgctgcattggaaacaatctggaatgctttgggctttaaatcccgtaccgtttttaggtaggattaagctcatgtaacacagcaaacttttcacttagatgcactatgaatcaagtgaatcgtaggaaacggattctcgtgctgaagggagggatgactccagaatttactcttaaggcacgagtaaaaaagttatccatgtcaatcttcctcgtttcctttc

SEQ ID NO: 81603 - DNA, 4925 bp, Zea Mays
cccgaaccgcatgtctcctccccctcccagacacaaccctcccattgtcttcccctcctctcctcacgccgaccactccattcctcatcgccgcctccgcttactaatccccacaaccgcaccgatccatcgctcgccttaggttttctgctcgactacctcctggtgctccaccgttctggctcgattcgcgccgagggcggttgctccgagctcttagccacctgtcgccgctgtagcctgctgctgcgggggtgctctgccgtcggctgccgctggtgtcgaggaatagggttttgggactgccaggcagaggagggtgcattggttggcttgcgcatggggatggtgcccaacgggctcctgcccagtgcgtctgccgggatgacgcgacggctcgaccccgagcgctgggcggtcgcggaggaccgcacggcggagttgatcgcgtgcatccaacccaacgtgtactccgaggggcggaggctggccgtgtaccactacgtgcagcggctcatcatgaactgcctctcctgccaggtttttacctttgggtcagtccctctcaagacttacttacccgatggtgacattgatgtcactgcttttagtaatagtgaagaattaaaggagatttgggcaaatcttgtccgggatgcattggagcgtgaagagaaggatgaaaacgctgaatttcatgtaaaagaagtccagtatattcaggcagaggtcaagattataaagtgtcttgtggaaaacattgttgttgacatctcatttaatcaagtcggtggactatgcacactatgttttcttgaagagccaaaaccatttattcaagaggagtatcatattgataaaggcatggtgtttctacgagagccgtattcttggagctcatcatggtcttatatctacttatgcattggagacacttgttctgtacatatttcatatattcaacaactctttcactggacctcttgaggtgttgtaccgtttcttagaatttttcagcaactttgattgggagaaattttgtttgagcttgtggggcccagttcctattagttcacttccggatatgactgcgatccccccacggatggacagtggtgagttgttgctgaacaagtccttcctcgatacttgtagttctgcatatggagttgtgcctcacacccaggagaaccagggtcaaccatttgtttcaaaacattttaatgttattgatcctttacgtacaaacaacaatcttggaagaagtgtcagtaaaggaaatttctttagaatacgcagtgcttttgcgtatggggcgaaaaggctcggaaagttacttgaatgtccaaaagaagctttaattcctgaattaaaccagttcttcacaaatacatggataagacatgggagtggaagtcgtcctgatgtgcctatcccaagtctggttgatgtgcggcctatgaaggttgtttcttctgtagtgtcaagcagccagagaagtttagcggcattcaagaaaaaagttgaaaatcctaaacttcatgttaatcaggataatcttcgtccgaatcaagataatctcactggagttggtgacatacattaccgtaatctaccaagaacagttaatccttcagtttctcatgttcagcaccaaaaaagttatacaccacaaggcaatgctaaggtctctgaacagcttgaaagaaataactcagacggattgatgcaaagtgcaagggataagagagtgccaaatggtctctttgtcaatgacagaaatgggcagaacaggtccagatttgcaaggacccgatcaagtcctgaactcacagactcgtctactgaaggatttcgtggtaggcggactaatgcagttggtatggaaaaatcttttggtgttgattacagcagaagaaacatcttgattccagaagtgtctagcaaccacagcactaagtcttcacaagatgaatcagtgtcttccatgaatggttcatctcaccctagtgcattggcagcttctgactcaaatagcgtttcaagcagctttcgtgatgataatggttttgtgatgaatgaagaactcccttctgtttctgaatcatcggatatgcaccacgatgaacaagttctggctaatttaatggaatccatgaagttgcatggattcaacggacagattcaattgccaatgcaaataccttctcatttgtctgtagcgcatccccctttactggctccaacaacttattcacaaaagcatttggctggggttccaccagctaacttaattgggacaccatggttgcccaatatgcagttcctgcatggatttgttccacctatggcccattacatacacaatccaaattttgcaccaaacatcgaggatggtactgagactgaaaaacctaatacatcagatgtgaatcatgatgctggcaaaacttggcaagagtatggtgttgggttttctagacattttgatcctgaagcaagagatcctcacttctatggtattgatggcaaggagcattcctctttgcctaatggtgtaccaggtgctcccttggaaaggcagatgaaattcacagttgagaataatgttgtaggtgatgaaacttatactggcatgttccaaattcatacaggtagagaacctgctgtagattattctaagaggagtggttatgggaatgttccgtcttcacatgccagttcatccaaaggcaaaactctggattcgagttcatgggatgaaatgactgtaaatacaacaataccaccaagagaaaattggggaaaaagacctgcctttgtggcacctgccacgactacacatggcaatactgggtggcagatgggaaatatcactgagcatctcgcagctgaagttaatgatggccccagaaatgggacagtggtaccaatcatcactgaagcttctgagatagtaacagggtctgattctttttcatcaaaatcaagaactagtcaagtacccaatgagcttgatccatcacaagttggcatgcctaatccagtgtttacaccttttcttattggatcaccacagcataggcaagctgatagctctggacttacttttgttccaacaggtccaccagttccttttgttgtgctcccgtttgttccagggaataatgatggttctggcccccagtttgagagaagcgaaggaattgatcagcttcctgccaatactgtaggtcaattttttggttcacttaatgatgttcaccaacaagattccagtgctatctcaacagtatcgtccagtactatgactgagccatctggtgaacacaagcctgatatcttgcatagtgattttgtcagccattggcacaatttacagtatgggcgactctgtcagaatcctcgtcccatgggtcctgttctataccctgttccagtgccaccgatgtatttacagggccatgttccatgggatgggcctggaagaccagctgcaccaaatgttaactggacacaaatggtgggcggtcaacgagtatttcctgtgatgcctgtacaaccggctacagaaagaactggtgtttttcagcactacggtgaagatgcacccagataccgtggaggcacaggaacctacttgccaaatcctaaggttcattttagggaccgacactcaaattcaagaaactacagaggaggttataatggtgacaggggtgactataatgataaggagggaagctggataaactcaaaacaacgaaatccaaaccgcggctatggacgtagccagtcagagaggtccggcatgaggtctgatagacaggtcactgatgagagccggtctgataggcaacgacgaacttatagaaatgactcgtaccggcatgaggcaagctctcagtatcttgtgcagggccaaccttttggatccacaagctctatgcgcaaaccaggaaacacagtgcatggggtttatacaccaccatctacgtattcaaatggtaccagtgctttatctggccctccaggaccaccattttttatggtgtactcttatgaacaaggctcaaatcatgctgcttcctcatctgaaccaattgaatttggatctcttgggccacttcctgcagcagatggtgatgacataccaaggtcgacacgccaagtaatgcctaatgggttttatgggcaaagacgtggtcgatataggggtggttcctctcattcatctcctgatcaaccatcctcgcctcagcctcgtcggtagttgagtcttcgtatgatggcttgatcacttcgtatgaaaccttgcgatagcaatattttggtccaccccttgtgatcacatcctgcatgggtgaagatggttgggccttcagcagccacaaaaaaagtatatgccctagctggcttgttggtgctctgtgattctcagaagcactgaattgtgaataccatcaaaagaggcatcaatttaccggcaggttattttaccagtcacaatgatgcttcctggaatcaaaataactatcttccgaacaaatcatggaaccttcaatcctataatatcttcatacagaaatcagaactgaactgaaggttatgagcaaggatgaactgtgttccggccgtcccgttatatgaattgtgtcaagggtaataacaatattagtttggatggagcaggaacaagcattgctgcattggaaacaatctggaatgctttgggctttaaatcccgtaccgtttttaggtaggattaagctcatgtaacacagcaaacttttcacttagatgcactatgaatcaagtgaatcgtaggaaacggattctcgtgctgaagggagggatgactccagaatttactcttaaggcacgagtaaaaaagttatccatgtcaatcttcctcgtttcctttc

SEQ ID NO: 81604 - DNA, 3167 bp, Zea Mays
tttgctaactcttggtcggcttgccgcaagccatcgagctctctgtacagtgtacacacatatgtccgcgcctccacattaatcctgtcttttgcatacacaccgctacgcccccggctccaaccctacccccctccgcctcctcgccggcgcgctctaccccgcctcactccccatcagtgtctctcatcggcggctctccgggcttcacgttggtccggggtacctctcgtgcgatccgcgcgcaatggagcaagatcaaagcccagccgtcgacagcgcggattctggcgccgcggcttttgattttgcgactggcaatgcacctagctcggctgtgaccagcggaagcgccgtggcccctgacggtggggctcaggcagctgatacttctgcctaccaggccgagcacacggagttgaatgggacgactggcgatatgtctaattaccaatctgcaggagctgcagagaatggcacagccgtcaccgagataggcgagccggttcctgagccatcctacgaggaagctgtgctttcagcagaagaggctagattgtggagtgttgttactgcaaattgcttagatttcaatgcctggaccacacttattgaggagacggagaaaaatgctgagaacgatattttgaagatacggaaagtgtacgattcatttcttacggaattccctctttgctttgggtactggaagaaatatgctgatcatgaagcgagacttgatggtgtcaataaagttattgaggtgtatgagcgagcagttcttgcagttacttattcagtggacatttggtataactattgtcaattcgcaatttcaacatatgatgacccagatatcgtccgaagactgtttgaacgtggcttggcatacgttggaactgattatcgctccaatattttgtgggatgagtatattaagtatgaagagtcactggaggcatggagtcacctcgctgttatatatacaagagtattggaacatcccatccagcagcttgatcgctattttaattgcctcaaggaattggcttcaaagcacagtttttcagaaatacttactgcggaagaagcctcggtgtatgttgtcacgtctgagaccagtgctcaagcgcctgatggtgacacacatcctgatgatatcgataaggctggtcaaccagaactttcatctttggcagatgcagaaaaccttgcaaagtatgtctccatgagggaagagatgtacaagaaggctaaagaagcttgaaaattggcatagctaccttgactttatcgagaaggaagaagacattaataagtatttggacgaagcttcctttgtaatgggatgttgaactgaggatagagcgtggacataatgtttggtttcgatgaggctaagtatttgcttaatgctcaccttcttaaccatctatctatcgagcaggatggtccctcctttcttatggaggggcctccataatcagctaatggagttatcaaattgtatgaaaggtgtgtgattgcatgtgctagttattcagaattctggatccgctatgtgcaatgtatggaggataaagggagtctagacctagcaaacaatgccctggctcgtgctactcatgtgtttgtcaagaagcagccggagatccatctatttagtgctcgctttaaggagcttaatggggatatttctggagcacgtgcagaatatcagcatctttactcagatttatgtcctggctttctagaggccatcgtgaagcattctaatatggaacaccgactgggagataaagaattatcttgttcagtttatgaaaaggccatcgctgctgagaagggaaaggaacagagccagctcttgccgacgttgcttattcagtactcccgtttcttatttttggccatccgagatttggagaaggcaagagaaatattaactgtgctgcatgagcagttaaatgtaacaaaaacagtgcttgaggctgtcattcatctagagtcaatttttccatgcgaaaagcgtattgattttttagactcacttgtggagaagtttgttacacctgaatcatctcagggagaggtggcaagtctagttgacaaagaggaaatatcttccatatttttagagtttttggatctctttggggatgcaaagtcaatcaagaaggctttaactcggcatacaactcttttttcatgtaagagaagcattctgccatcaaagaaacggaaagcagatgacactgttgtctcagacagggacaaatttgctaaaactgtggttactcagtcagccacgggaactgatccaaatgcttccaatcctcctgtttggcctgcaacttctgaagcatctgggcaacaatggggagcttcttatgcacagcaggctgcatatcctgcatatggaacttacgactacagccatcaaatgccccagcctgctcctcaagcagctgcctatggtgcttatcctccaacatactctgcacaggcctatacacaacaaagctacccacagcctgcagtaattccagcagcaccagtaccagcacctacagcgccgtcagcttatcctcaacaacctgcggcagctcaaccttattatggcacaacctactactgataagtagagtagtcgtggatggtgatccgatgagcctgttaatctaccttttcgcatgtgtggttgctctgtactgccattgtttagctcgcctttagacgaatgctagcgacgagatgatcacttgagaacaaatctgagattcgtacaatcagcatttttgtcgctaggagttgccattgttttcatgcaatagcataatctactttagacgagatagcgttgttaaccatgaatatgaacataatcgacataattcagtgttcatgcctcctttcgtactgtatttttaccccaccagtggtgatggcgggattcctgtcaagcacgctcactggtggagccctccgaacaaattgtcagctaatggctcacgatctgcgactacgcagttgactaatttatactgtgtcaatgctcaacagatcagctcctagagttactctccggtaagacagccagatgatgatgtccgctggttggtagttgaaaatttatgtatttttgcttgtgctatacgagatgaaat

SEQ ID NO: 81605 - DNA, 3251 bp, Zea Mays
tttgctaactcttggtcggcttgccgcaagccatcgagctctctgtacagtgtacacacatatgtccgcgcctccacattaatcctgtcttttgcatacacaccgctacgcccccggctccaaccctacccccctccgcctcctcgccggcgcgctctaccccgcctcactccccatcagtgtctctcatcggcggctctccgggcttcacgttggtccggggtacctctcgtgcgatccgcgcgcaatggagcaagatcaaagcccagccgtcgacagcgcggattctggcgccgcggcttttgattttgcgactggcaatgcacctagctcggctgtgaccagcggaagcgccgtggcccctgacggtggggctcaggcagctgatacttctgcctaccaggccgagcacacggagttgaatgggacgactggcgatatgtctaattaccaatctgcaggagctgcagagaatggcacagccgtcaccgagataggcgagccggttcctgagccatcctacgaggaagctgtgctttcagcagaagaggctagattgtggagtgttgttactgcaaattgcttagatttcaatgcctggaccacacttattgaggagacggagaaaaatgctgagaacgatattttgaagatacggaaagtgtacgattcatttcttacggaattccctctttgctttgggtactggaagaaatatgctgatcatgaagcgagacttgatggtgtcaataaagttattgaggtgtatgagcgagcagttcttgcagttacttattcagtggacatttggtataactattgtcaattcgcaatttcaacatatgatgacccagatatcgtccgaagactgtttgaacgtggcttggcatacgttggaactgattatcgctccaatattttgtgggatgagtatattaagtatgaagagtcactggaggcatggagtcacctcgctgttatatatacaagagtattggaacatcccatccagcagcttgatcgctattttaattgcctcaaggaattggcttcaaagcacagtttttcagaaatacttactgcggaagaagcctcggtgtatgttgtcacgtctgagaccagtgctcaagcgcctgatggtgacacacatcctgatgatatcgataaggctggtcaaccagaactttcatctttggcagatgcagaaaaccttgcaaagtatgtctccatgagggaagagatgtacaagaaggctaaagagtacgaatctgagatcattggttttgagctagctattagaaggccatattttcatgtcaagcctcttgacaatccagagcttgaaaattggcatagctaccttgactttatcgagaaggaagaagacattaataagtatttggacgaagcttcctttgtaatgggatgttgaactgaggatagagcgtggacataatgtttggtttcgatgaggctaagtatttgcttaatgctcaccttcttaaccatctatctatcgagcaggatggtccctcctttcttatggaggggcctccataatcagctaatggagtaatctgttatcaaattgtatgaaaggtgtgtgattgcatgtgctagttattcagaattctggatccgctatgtgcaatgtatggaggataaagggagtctagacctagcaaacaatgccctggctcgtgctactcatgtgtttgtcaagaagcagccggagatccatctatttagtgctcgctttaaggagcttaatggggatatttctggagcacgtgcagaatatcagcatctttactcagatttatgtcctggctttctagaggccatcgtgaagcattctaatatggaacaccgactgggagataaagaattatcttgttcagtttatgaaaaggccatcgctgctgagaagggaaaggaacagagccagctcttgccgacgttgcttattcagtactcccgtttcttatttttggccatccgagatttggagaaggcaagagaaatattaactgtgctgcatgagcagttaaatgtaacaaaaacagtgcttgaggctgtcattcatctagagtcaatttttccatgcgaaaagcgtattgattttttagactcacttgtggagaagtttgttacacctgaatcatctcagggagaggtggcaagtctagttgacaaagaggaaatatcttccatatttttagagtttttggatctctttggggatgcaaagtcaatcaagaaggctttaactcggcatacaactcttttttcatgtaagagaagcattctgccatcaaagaaacggaaagcagatgacactgttgtctcagacagggacaaatttgctaaaactgtggttactcagtcagccacgggaactgatccaaatgcttccaatcctcctgtttggcctgcaacttctgaagcatctgggcaacaatggggagcttcttatgcacagcaggctgcatatcctgcatatggaacttacgactacagccatcaaatgccccagcctgctcctcaagcagctgcctatggtgcttatcctccaacatactctgcacaggcctatacacaacaaagctacccacagcctgcagtaattccagcagcaccagtaccagcacctacagcgccgtcagcttatcctcaacaacctgcggcagctcaaccttattatggcacaacctactactgataagtagagtagtcgtggatggtgatccgatgagcctgttaatctaccttttcgcatgtgtggttgctctgtactgccattgtttagctcgcctttagacgaatgctagcgacgagatgatcacttgagaacaaatctgagattcgtacaatcagcatttttgtcgctaggagttgccattgttttcatgcaatagcataatctactttagacgagatagcgttgttaaccatgaatatgaacataatcgacataattcagtgttcatgcctcctttcgtactgtatttttaccccaccagtggtgatggcgggattcctgtcaagcacgctcactggtggagccctccgaacaaattgtcagctaatggctcacgatctgcgactacgcagttgactaatttatactgtgtcaatgctcaacagatcagctcctagagttactctccggtaagacagccagatgatgatgtccgctggttggtagttgaaaatttatgtatttttgcttgtgctatacgagatgaaat

SEQ ID NO: 81606 - DNA, 3003 bp, Zea Mays
ccgcgcctccacattaatcctgtcttttgcatacacaccgctacgcccccggctccaaccctacccccctccgcctcctcgccggcgcgctctaccccgcctcactccccatcagtgtctctcatcggcggctctccgggcttcacgttggtccggggtacctctcgtgcgatccgcgcgcaatggagcaagatcaaagcccagccgtcgacagcgcggattctggcgccgcggcttttgattttgcgactggcaatgcacctagctcggctgtgaccagcggaagcgccgtggcccctgacggtggggctcaggcagctgatacttctgcctaccaggccgagcacacggagttgaatgggacgactggcgatatgtctaattaccaatctgcaggagctgcagagaatggcacagccgtcaccgagataggcgagccggttcctgagccatcctacgaggaagctgtgctttcagcagaagaggctagattgtggagtgttgttactgcaaattgcttagatttcaatgcctggaccacacttattgaggagacggagaaaaatgctgagaacgatattttgaagatacggaaagtgtacgattcatttcttacggaattccctctttgctttgggtactggaagaaatatgctgatcatgaagcgagacttgatggtgtcaataaagttattgaggtgtatgagcgagcagttcttgcagttacttattcagtggacatttggtataactattgtcaattcgcaatttcaacatatgatgacccagatatcgtccgaagactgtttgaacgtggcttggcatacgttggaactgattatcgctccaatattttgtgggatgagtatattaagtatgaagagtcactggaggcatggagtcacctcgctgttatatatacaagagtattggaacatcccatccagcagcttgatcgctattttaattgcctcaaggaattggcttcaaagcacagtttttcagaaatacttactgcggaagaagcctcggtgtatgttgtcacgtctgagaccagtgctcaagcgcctgatggtgacacacatcctgatgatatcgataaggctggtcaaccagaactttcatctttggcagatgcagaaaaccttgcaaagtatgtctccatgagggaagagatgtacaagaaggctaaagagtacgaatctgagatcattggttttgagctagctattagaaggccatattttcatgtcaagcctcttgacaatccagagcttgaaaattggcatagctaccttgactttatcgagaaggaagaagacattaataaggttatcaaattgtatgaaaggtgtgtgattgcatgtgctagttattcagaattctggatccgctatgtgcaatgtatggaggataaagggagtctagacctagcaaacaatgccctggctcgtgctactcatgtgtttgtcaagaagcagccggagatccatctatttagtgctcgctttaaggagcttaatggggatatttctggagcacgtgcagaatatcagcatctttactcagatttatgtcctggctttctagaggccatcgtgaagcattctaatatggaacaccgactgggagataaagaattatcttgttcagtttatgaaaaggccatcgctgctgagaagggaaaggaacagagccagctcttgccgacgttgcttattcagtactcccgtttcttatttttggccatccgagatttggagaaggcaagagaaatattaactgtgctgcatgagcagttaaatgtaacaaaaacagtgcttgaggctgtcattcatctagagtcaatttttccatgcgaaaagcgtattgattttttagactcacttgtggagaagtttgttacacctgaatcatctcagggagaggtggcaagtctagttgacaaagaggaaatatcttccatatttttagagtttttggatctctttggggatgcaaagtcaatcaagaaggctttaactcggcatacaactcttttttcatgtaagagaagcattctgccatcaaagaaacggaaagcagatgacactgttgtctcagacagggacaaatttgctaaaactgtggttactcagtcagccacgggaactgatccaaatgcttccaatcctcctgtttggcctgcaacttctgaagcatctgggcaacaatggggagcttcttatgcacagcaggctgcatatcctgcatatggaacttacgactacagccatcaaatgccccagcctgctcctcaagcagctgcctatggtgcttatcctccaacatactctgcacaggcctatacacaacaaagctacccacagcctgcagtaattccagcagcaccagtaccagcacctacagcgccgtcagcttatcctcaacaacctgcggcagctcaaccttattatggcacaacctactactgataagtagagtagtcgtggatggtgatccgatgagcctgttaatctaccttttcgcatgtgtggttgctctgtactgccattgtttagctcgcctttagacgaatgctagcgacgagatgatcacttgagaacaaatctgagattcgtacaatcagcatttttgtcgctaggagttgccattgttttcatgcaatagcataatctactttagacgagatagcgttgttaaccatgaatatgaacataatcgacataattcagtgttcatgcctcctttcgtactgtatttttaccccaccagtggtgatggcgggattcctgtcaagcacgctcactggtggagccctccgaacaaattgtcagctaatggctcacgatctgcgactacgcagttgactaatttatactgtgtcaatgctcaacagatcagctcctagagttactctccggtaagacagccagatgatgatgtccgctggttggtagttgaaaatttatgtatttttgcttgtgctatacgagatgaaat

SEQ ID NO: 81607 - DNA, 3570 bp, Zea Mays
cattaatcctgtcttttgcatacacaccgctacgcccccggctccaaccctacccccctccgcctcctcgccggcgcgctctaccccgcctcactccccatcagtgtctctcatcggcggctctccggtgcatgcccctcgccctccctctcacctatacacgcctccttccacttattgcgcgtcaatttcaccttctgctctcggtctcttcgccttagggcttcacgttggtccggggtacctctcgtgcgatccgcgcgcaatggagcaagatcaaagcccagccgtcgacagcgcggattctggcgccgcggcttttgattttgcgactggcaatgcacctagctcggctgtgaccagcggaagcgccgtggcccctgacggtggggctcaggcagctgatacttctgcctaccaggccgagcacacggagttgaatgggacgactggcgatatgtctaattaccaatctgcaggagctgcagagaatggcacagccgtcaccgagataggcgagccggttcctgagccatcctacgaggaagctgtgctttcagcagaagaggctagattgtggagtgttgttactgcaaattgcttagatttcaatgcctggaccacacttattgaggagacggagaaaaatgctgagaacgatattttgaagatacggaaagtgtacgattcatttcttacggaattccctctttgctttgggtactggaagaaatatgctgatcatgaagcgagacttgatggtgtcaataaagttattgaggtgtatgagcgagcagttcttgcagttacttattcagtggacatttggtataactattgtcaattcgcaatttcaacatatgatgacccagatatcgtccgaagactgtttgaacgtggcttggcatacgttggaactgattatcgctccaatattttgtgggatgagtatattaagtatgaagagtcactggaggcatggagtcacctcgctgttatatatacaagagtattggaacatcccatccagcagcttgatcgctattttaattgcctcaaggaattggcttcaaagcacagtttttcagaaatacttactgcggaagaagcctcggtgtatgttgtcacgtctgagaccagtgctcaagcgcctgatggtgacacacatcctgatgatatcgataaggctggtcaaccagaactttcatctttggcagatgcagaaaaccttgcaaagtatgtctccatgagggaagagatgtacaagaaggctaaagagtacgaatctgagatcattggttttgagctagctattagaaggccatattttcatgtcaagcctcttgacaatccagagcttgaaaattggcatagctaccttgactttatcgagaaggaagaagacattaataaggtatgcttttacacttctaggaaccccttgtcctttttatttagtagtttttatggaacacttggaattttataacttacaatccagtcttattggctcaactatatcctttaacggctagtatttggacgaagcttcctttgtaatgggatgttgaactgaggatagagcgtggacataatgtttggtttcgatgaggctaagtactccaaactttcatttggcagtggtcgttctgggttcatgatatatggtaccaaataccagttttgaatttttaatctcatatatgcaggtatttgcttaatgctcaccttcttaaccatctatctatcgagcaggatggtccctcctttcttatggaggggcctccataatcagctaatggagtaatctgtgtgaacttctcttttttttgtcaataccatatccttactatcattatttaccccctttatttcctcacatgcacaaggtttctgatggtatgctaaattgttttcaggttatcaaattgtatgaaaggtgtgtgattgcatgtgctagttattcagaattctggatccgctatgtgcaatgtatggaggataaagggagtctagacctagcaaacaatgccctggctcgtgctactcatgtgtttgtcaagaagcagccggagatccatctatttagtgctcgctttaaggagcttaatggggatatttctggagcacgtgcagaatatcagcatctttactcagatttatgtcctggctttctagaggccatcgtgaagcattctaatatggaacaccgactgggagataaagaattatcttgttcagtttatgaaaaggccatcgctgctgagaagggaaaggaacagagccagctcttgccgacgttgcttattcagtactcccgtttcttatttttggccatccgagatttggagaaggcaagagaaatattaactgtgctgcatgagcagttaaatgctgtcattcatctagagtcaatttttccatgcgaaaagcgtattgattttttagactcacttgtggagaagtttgttacacctgaatcatctcagggagaggtggcaagtctagttgacaaagaggaaatatcttccatatttttagagtttttggatctctttggggatgcaaagtcaatcaagaaggctttaactcggcatacaactcttttttcatgtaagagaagcattctgccatcaaagaaacggaaagcagatgacactgttgtctcagacagggacaaatttgctaaaactgtggttactcagtcagccacgggaactgatccaaatgcttccaatcctcctgtttggcctgcaacttctgaagcatctgggcaacaatggggagcttcttatgcacagcaggctgcatatcctgcatatggaacttacgactacagccatcaaatgccccagcctgctcctcaagcagctgcctatggtgcttatcctccaacatactctgcacaggcctatacacaacaaagctacccacagcctgcagtaattccagcagcaccagtaccagcacctacagcgccgtcagcttatcctcaacaacctgcggcagctcaaccttattatggcacaacctactactgataagtagagtagtcgtggatggtgatccgatgagcctgttaatctaccttttcgcatgtgtggttgctctgtactgccattgtttagctcgcctttagacgaatgctagcgacgagatgatcacttgagaacaaatctgagattcgtacaatcagcatttttgtcgctaggagttgccattgttttcatgcaatagcataatctactttagacgagatagcgttgttaaccatgaatatgaacataatcgacataattcagtgttcatgcctcctttcgtactgtatttttaccccaccagtggtgatggcgggattcctgtcaagcacgctcactggtggagccctccgaacaaattgtcagctaatggctcacgatctgcgactacgcagttgactaatttatactgtgtcaatgctcaacagatcagctcctagagttactctccggtaagacagccagatgatgatgtccgctggttggtagttgaaaatttatgtatttttgcttgtgctatacgagatgaaat

SEQ ID NO: 81608 - DNA, 3248 bp, Zea Mays
cttttgcatacacaccgctacgcccccggctccaaccctacccccctccgcctcctcgccggcgcgctctaccccgcctcactccccatcagtgtctctcatcggcggctctccggtgcatgcccctcgccctccctctcacctatacacgcctccttccacttattgcgcgtcaatttcaccttctgctctcggtctcttcgccttagggcttcacgttggtccggggtacctctcgtgcgatccgcgcgcaatggagcaagatcaaagcccagccgtcgacagcgcggattctggcgccgcggcttttgattttgcgactggcaatgcacctagctcggctgtgaccagcggaagcgccgtggcccctgacggtggggctcaggcagctgatacttctgcctaccaggccgagcacacggagttgaatgggacgactggcgatatgtctaattaccaatctgcaggagctgcagagaatggcacagccgtcaccgagataggcgagccggttcctgagccatcctacgaggaagctgtgctttcagcagaagaggctagattgtggagtgttgttactgcaaattgcttagatttcaatgcctggaccacacttattgaggagacggagaaaaatgctgagaacgatattttgaagatacggaaagtgtacgattcatttcttacggaattccctctttgctttgggtactggaagaaatatgctgatcatgaagcgagacttgatggtgtcaataaagttattgaggtgtatgagcgagcagttcttgcagttacttattcagtggacatttggtataactattgtcaattcgcaatttcaacatatgatgacccagatatcgtccgaagactgtttgaacgtggcttggcatacgttggaactgattatcgctccaatattttgtgggatgagtatattaagtatgaagagtcactggaggcatggagtcacctcgctgttatatatacaagagtattggaacatcccatccagcagcttgatcgctattttaattgcctcaaggaattggcttcaaagcacagtttttcagaaatacttactgcggaagaagcctcggtgtatgttgtcacgtctgagaccagtgctcaagcgcctgatggtgacacacatcctgatgatatcgataaggctggtcaaccagaactttcatctttggcagatgcagaaaaccttgcaaagtatgtctccatgagggaagagatgtacaagaaggctaaagagtacgaatctgagatcattggttttgagctagctattagaaggccatattttcatgtcaagcctcttgacaatccagagcttgaaaattggcatagctaccttgactttatcgagaaggaagaagacattaataagtatttggacgaagcttcctttgtaatgggatgttgaactgaggatagagcgtggacataatgtttggtttcgatgaggctaagtactccaaactttcatttggcagtggtcgttctgggttcatgatatatggtaccaaataccagttttgaatttttaatctcatatatgcaggttatcaaattgtatgaaaggtgtgtgattgcatgtgctagttattcagaattctggatccgctatgtgcaatgtatggaggataaagggagtctagacctagcaaacaatgccctggctcgtgctactcatgtgtttgtcaagaagcagccggagatccatctatttagtgctcgctttaaggagcttaatggggatatttctggagcacgtgcagaatatcagcatctttactcagatttatgtcctggctttctagaggccatcgtgaagcattctaatatggaacaccgactgggagataaagaattatcttgttcagtttatgaaaaggccatcgctgctgagaagggaaaggaacagagccagctcttgccgacgttgcttattcagtactcccgtttcttatttttggccatccgagatttggagaaggcaagagaaatattaactgtgctgcatgagcagttaaatgtaacaaaaacagtgcttgaggctgtcattcatctagagtcaatttttccatgcgaaaagcgtattgattttttagactcacttgtggagaagtttgttacacctgaatcatctcagggagaggtggcaagtctagttgacaaagaggaaatatcttccatatttttagagtttttggatctctttggggatgcaaagtcaatcaagaaggctttaactcggcatacaactcttttttcatgtaagagaagcattctgccatcaaagaaacggaaagcagatgacactgttgtctcagacagggacaaatttgctaaaactgtggttactcagtcagccacgggaactgatccaaatgcttccaatcctcctgtttggcctgcaacttctgaagcatctgggcaacaatggggagcttcttatgcacagcaggctgcatatcctgcatatggaacttacgactacagccatcaaatgccccagcctgctcctcaagcagctgcctatggtgcttatcctccaacatactctgcacaggcctatacacaacaaagctacccacagcctgcagtaattccagcagcaccagtaccagcacctacagcgccgtcagcttatcctcaacaacctgcggcagctcaaccttattatggcacaacctactactgataagtagagtagtcgtggatggtgatccgatgagcctgttaatctaccttttcgcatgtgtggttgctctgtactgccattgtttagctcgcctttagacgaatgctagcgacgagatgatcacttgagaacaaatctgagattcgtacaatcagcatttttgtcgctaggagttgccattgttttcatgcaatagcataatctactttagacgagatagcgttgttaaccatgaatatgaacataatcgacataattcagtgttcatgcctcctttcgtactgtatttttaccccaccagtggtgatggcgggattcctgtcaagcacgctcactggtggagccctccgaacaaattgtcagctaatggctcacgatctgcgactacgcagttgactaatttatactgtgtcaatgctcaacagatcagctcctagagttactctccggtaagacagccagatgatgatgtccgctggttggtagttgaaaatttatgtatttttgcttgtgctatacgagatgaaat

SEQ ID NO: 81609 - DNA, 2934 bp, Zea Mays
tttgcatacacaccgctacgcccccggctccaaccctacccccctccgcctcctcgccggcgcgctctaccccgcctcactccccatcagtgtctctcatcggcggctctccggtgcatgcccctcgccctccctctcacctatacacgcctccttccacttattgcgcgtcaatttcaccttctgctctcggtctcttcgccttagggcttcacgttggtccggggtacctctcgtgcgatccgcgcgcaatggagcaagatcaaagcccagccgtcgacagcgcggattctggcgccgcggcttttgattttgcgactggcaatgcacctagctcggctgtgaccagcggaagcgccgtggcccctgacggtggggctcaggcagctgatacttctgcctaccaggccgagcacacggagttgaatgggacgactggcgatatgtctaattaccaatctgcaggagctgcagagaatggcacagccgtcaccgagataggcgagccggttcctgagccatcctacgaggaagctgtgctttcagcagaagaggctagattgtggagtgttgttactgcaaattgcttagatttcaatgcctggaccacacttattgaggagacggagaaaaatgctgagaacgatattttgaagatacggaaagtgtacgattcatttcttacggaattccctctttgctttgggtactggaagaaatatgctgatcatgaagcgagacttgatggtgtcaataaagttattgaggtgtatgagcgagcagttcttgcagttacttattcagtggacatttggtataactattgtcaattcgcaatttcaacatatgatgacccagatatcgtccgaagactgtttgaacgtggcttggcatacgttggaactgattatcgctccaatattttgtgggatgagtatattaagtatgaagagtcactggaggcatggagtcacctcgctgttatatatacaagagtattggaacatcccatccagcagcttgatcgctattttaattgcctcaaggaattggcttcaaagcacagtttttcagaaatacttactgcggaagaagcctcggtgtatgttgtcacgtctgagaccagtgctcaagcgcctgatggtgacacacatcctgatgatatcgataaggctggtcaaccagaactttcatctttggcagatgcagaaaaccttgcaaagtatgtctccatgagggaagagatgtacaagaaggctaaagagtacgaatctgagatcattggttttgagctagctattagaaggccatattttcatgtcaagcctcttgacaatccagagcttgaaaattggcatagctaccttgactttatcgagaaggaagaagacattaataaggtatgcttttacacttctaggaaccccttgtcctttttatttagtagtttttatggaacacttggaattttataacttacaatccagtcttattggctcaactatatcctttaacggctagtatttggacgaagcttcctttgtaatgggatgttgaactgaggatagagcgtggacataatgtttggtttcgatgaggctaagtactccaaactttcatttggcagtggtcgttctgggttcatgatatatggtaccaaataccagttttgaatttttaatctcatatatgcaggtatttgcttaatgctcaccttcttaaccatctatctatcgagcaggatggtccctcctttcttatggaggggcctccataatcagctaatggagtaatctgtgtgaacttctcttttttttgtcaataccatatccttactatcattatttaccccctttatttcctcacatgcacaaggtttctgatggtatgctaaattgttttcaggttatcaaattgtatgaaaggtgtgtgattgcatgtgctagttattcagaattctggatccgctatgtgcaatgtatggaggataaagggagtctagacctagcaaacaatgccctggctcgtgctactcatgtgtttgtcaagaagcagccggagatccatctatttagtgctcgctttaaggagcttaatggggatatttctggagcacgtgcagaatatcagcatctttactcagatttatgtcctggctttctagaggccatcgtgaagcattctaatatggaacaccgactgtttatgaaaaggccatcgctgctgagaagggaaaggaacagagccagctcttgccgacgttgcttattcagtactcccgtttcttatttttggccatccgagatttggagaaggcaagagaaatattaactgtgctgcatgagcagttaaatgtaacaaaaacagtgcttgaggctgtcattcatctagagtcaatttttccatgcgaaaagcgtattgattttttagactcacttgtggagaagtttgttacacctgaatcatctcagggagaggtggcaagtctagttgacaaagaggaaatatcttccatatttttagagtttttggatctctttggggatgcaaagtcaatcaagaaggctttaactcggcatacaactcttttttcatgtaagagaagcattctgccatcaaagaaacggaaagcagatgacactgttgtctcagacagggacaaatttgctaaaactgtggttactcagtcagccacgggaactgatccaaatgcttccaatcctcctgtttggcctgcaacttctgaagcatctgggcaacaatggggagcttcttatgcacagcaggctgcatatcctgcatatggaacttacgactacagccatcaaatgccccagcctgctcctcaagcagctgcctatggtgcttatcctccaacatactctgcacagtttatctactggtattcagttacgaaatcaggaattgggactt

SEQ ID NO: 81610 - DNA, 2727 bp, Zea Mays
tttgcatacacaccgctacgcccccggctccaaccctacccccctccgcctcctcgccggcgcgctctaccccgcctcactccccatcagtgtctctcatcggcggctctccggtgcatgcccctcgccctccctctcacctatacacgcctccttccacttattgcgcgtcaatttcaccttctgctctcggtctcttcgccttagggcttcacgttggtccggggtacctctcgtgcgatccgcgcgcaatggagcaagatcaaagcccagccgtcgacagcgcggattctggcgccgcggcttttgattttgcgactggcaatgcacctagctcggctgtgaccagcggaagcgccgtggcccctgacggtggggctcaggcagctgatacttctgcctaccaggccgagcacacggagttgaatgggacgactggcgatatgtctaattaccaatctgcaggagctgcagagaatggcacagccgtcaccgagataggcgagccggttcctgagccatcctacgaggaagctgtgctttcagcagaagaggctagattgtggagtgttgttactgcaaattgcttagatttcaatgcctggaccacacttattgaggagacggagaaaaatgctgagaacgatattttgaagatacggaaagtgtacgattcatttcttacggaattccctctttgctttgggtactggaagaaatatgctgatcatgaagcgagacttgatggtgtcaataaagttattgaggtgtatgagcgagcagttcttgcagttacttattcagtggacatttggtataactattgtcaattcgcaatttcaacatatgatgacccagatatcgtccgaagactgtttgaacgtggcttggcatacgttggaactgattatcgctccaatattttgtgggatgagtatattaagtatgaagagtcactggaggcatggagtcacctcgctgttatatatacaagagtattggaacatcccatccagcagcttgatcgctattttaattgcctcaaggaattggcttcaaagcacagtttttcagaaatacttactgcggaagaagcctcggtgtatgttgtcacgtctgagaccagtgctcaagcgcctgatggtgacacacatcctgatgatatcgataaggctggtcaaccagaactttcatctttggcagatgcagaaaaccttgcaaagtatgtctccatgagggaagagatgtacaagaaggctaaagagtacgaatctgagatcattggttttgagctagctattagaaggccatattttcatgtcaagcctcttgacaatccagagcttgaaaattggcatagctaccttgactttatcgagaaggaagaagacattaataagtatttggacgaagcttcctttgtaatgggatgttgaactgaggatagagcgtggacataatgtttggtttcgatgaggctaagtactccaaactttcatttggcagtggtcgttctgggttcatgatatatggtaccaaataccagttttgaatttttaatctcatatatgcaggtatttgcttaatgctcaccttcttaaccatctatctatcgagcaggatggtccctcctttcttatggaggggcctccataatcagctaatggagttatcaaattgtatgaaaggtgtgtgattgcatgtgctagttattcagaattctggatccgctatgtgcaatgtatggaggataaagggagtctagacctagcaaacaatgccctggctcgtgctactcatgtgtttgtcaagaagcagccggagatccatctatttagtgctcgctttaaggagcttaatggggatatttctggagcacgtgcagaatatcagcatctttactcagatttatgtcctggctttctagaggccatcgtgaagcattctaatatggaacaccgactgggagataaagaattatcttgttcagtttatgaaaaggccatcgctgctgagaagggaaaggaacagagccagctcttgccgacgttgcttattcagtactcccgtttcttatttttggccatccgagatttggagaaggcaagagaaatattaactgtgctgcatgagcagttaaatgtaacaaaaacagtgcttgaggctgtcattcatctagagtcaatttttccatgcgaaaagcgtattgattttttagactcacttgtggagaagtttgttacacctgaatcatctcagggagaggtggcaagtctagttgacaaagaggaaatatcttccatatttttagagtttttggatctctttggggatgcaaagtcaatcaagaaggctttaactcggcatacaactcttttttcatgtaagagaagcattctgccatcaaagaaacggaaagcagatgacactgttgtctcagacagggacaaatttgctaaaactgtggttactcagtcagccacgggaactgatccaaatgcttccaatcctcctgtttggcctgcaacttctgaagcatctgggcaacaatggggagcttcttatgcacagcaggctgcatatcctgcatatggaacttacgactacagccatcaaatgccccagcctgctcctcaagcagctgcctatggtgcttatcctccaacatactctgcacagtccagtttatctactggtattcagttacgaaatcaggaattgggactt

SEQ ID NO: 81611 - DNA, 2365 bp, Zea Mays
tttgcatacacaccgctacgcccccggctccaaccctacccccctccgcctcctcgccggcgcgctctaccccgcctcactccccatcagtgtctctcatcggcggctctccgggcttcacgttggtccggggtacctctcgtgcgatccgcgcgcaatggagcaagatcaaagcccagccgtcgacagcgcggattctggcgccgcggcttttgattttgcgactggcaatgcacctagctcggctgtgaccagcggaagcgccgtggcccctgacggtggggctcaggcagctgatacttctgcctaccaggccgagcacacggagttgaatgggacgactggcgatatgtctaattaccaatctgcaggagctgcagagaatggcacagccgtcaccgagataggcgagccggttcctgagccatcctacgaggaagctgtgctttcagcagaagaggctagattgtggagtgttgttactgcaaattgcttagatttcaatgcctggaccacacttattgaggagacggagaaaaatgctgagaacgatattttgaagatacggaaagtgtacgattcatttcttacggaattccctctttgctttgggtactggaagaaatatgctgatcatgaagcgagacttgatggtgtcaataaagttattgaggtgtatgagcgagcagttcttgcagttacttattcagtggacatttggtataactattgtcaattcgcaatttcaacatatgatgacccagatatcgtccgaagactgtttgaacgtggcttggcatacgttggaactgattatcgctccaatattttgtgggatgagtatattaagtatgaagagtcactggaggcatggagtcacctcgctgttatatatacaagagtattggaacatcccatccagcagcttgatcgctattttaattgcctcaaggaattggcttcaaagcacagtttttcagaaatacttactgcggaagaagcctcggtgtatgttgtcacgtctgagaccagtgctcaagcgcctgatggtgacacacatcctgatgatatcgataaggctggtcaaccagaactttcatctttggcagatgcagaaaaccttgcaaagtatgtctccatgagggaagagatgtacaagaaggctaaagagtacgaatctgagatcattggttttgagctagctattagaaggccatattttcatgtcaagcctcttgacaatccagagcttgaaaattggcatagctaccttgactttatcgagaaggaagaagacattaataaggttatcaaattgtatgaaaggtgtgtgattgcatgtgctagttattcagaattctggatccgctatgtgcaatgtatggaggataaagggagtctagacctagcaaacaatgccctggctcgtgctactcatgtgtttgtcaagaagcagccggagatccatctatttagtgctcgctttaaggagcttaatggggatatttctggagcacgtgcagaatatcagcatctttactcagatttatgtcctggctttctagaggccatcgtgaagcattctaatatggaacaccgactgggagataaagaattatcttgttcagtttatgaaaaggccatcgctgctgagaagggaaaggaacagagccagctcttgccgacgttgcttattcagtactcccgtttcttatttttggccatccgagatttggagaaggcaagagaaatattaactgtgctgcatgagcagttaaatgtaacaaaaacagtgcttgaggctgtcattcatctagagtcaatttttccatgcgaaaagcgtattgattttttagactcacttgtggagaagtttgttacacctgaatcatctcagggagaggtggcaagtctagttgacaaagaggaaatatcttccatatttttagagtttttggatctctttggggatgcaaagtcaatcaagaaggctttaactcggcatacaactcttttttcatgtaagagaagcattctgccatcaaagaaacggaaagcagatgacactgttgtctcagacagggacaaatttgctaaaactgtggttactcagtcagccacgggaactgatccaaatgcttccaatcctcctgtttggcctgcaacttctgaagcatctgggcaacaatggggagcttcttatgcacagcaggctgcatatcctgcatatggaacttacgactacagccatcaaatgccccagcctgctcctcaagcagctgcctatggtgcttatcctccaacatactctgcacagtccagtttatctactggtattcagttacgaaatcaggaattgggactt

SEQ ID NO: 81612 - DNA, 3086 bp, Zea Mays
tttgcatacacaccgctacgcccccggctccaaccctacccccctccgcctcctcgccggcgcgctctaccccgcctcactccccatcagtgtctctcatcggcggctctccgggcttcacgttggtccggggtacctctcgtgcgatccgcgcgcaatggagcaagatcaaagcccagccgtcgacagcgcggattctggcgccgcggcttttgattttgcgactggcaatgcacctagctcggctgtgaccagcggaagcgccgtggcccctgacggtggggctcaggcagctgatacttctgcctaccaggccgagcacacggagttgaatgggacgactggcgatatgtctaattaccaatctgcaggagctgcagagaatggcacagccgtcaccgagataggcgagccggttcctgagccatcctacgaggaagctgtgctttcagcagaagaggctagattgtggagtgttgttactgcaaattgcttagatttcaatgcctggaccacacttattgaggagacggagaaaaatgctgagaaatatgctgatcatgaagcgagacttgatggtgtcaataaagttattgaggtgtatgagcgagcagttcttgcagttacttattcagtggacatttggtataactattgtcaattcgcaatttcaacatatgatgacccagatatcgtccgaagactgtttgaacgtggcttggcatacgttggaactgattatcgctccaatattttgtgggatgagtatattaagtatgaagagtcactggaggcatggagtcacctcgctgttatatatacaagagtattggaacatcccatccagcagcttgatcgctattttaattgcctcaaggaattggcttcaaagcacagtttttcagaaatacttactgcggaagaagcctcggtgtatgttgtcacgtctgagaccagtgctcaagcgcctgatggtgacacacatcctgatgatatcgataaggctggtcaaccagaactttcatctttggcagatgcagaaaaccttgcaaagtatgtctccatgagggaagagatgtacaagaaggctaaagagtacgaatctgagatcattggttttgagctagctattagaaggccatattttcatgtcaagcctcttgacaatccagagcttgaaaattggcatagctaccttgactttatcgagaaggaagaagacattaataagtatttggacgaagcttcctttgtaatgggatgttgaactgaggatagagcgtggacataatgtttggtttcgatgaggctaagtatttgcttaatgctcaccttcttaaccatctatctatcgagcaggatggtccctcctttcttatggaggggcctccataatcagctaatggagtaatctgttatcaaattgtatgaaaggtgtgtgattgcatgtgctagttattcagaattctggatccgctatgtgcaatgtatggaggataaagggagtctagacctagcaaacaatgccctggctcgtgctactcatgtgtttgtcaagaagcagccggagatccatctatttagtgctcgctttaaggagcttaatggggatatttctggagcacgtgcagaatatcagcatctttactcagatttatgtcctggctttctagaggccatcgtgaagcattctaatatggaacaccgactgggagataaagaattatcttgttcagtttatgaaaaggccatcgctgctgagaagggaaaggaacagagccagctcttgccgacgttgcttattcagtactcccgtttcttatttttggccatccgagatttggagaaggcaagagaaatattaactgtgctgcatgagcagttaaatgtaacaaaaacagtgcttgaggctgtcattcatctagagtcaatttttccatgcgaaaagcgtattgattttttagactcacttgtggagaagtttgttacacctgaatcatctcagggagaggtggcaagtctagttgacaaagaggaaatatcttccatatttttagagtttttggatctctttggggatgcaaagtcaatcaagaaggctttaactcggcatacaactcttttttcatgtaagagaagcattctgccatcaaagaaacggaaagcagatgacactgttgtctcagacagggacaaatttgctaaaactgtggttactcagtcagccacgggaactgatccaaatgcttccaatcctcctgtttggcctgcaacttctgaagcatctgggcaacaatggggagcttcttatgcacagcaggctgcatatcctgcatatggaacttacgactacagccatcaaatgccccagcctgctcctcaagcagctgcctatggtgcttatcctccaacatactctgcacaggcctatacacaacaaagctacccacagcctgcagtaattccagcagcaccagtaccagcacctacagcgccgtcagcttatcctcaacaacctgcggcagctcaaccttattatggcacaacctactactgataagtagagtagtcgtggatggtgatccgatgagcctgttaatctaccttttcgcatgtgtggttgctctgtactgccattgtttagctcgcctttagacgaatgctagcgacgagatgatcacttgagaacaaatctgagattcgtacaatcagcatttttgtcgctaggagttgccattgttttcatgcaatagcataatctactttagacgagatagcgttgttaaccatgaatatgaacataatcgacataattcagtgttcatgcctcctttcgtactgtatttttaccccaccagtggtgatggcgggattcctgtcaagcacgctcactggtggagccctccgaacaaattgtcagctaatggctcacgatctgcgactacgcagttgactaatttatactgtgtcaatgctcaacagatcagctcctagagttactctccggtaagacagccagatgatgatgtccgctggttggtagttgaaaatttatgtatttttgcttgtgctatacgagatgaaat

SEQ ID NO: 81613 - DNA, 3274 bp, Zea Mays
tttgcatacacaccgctacgcccccggctccaaccctacccccctccgcctcctcgccggcgcgctctaccccgcctcactccccatcagtgtctctcatcggcggctctccggtgcatgcccctcgccctccctctcacctatacacgcctccttccacttattgcgcgtcaatttcaccttctgctctcggtctcttcgccttagggcttcacgttggtccggggtacctctcgtgcgatccgcgcgcaatggagcaagatcaaagcccagccgtcgacagcgcggattctggcgccgcggcttttgattttgcgactggcaatgcacctagctcggctgtgaccagcggaagcgccgtggcccctgacggtggggctcaggcagctgatacttctgcctaccaggccgagcacacggagttgaatgggacgactggcgatatgtctaattaccaatctgcaggagctgcagagaatggcacagccgtcaccgagataggcgagccggttcctgagccatcctacgaggaagctgtgctttcagcagaagaggctagattgtggagtgttgttactgcaaattgcttagatttcaatgcctggaccacacttattgaggagacggagaaaaatgctgagaacgatattttgaagatacggaaagtgtacgattcatttcttacggaattccctctttgctttgggtactggaagaaatatgctgatcatgaagcgagacttgatggtgtcaataaagttattgaggtgtatgagcgagcagttcttgcagttacttattcagtggacatttggtataactattgtcaattcgcaatttcaacatatgatgacccagatatcgtccgaagtatgaagagtcactggaggcatggagtcacctcgctgttatatatacaagagtattggaacatcccatccagcagcttgatcgctattttaattgcctcaaggaattggcttcaaagcacagtttttcagaaatacttactgcggaagaagcctcggtgtatgttgtcacgtctgagaccagtgctcaagcgcctgatggtgacacacatcctgatgatatcgataaggctggtcaaccagaactttcatctttggcagatgcagaaaaccttgcaaagtatgtctccatgagggaagagatgtacaagaaggctaaagagtacgaatctgagatcattggttttgagctagctattagaaggccatattttcatgtcaagcctcttgacaatccagagcttgaaaattggcatagctaccttgactttatcgagaaggaagaagacattaataagtatttggacgaagcttcctttgtaatgggatgttgaactgaggatagagcgtggacataatgtttggtttcgatgaggctaagtactccaaactttcatttggcagtggtcgttctgggttcatgatatatggtaccaaataccagttttgaatttttaatctcatatatgcaggtatttgcttaatgctcaccttcttaaccatctatctatcgagcaggatggtccctcctttcttatggaggggcctccataatcagctaatggagtaatctgttatcaaattgtatgaaaggtgtgtgattgcatgtgctagttattcagaattctggatccgctatgtgcaatgtatggaggataaagggagtctagacctagcaaacaatgccctggctcgtgctactcatgtgtttgtcaagaagcagccggagatccatctatttagtgctcgctttaaggagcttaatggggatatttctggagcacgtgcagaatatcagcatctttactcagatttatgtcctggctttctagaggccatcgtgaagcattctaatatggaacaccgactgggagataaagaattatcttgttcagtttatgaaaaggccatcgctgctgagaagggaaaggaacagagccagctcttgccgacgttgcttattcagtactcccgtttcttatttttggccatccgagatttggagaaggcaagagaaatattaactgtgctgcatgagcagttaaatgtaacaaaaacagtgcttgaggctgtcattcatctagagtcaatttttccatgcgaaaagcgtattgattttttagactcacttgtggagaagtttgttacacctgaatcatctcagggagaggtggcaagtctagttgacaaagaggaaatatcttccatatttttagagtttttggatctctttggggatgcaaagtcaatcaagaaggctttaactcggcatacaactcttttttcatgtaagagaagcattctgccatcaaagaaacggaaagcagatgacactgttgtctcagacagggacaaatttgctaaaactgtggttactcagtcagccacgggaactgatccaaatgcttccaatcctcctgtttggcctgcaacttctgaagcatctgggcaacaatggggagcttcttatgcacagcaggctgcatatcctgcatatggaacttacgactacagccatcaaatgccccagcctgctcctcaagcagctgcctatggtgcttatcctccaacatactctgcacaggcctatacacaacaaagctacccacagcctgcagtaattccagcagcaccagtaccagcacctacagcgccgtcagcttatcctcaacaacctgcggcagctcaaccttattatggcacaacctactactgataagtagagtagtcgtggatggtgatccgatgagcctgttaatctaccttttcgcatgtgtggttgctctgtactgccattgtttagctcgcctttagacgaatgctagcgacgagatgatcacttgagaacaaatctgagattcgtacaatcagcatttttgtcgctaggagttgccattgttttcatgcaatagcataatctactttagacgagatagcgttgttaaccatgaatatgaacataatcgacataattcagtgttcatgcctcctttcgtactgtatttttaccccaccagtggtgatggcgggattcctgtcaagcacgctcactggtggagccctccgaacaaattgtcagctaatggctcacgatctgcgactacgcagttgactaatttatactgtgtcaatgctcaacagatcagctcctagagttactctccggtaagacagccagatgatgatgtccgctggttggtagttgaaaatttatgtatttttgcttgtgctatacgagatgaaat

SEQ ID NO: 81614 - DNA, 3250 bp, Zea Mays
tttgcatacacaccgctacgcccccggctccaaccctacccccctccgcctcctcgccggcgcgctctaccccgcctcactccccatcagtgtctctcatcggcggctctccgggcttcacgttggtccggggtacctctcgtgcgatccgcgcgcaatggagcaagatcaaagcccagccgtcgacagcgcggattctggcgccgcggcttttgattttgcgactggcaatgcacctagctcggctgtgaccagcggaagcgccgtggcccctgacggtggggctcaggcagctgatacttctgcctaccaggccgagcacacggagttgaatgggacgactggcgatatgtctaattaccaatctgcaggagctgcagagaatggcacagccgtcaccgagataggcgagccggttcctgagccatcctacgaggaagctgtgctttcagcagaagaggctagattgtggagtgttgttactgcaaattgcttagatttcaatgcctggaccacacttattgaggagacggagaaaaatgctgagaacgatattttgaagatacggaaagtgtacgattcatttcttacggaattccctctttgctttgggtactggaagaaatatgctgatcatgaagcgagacttgatggtgtcaataaagttattgaggtgtatgagcgagcagttcttgcagttacttattcagtggacatttggtataactattgtcaattcgcaatttcaacatatgatgacccagatatcgtccgaagactgtttgaacgtggcttggcatacgttggaactgattatcgctccaatattttgtgggatgagtatattaagtatgaagagtcactggaggcatggagtcacctcgctgttatatatacaagagtattggaacatcccatccagcagcttgatcgctattttaattgcctcaaggaattggcttcaaagcacagtttttcagaaatacttactgcggaagaagcctcggtgtatgttgtcacgtctgagaccagtgctcaagcgcctgatggtgacacacatcctgatgatatcgataaggctggtcaaccagaactttcatctttggcagatgcagaaaaccttgcaaagtatgtctccatgagggaagagatgtacaagaaggctaaagagtacgaatctgagatcattggttttgagctagctattagaaggccatattttcatgtcaagcctcttgacaatccagagcttgaaaattggcatagctaccttgactttatcgagaaggaagaagacattaataagtatttggacgaagcttcctttgtaatgggatgttgaactgaggatagagcgtggacataatgtttggtttcgatgaggctaagtatttgcttaatgctcaccttcttaaccatctatctatcgagcaggatggtccctcctttcttatggaggggcctccataatcagctaatggagtaatctgttatcaaattgtatgaaaggtgtgtgattgcatgtgctagttattcagaattctggatccgctatgtgcaatgtatggaggataaagggagtctagacctagcaaacaatgccctggctcgtgctactcatgtgtttgtcaagaagcagccggagatccatctatttagtgctcgctttaaggagcttaatggggatatttctggagcacgtgcagaatatcagcatctttactcagatttatgtcctggctttctagaggccatcgtgaagcattctaatatggaacaccgactgggagataaagaattatcttgttcagtttatgaaaaggccatcgctgctgagaagggaaaggaacagagccagctcttgccgacgttgcttattcagtactcccgtttcttatttttggccatccgagatttggagaaggcaagagaaatattaactgtgctgcatgagcagttaaatgtaacaaaaacagtgcttgaggctgtcattcatctagagtcaatttttccatgcgaaaagcgtattgattttttagactcacttgtggagaagtttgttacacctgaatcatctcagggagaggtggcaagtctagttgacaaagaggaaatatcttccatatttttagagtttttggatctctttggggatgcaaagtcaatcaagaaggctttaactcggcatacaactcttttttcatgtaagagaagcattctgccatcaaagaaacggaaagcagatgacactgttgtctcagacagggacaaatttgctaaaactgtggttactcagtcagccacgggaactgatccaaatgcttccaatcctcctgtttggcctgcaacttctgaagcatctgggcaacaatggggagcttcttatgcacagcaggctgcatatcctgcatatggaacttacgactacagccatcaaatgccccagcctgctcctcaagcagctgcctatggtgcttatcctccaacatactctgcacagtccagtttatctactggtattcagttacgaaatcaggaattgggacttagggtatcaatttgagtttaaatggattgcgtcacaacagagcctatacacaacaaagctacccacagcctgcagtaattccagcagcaccagtaccagcacctacagcgccgtcagcttatcctcaacaacctgcggcagctcaaccttattatggcacaacctactactgataagtagagtagtcgtggatggtgatccgatgagcctgttaatctaccttttcgcatgtgtggttgctctgtactgccattgtttagctcgcctttagacgaatgctagcgacgagatgatcacttgagaacaaatctgagattcgtacaatcagcatttttgtcgctaggagttgccattgttttcatgcaatagcataatctactttagacgagatagcgttgttaaccatgaatatgaacataatcgacataattcagtgttcatgcctcctttcgtactgtatttttaccccaccagtggtgatggcgggattcctgtcaagcacgctcactggtggagccctccgaacaaattgtcagctaatggctcacgatctgcgactacgcagttgactaatttatactgtgtcaatgctcaacagatcagctcctagagttactctccggtaagacagccagatgatgatgtccgctggttggtagttgaaaatttatgtatttttgcttgtgctatacgagatgaaat

SEQ ID NO: 81615 - DNA, 1029 bp, Zea Mays
aaaaatgttagtgtttttatagggctaaaaaatattgcgcgctgcacggaggcattcatccgtcctgcgattttcgtttcctccgtgtctccgttcttcatcctgcgttagagaacaagacgaggtcgaggacccagacgcagacgcacacgcagcgcgccttctccaccgcgaagtcatcgttccgcgctgccgccgccgccctagcaaggtgttggattctgtgttgcggcttcggagtgtcattgctacccttctcctgacaacatggtttctttcgagatgaatgacctcaagatggattttggccaacccttgctgttttcctccaaaggattcctattattggatggatttttcaacaaccgtttgtcacatcgttccttgaccgctacagaggaaaacgagttccggtttagcttactcctgctatatttcaacatacttccctcacaaatatcatgcggttatggatatgttccgtccttgcctttttctttaacttgtttagttggtggtaggattttttgttgttgtgtaaattacccctcatccgtggttttccacagaccagaatgcattttccccgttaatacattgaagaaagttctcatgcaagcctctttgtggggggaaatgaagtcttagggatgttctgaaagtagtgactacccatcatgtctttttgtaacattacttaatgtaagcatatctgatataggtatgcaaaggctacaatagcttccgtttgctgtatgggaaagaaaggagacttggcagaatcgaagttacttgtgattcttgtaccgccatgtgattattttcttcagtaattccccttccaggcctagtatgggaactcagctttgagttgtaaagaaaaattgcattggtaatctggtatgagttctggtctgctggagtggcgtctacgcctcgccatgttggctttgtaaggttccgcagctaatcaaaagtgagccgtttatcaccttgcaagtacctttcaaaatacaagctggaaagaag

SEQ ID NO: 81616 - DNA, 944 bp, Zea Mays
cttctctcagactattttctaaagaacccctgcgtcttcacagaataatgcgtgctgtcctcaggtgggattgcactcagccttagatggtggatctgatgaacaagatttgatgggtactatctcatttggtgctggcttttttctggttcttattgggtggccctttcttggcatgctcttagaagcatatggctttgttgtactcttcagtggattttggccaacccttgctgttttcctccaaaggattcctattattggatggatttttcaacaaccgtttgtcacatcgttccttgaccgctacagaggaaaacgagttccggtttagcttactcctgctatatttcaacatacttccctcacaaatatcatgcggttatggatatgttccgtccttgcctttttctttaacttgtttagttggtggtaggattttttgttgttgtgtaaattacccctcatccgtggttttccacagaccagaatgcattttccccgttaatacattgaagaaagttctcatgcaagcctctttgtggggggaaatgaagtcttagggatgttctgaaagtagtgactacccatcatgtctttttgtaacattacttaatgtaagcatatctgatataggtatgcaaaggctacaatagcttccgtttgctgtatgggaaagaaaggagacttggcagaatcgaagttacttgtgattcttgtaccgccatgtgattattttcttcagtaattccccttccaggcctagtatgggaactcagctttgagttgtaaagaaaaattgcattggtaatctggtatgagttctggtctgctggagtggcgtctacgcctcgccatgttggctttgtaaggttccgcagctaatcaaaagtgagccgtttatcaccttgcaagtacctttcaaaatacaagctggaaagaag

SEQ ID NO: 81617 - DNA, 1233 bp, Zea Mays
cagactattttctaaagaacccctgcgtcttcacagaataatgcgtgctgtcctcaggtgggattgcactcagccttagatggtggatctgatgaacaagatttgatgggtactatctcatttggtgctggcttttttctggttcttattgggtggccctttcttggcatgctcttagaagcatatggctttgttgtactcttcaggttgtatgattctctttaattgttctctctttagcaatctgcaacaggaaatgcttctaacattcatccatcttacaaagtggcaaatcccttgccactcacccacaaatagcagcaattcaaatggttgtacacacaatgcaacagtacacatctgctattcaaggttgaaacatcaacctgaagcattcaatgcattaccaataactattcacaaaacttttttttgctcttactccatcattaatgtcaaaagattggcttctatatggatgcttacatggatttagtttcagtggattttggccaacccttgctgttttcctccaaaggattcctattattggatggatttttcaacaaccgtttgtcacatcgttccttgaccgctacagaggaaaacgagttccggtttagcttactcctgctatatttcaacatacttccctcacaaatatcatgcggttatggatatgttccgtccttgcctttttctttaacttgtttagttggtggtaggattttttgttgttgtgtaaattacccctcatccgtggttttccacagaccagaatgcattttccccgttaatacattgaagaaagttctcatgcaagcctctttgtggggggaaatgaagtcttagggatgttctgaaagtagtgactacccatcatgtctttttgtaacattacttaatgtaagcatatctgatataggtatgcaaaggctacaatagcttccgtttgctgtatgggaaagaaaggagacttggcagaatcgaagttacttgtgattcttgtaccgccatgtgattattttcttcagtaattccccttccaggcctagtatgggaactcagctttgagttgtaaagaaaaattgcattggtaatctggtatgagttctggtctgctggagtggcgtctacgcctcgccatgttggctttgtaaggttccgcagctaatcaaaagtgagccgtttatcaccttgcaagtacctttcaaaatacaagctggaaagaag

SEQ ID NO: 81618 - DNA, 1220 bp, Zea Mays
ttggcttaacggatcagcaggtggtaccacacatgctacatggaatggaagaggcccataaaaagtatggaggaatgggtactttactagtcaacaaggtatcagcagagtcagcaaaccagttcggcgagttggtagctgatcctgaaacaaatgaactgctgcactatacggaaaagccggagacttttgtgagtgatctcataaattgcggagtatatatatttactcccgatatccttagcgccattgaggatgtcttaaaacagaaaaaagacagagcaaatttgcggcgtgtatctagcattgaagctcttcattcagcaactaaggcgcttccaccagactttgttaggttagatcaagacattttatcccctcgagcgggaaagaaggagctgtacacataccagacacttgatttctgggaacagatcaaaaccccagggatgtctttgagatgctctgggttatatctctctcagtttcgccatacctctcctcatcttttagcctcaggagatggcaaaagaactgccactattgttggcgatgtctatatccatccatctgccaaggtgcatcctacttcaaagattggcccaaatgtctctatatcagcaaatgcacgcgttggagctggtgccaggcttatcaattgcataattctggatgatgttgaaattatggaaaatgctgttgttatacattcaattgtagggtggaaatcatccattggaaaatggtcacgtgtacagggcgaaggtgatcacaatgccaaacttggcattactattcttggtgaagccgttgatgttgaagatgaagtagttgtagttaacagcatcgtgctcccaaataaaactctcaatgtcagtgtccaagaggagatcatcctataataaccatcgtttttttttgtctaattccatataaggtctgagtaccaatcacatagtttaagtttattcgttctcaccatgtaatgtaaccttccattagattgagattattagtttgcatttatacctgtcttgcagcatgacactgcacaatcttgacttgctatgctactttggttagcgattgtggtgatgtaaaaaatgtacaaacaggtgacaccattttttgtgagaatgactcaagacattacatcaaatgtgaattcaactgcgtgttgtataaatttttaacaaaaatgcatgagcagttagagcact

SEQ ID NO: 81619 - DNA, 1955 bp, Zea Mays
cggatcccagttcgcccgcctccgctccgctgcgcaccaacacacacgctcctcccgcctcgttgccccacggatcctctgacgtactgcaccgtgcagttgggtcactgcgcgtgggccctgtcgcacgcggagcccacgcgacagtggcccatgcagtactgcaggggatccccacctcctccgacgtctctgatcggcatcgcctccgctaagagacccgcggtccacgctcccgtccaaatcccatcgccataaatctcgccacgcccgcgcccgcgcccgcgcgtgtctcttccccccaccactccgccaccggcgccgaagcagagcagccatggccggctccgagcagcgcgtcgtcgccgtcatcatggtcggcggccccaccaaagggacgcggttccggccgctgtcgctgaacgtgcccaagccgctcttccctatcgccggccagcccatggtgcaccaccccatctccgcctgcagccggatcccccacctggcacagatatacctcatcgggttctatgaggagcgggagttcgcgctctatgtctcgtctatctcccacgagctcaggatccctgtcaggtacctacgagaggataagcctcacgggtcagctggagggctctacagctttagagattacatcatggaagacagtccgtcacacatagttctgctgaattgcgacgtctgttctagcttccctcttccagacatgctagaggcccataaaaagtatggaggaatgggtactttactagtcaacaaggtatcagcagagtcagcaaaccagttcggcgagttggtagctgatcctgaaacaaatgaactgctgcactatacggaaaagccggagacttttgtgagtgcagttttgctctttgttggtttatttgctcgttgtaattttttcggttgagattttgcatgtcatatttttgctctgaaattgattgcacctttcacatgcaatgattctcagtgagtaattggcatagttgatagcagtaatgcagtttatctatgtgtaggtgagtgatctcataaattgcggagtatatatatttactcccgatatccttagcgccattgaggatgtcttaaaacagaaaaaagacagagcaaatttgcggcgtgtatctagcattgaagctcttcattcagcaactaagatgtctttgagatgctctgggttatatctctctcagtttcgccatacctctcctcatcttttagcctcaggagatggcaaaagaactgccactattgttggcgatgtctatatccatccatctgccaaggtgcatcctacttcaaagattggcccaaatgtctctatatcagcaaatgcacgcgttggagctggtgccaggcttatcaattgcataattctggatgatgttgaaattatggaaaatgctgttgttatacattcaattgtagggtggaaatcatccattggaaaatggtcacgtgtacagggcgaaggtgatcacaatgccaaacttggcattactattcttggtgaagccgttgatgttgaagatgaagtagttgtagttaacagcatcgtgctcccaaataaaactctcaatgtcagtgtccaagaggagatcatcctataataaccatcgtttttttttgtctaattccatataaggtctgagtaccaatcacatagtttaagtttattcgttctcaccatgtaatgtaaccttccattagattgagattattagtttgcatttatacctgtcttgcagcatgacactgcacaatcttgacttgctatgctactttggttagcgattgtggtgatgtaaaaaatgtacaaacaggtgacaccattttttgtgagaatgactcaagacattacatcaaatgtgaattcaactgcgtgttgtataaatttttaacaaaaatgcatgagcagttagagcact

SEQ ID NO: 81620 - DNA, 2207 bp, Zea Mays
tcgcccgcctccgctccgctgcgcaccaacacacacgctcctcccgcctcgttgccccacggatcctctgacgtactgcaccgtgcagttgggtcactgcgcgtgggccctgtcgcacgcggagcccacgcgacagtggcccatgcagtactgcaggggatccccacctcctccgacgtctctgatcggcatcgcctccgctaagagacccgcggtccacgctcccgtccaaatcccatcgccataaatctcgccacgcccgcgcccgcgcccgcgcgtgtctcttccccccaccactccgccaccggcgccgaagcagagcagccatggccggctccgagcagcgcgtcgtcgccgtcatcatggtcggcggccccaccaaagggacgcggttccggccgctgtcgctgaacgtgcccaagccgctcttccctatcgccggccagcccatggtgcaccaccccatctccgcctgcagccggatcccccacctggcacagatatacctcatcgggttctatgaggagcgggagttcgcgctctatgtctcgtctatctcccacgagctcaggatccctgtcaggtacctacgagaggataagcctcacgggtcagctggagggctctacagctttagagattacatcatggaagacagtccgtcacacatagttctgctgaattgcgacgtctgttctagcttccctcttccagacatgctagaggcccataaaaagtatggaggaatgggtactttactagtcaacaaggtatcagcagagtcagcaaaccagttcggcgagttggtagctgatcctgaaacaaatgaactgctgcactatacggaaaagccggagacttttgtgagtgatctcataaattgcggagtatatatatttactcccgatatccttagcgccattgaggatgtcttaaaacagaaaaaagacagaggtattgtctcatgttatattacaacgattttccttgtaaatgtgtgtgattgtttgaaacagaacattctttgtttattctattgcttcaaatgtcaacttctcttaactaagtagatgtaaatgccttctttacttttgacgcaagtcatttgggaaaaaaatgtttgatttgccgatattcatattcttatattaattcatacatgggtgctctaaaatgtattacttgtagcagatattctaactcaatcttctagttcccttgattgacagttttaacacaagtttaatccctttaagtgctacgtttcagcaaatttgcggcgtgtatctagcattgaagctcttcattcagcaactaaggcgcttccaccagactttgttaggttagatcaagacattttatcccctcgagcgggaaagaaggagctgtacacataccagacacttgatttctgggaacagatcaaaaccccagggatgtctttgagatgctctgggttatatctctctcagtttcgccatacctctcctcatcttttagcctcaggagatggcaaaagaactgccactattgttggcgatgtctatatccatccatctgccaaggtgcatcctacttcaaagattggcccaaatgtctctatatcagcaaatgcacgcgttggagctggtgccaggcttatcaattgcataattctggatgatgttgaaattatggaaaatgctgttgttatacattcaattgtagggtggaaatcatccattggaaaatggtcacgtgtacagggcgaaggtgatcacaatgccaaacttggcattactattcttggtgaagccgttgatgttgaagatgaagtagttgtagttaacagcatcgtgctcccaaataaaactctcaatgtcagtgtccaagaggagatcatcctataataaccatcgtttttttttgtctaattccatataaggtctgagtaccaatcacatagtttaagtttattcgttctcaccatgtaatgtaaccttccattagattgagattattagtttgcatttatacctgtcttgcagcatgacactgcacaatcttgacttgctatgctactttggttagcgattgtggtgatgtaaaaaatgtacaaacaggtgacaccattttttgtgagaatgactcaagacattacatcaaatgtgaattcaactgcgtgttgtataaatttttaacaaaaatgcatgagcagttagagcact

SEQ ID NO: 81621 - DNA, 1905 bp, Zea Mays
tcgcccgcctccgctccgctgcgcaccaacacacacgctcctcccgcctcgttgccccacggatcctctgacgtactgcaccgtgcagttgggtcactgcgcgtgggccctgtcgcacgcggagcccacgcgacagtggcccatgcagtactgcaggggatccccacctcctccgacgtctctgatcggcatcgcctccgctaagagacccgcggtccacgctcccgtccaaatcccatcgccataaatctcgccacgcccgcgcccgcgcccgcgcgtgtctcttccccccaccactccgccaccggcgccgaagcagagcagccatggccggctccgagcagcgcgtcgtcgccgtcatcatggtcggcggccccaccaaagggacgcggttccggccgctgtcgctgaacgtgcccaagccgctcttccctatcgccggccagcccatggtgcaccaccccatctccgcctgcagccggatcccccacctggcacagatatacctcatcgggttctatgaggagcgggagttcgcgctctatgtctcgtctatctcccacgagctcaggatccctgtcaggtacctacgagaggataagcctcacgggtcagctggagggctctacagctttagagattacatcatggaagacagtccgtcacacatagttctgctgaattgcgacgtctgttctagcttccctcttccagacatgctagaggcccataaaaagtatggaggaatgggtactttactagtcaacaaggtatcagcagagtcagcaaaccagttcggcgagttggtagctgatcctgaaacaaatgaactgctgcactatacggaaaagccggagacttttgtgagtgatctcataaattgcggagtatatatatttactcccgatatccttagcgccattgaggatgtcttaaaacagaaaaaagacagagtgctacgtttcagcaaatttgcggcgtgtatctagcattgaagctcttcattcagcaactaaggcgcttccaccagactttgttaggttagatcaagacattttatcccctcgagcgggaaagaaggagctgtacacataccagacacttgatttctgggaacagatcaaaaccccagggatgtctttgagatgctctgggttatatctctctcagtttcgccatacctctcctcatcttttagcctcaggagatggcaaaagaactgccactattgttggcgatgtctatatccatccatctgccaaggtgcatcctacttcaaagattggcccaaatgtctctatatcagcaaatgcacgcgttggagctggtgccaggcttatcaattgcataattctggatgatgttgaaattatggaaaatgctgttgttatacattcaattgtagggtggaaatcatccattggaaaatggtcacgtgtacagggcgaaggtgatcacaatgccaaacttggcattactattcttggtgaagccgttgatgttgaagatgaagtagttgtagttaacagcatcgtgctcccaaataaaactctcaatgtcagtgtccaagaggagatcatcctataataaccatcgtttttttttgtctaattccatataaggtctgagtaccaatcacatagtttaagtttattcgttctcaccatgtaatgtaaccttccattagattgagattattagtttgcatttatacctgtcttgcagcatgacactgcacaatcttgacttgctatgctactttggttagcgattgtggtgatgtaaaaaatgtacaaacaggtgacaccattttttgtgagaatgactcaagacattacatcaaatgtgaattcaactgcgtgttgtataaatttttaacaaaaatgcatgagcagttagagcact

SEQ ID NO: 81622 - DNA, 1956 bp, Zea Mays
tcgcccgcctccgctccgctgcgcaccaacacacacgctcctcccgcctcgttgccccacggatcctctgacgtactgcaccgtgcagttgggtcactgcgcgtgggccctgtcgcacgcggagcccacgcgacagtggcccatgcagtactgcaggggatccccacctcctccgacgtctctgatcggcatcgcctccgctaagagacccgcggtccacgctcccgtccaaatcccatcgccataaatctcgccacgcccgcgcccgcgcccgcgcgtgtctcttccccccaccactccgccaccggcgccgaagcagagcagccatggccggctccgagcagcgcgtcgtcgccgtcatcatggtcggcggccccaccaaagggacgcggttccggccgctgtcgctgaacgtgcccaagccgctcttccctatcgccggccagcccatggtgcaccaccccatctccgcctgcagccggatcccccacctggcacagatatacctcatcgggttctatgaggagcgggagttcgcgctctatgtctcgtctatctcccacgagctcaggatccctgtcaggtacctacgagaggataagcctcacgggtcagctggagggctctacagctttagagattacatcatggaagacagtccgtcacacatagttctgctgaattgcgacgtctgttctagcttccctcttccagacatgctagcttctgcagtgccggtcttgttggataccaacagctaaatgtataactgttttcatcattgtagaggcccataaaaagtatggaggaatgggtactttactagtcaacaaggtatcagcagagtcagcaaaccagttcggcgagttggtagctgatcctgaaacaaatgaactgctgcactatacggaaaagccggagacttttgtgagtgatctcataaattgcggagtatatatatttactcccgatatccttagcgccattgaggatgtcttaaaacagaaaaaagacagagcaaatttgcggcgtgtatctagcattgaagctcttcattcagcaactaaggcgcttccaccagactttgttaggttagatcaagacattttatcccctcgagcgggaaagaaggagctgtacacataccagacacttgatttctgggaacagatcaaaaccccagggatgtctttgagatgctctgggttatatctctctcagtttcgccatacctctcctcatcttttagcctcaggagatggcaaaagaactgccactattgttggcgatgtctatatccatccatctgccaaggtgcatcctacttcaaagattggcccaaatgtctctatatcagcaaatgcacgcgttggagctggtgccaggcttatcaattgcataattctggatgatgttgaaattatggaaaatgctgttgttatacattcaattgtagggtggaaatcatccattggaaaatggtcacgtgtacagggcgaaggtgatcacaatgccaaacttggcattactattcttggtgaagccgttgatgttgaagatgaagtagttgtagttaacagcatcgtgctcccaaataaaactctcaatgtcagtgtccaagaggagatcatcctataataaccatcgtttttttttgtctaattccatataaggtctgagtaccaatcacatagtttaagtttattcgttctcaccatgtaatgtaaccttccattagattgagattattagtttgcatttatacctgtcttgcagcatgacactgcacaatcttgacttgctatgctactttggttagcgattgtggtgatgtaaaaaatgtacaaacaggtgacaccattttttgtgagaatgactcaagacattacatcaaatgtgaattcaactgcgtgttgtataaatttttaacaaaaatgcatgagcagttagagcact

SEQ ID NO: 81623 - DNA, 1787 bp, Zea Mays
tcgcccgcctccgctccgctgcgcaccaacacacacgctcctcccgcctcgttgccccacggatcctctgacgtactgcaccgtgcagttgggtcactgcgcgtgggccctgtcgcacgcggagcccacgcgacagtggcccatgcagtactgcaggggatccccacctcctccgacgtctctgatcggcatcgcctccgctaagagacccgcggtccacgctcccgtccaaatcccatcgccataaatctcgccacgcccgcgcccgcgcccgcgcgtgtctcttccccccaccactccgccaccggcgccgaagcagagcagccatggccggctccgagcagcgcgtcgtcgccgtcatcatggtcggcggccccaccaaagggacgcggttccggccgctgtcgctgaacgtgcccaagccgctcttccctatcgccggccagcccatggtgcaccaccccatctccgcctgcagccggatcccccacctggcacagatatacctcatcgggttctatgaggagcgggagttcgcgctctatgtctcgtctatctcccacgagctcaggatccctgtcaggtacctacgagaggataagcctcacgggtcagctggagggctctacagctttagagattacatcatggaagacagtccgtcacacatagttctgctgaattgcgacgtctgttctagcttccctcttccagacatgctagaggcccataaaaagtatggaggaatgggtactttactagtcaacaaggtatcagcagagtcagcaaaccagttcggcgagttggtagctgatcctgaaacaaatgaactgctgcactatacggaaaagccggagacttttcaaatttgcggcgtgtatctagcattgaagctcttcattcagcaactaaactttgttaggttagatcaagacattttatcccctcgagcgggaaagaaggagctgtacacataccagacacttgatttctgggaacagatcaaaaccccagggatgtctttgagatgctctgggttatatctctctcagtttcgccatacctctcctcatcttttagcctcaggagatggcaaaagaactgccactattgttggcgatgtctatatccatccatctgccaaggtgcatcctacttcaaagattggcccaaatgtctctatatcagcaaatgcacgcgttggagctggtgccaggcttatcaattgcataattctggatgatgttgaaattatggaaaatgctgttgttatacattcaattgtagggtggaaatcatccattggaaaatggtcacgtgtacagggcgaaggtgatcacaatgccaaacttggcattactattcttggtgaagccgttgatgttgaagatgaagtagttgtagttaacagcatcgtgctcccaaataaaactctcaatgtcagtgtccaagaggagatcatcctataataaccatcgtttttttttgtctaattccatataaggtctgagtaccaatcacatagtttaagtttattcgttctcaccatgtaatgtaaccttccattagattgagattattagtttgcatttatacctgtcttgcagcatgacactgcacaatcttgacttgctatgctactttggttagcgattgtggtgatgtaaaaaatgtacaaacaggtgacaccattttttgtgagaatgactcaagacattacatcaaatgtgaattcaactgcgtgttgtataaatttttaacaaaaatgcatgagcagttagagcact

SEQ ID NO: 81624 - DNA, 1104 bp, Zea Mays
tacacttctaataattgccttttgttaggcccataaaaagtatggaggaatgggtactttactagtcaacaaggtatcagcagagtcagcaaaccagttcggcgagttggtagctgatcctgaaacaaatgaactgctgcactatacggaaaagccggagacttttcaaatttgcggcgtgtatctagcattgaagctcttcattcagcaactaaggcgcttccaccagactttgttaggttagatcaagacattttatcccctcgagcgggaaagaaggagctgtacacataccagacacttgatttctgggaacagatcaaaaccccagggatgtctttgagatgctctgggttatatctctctcagtttcgccatacctctcctcatcttttagcctcaggagatggcaaaagaactgccactattgttggcgatgtctatatccatccatctgccaaggtgcatcctacttcaaagattggcccaaatgtctctatatcagcaaatgcacgcgttggagctggtgccaggcttatcaattgcataattctggatgatgttgaaattatggaaaatgctgttgttatacattcaattgtagggtggaaatcatccattggaaaatggtcacgtgtacagggcgaaggtgatcacaatgccaaacttggcattactattcttggtgaagccgttgatgttgaagatgaagtagttgtagttaacagcatcgtgctcccaaataaaactctcaatgtcagtgtccaagaggagatcatcctataataaccatcgtttttttttgtctaattccatataaggtctgagtaccaatcacatagtttaagtttattcgttctcaccatgtaatgtaaccttccattagattgagattattagtttgcatttatacctgtcttgcagcatgacactgcacaatcttgacttgctatgctactttggttagcgattgtggtgatgtaaaaaatgtacaaacaggtgacaccattttttgtgagaatgactcaagacattacatcaaatgtgaattcaactgcgtgttgtataaatttttaacaaaaatgcatgagcagttagagcact

SEQ ID NO: 81625 - DNA, 886 bp, Zea Mays
ttacccaaggacgagtctttgggtggattgtgaatctagctacaaacaagcaggcagcagcaactactgagggtaggtagcttatgcagtcataatccagcaagctcaaatccgcaaggtagctgcacacgaactcaagtttttctctgcttgtactctgaattttgaataaaaaacagattatcgggaaaaaaaacaataagagaagtaaatgcacatgctccaaagtactacttacattgcctccacgacatgaagctatgaattgcctaaaacagacagtaatctaatattaatctgcacttttctaagtccagtaaggcataattcctatatggtatcaatgttttcaagtccttcgattaatcatgattaataatccaagtcggtttgaaccaatcacgattaattgtccaagtggtccgactaatcatgattaattgcgattaattgtccaagccggtcaaccagaatgaccagcaagagacttggaaacattgtatggtaagatacaaagggaagttatgtcaaatgctatgctcgttctaagcacagttaaaaatggagaagacataccgtaaaaatgttgttacagtgggacccccaatctgaaagttaagagatttcagtaagtcagcctccatcttcaccacctgtgttgcatacagaatagaagtgtgtgtctatcatctacggtccaggggaaatgaaaatatgcaattgaaagttcagcagaagaaaggctacttgctgcttggtgtaagtgttatccatgctattaatgtatatgttcaccttcatctcagcagactcaatttcttcatacttgctgcaacatttgaaatatgcagatcaaagagcaattttaaaagaaaaacaaaacgga

SEQ ID NO: 81626 - DNA, 1543 bp, Zea Mays
tataaatcgttgcagaaaccatccaaccaatcagccctggttctagagcaactctcatcctcactccccccactcgcccgcatcttccggtcttcctcatggcgtcgagcgacctcgccgagagcctcctccccggcggcgggggcggagcctccgcctcacatgacgaatacgaggagcgcgcgtacgactccgaggacaagatctccatcgccgtgtcggattccgacggcgaagacgacggcacgccggcgtcgcgcccgcccttctcgtggcggaagctctggcgcttcacgggcccgggttttctcatgtgcatcgcgttcctggacccgggcaatctggagggggacctacaggcgggcgccgcggcggggtaccagctgctgtggctgctcttgtgggcaacgatcatgggcgcgctgatgcagctgctctccgcccggctaggcgtggccacggggaagcacctcgccgagctctgccgccaggagtaccctccctgggccactcgcgcgctctgggccatgacggagctcgcgctcgtcggcgcagacatacaggaggtgattggcagcgcgattgccatcaagatcctctcggggggtgccataccgctctggggtggcgtcgtcatcaccgcgctcgattgcttcatctttctcttcctggagaattatggcgtgaggaaactcgaggcatttttcgctgtactgattgcaactatggctgtttcatttgcggttatgtttggtgaaacaaagcctagtggcaaggaacttctgatcggtttggtggttccaaaattgagttcaaagacaattaagcaagcggttggaattgtgggctgcatcatcatgcctcacaatgttttcttgcattcagcactagtgcagtccaggaagattgacacaaacaagaaatctcgtgttctagaagcagtttactactataacatcgagtcaattcttgcactcatcgtgtccttcttcattaacatctgtgtcacaactgtttttgccaaaggattttatgggtctaaacaggctgacagtataggtcttgagaatgctgggcagtacttacaagaaaaatatggaactgcattctttcccatcctctatatctgggctgttggtttgttagcatctgggcagagtagcacaattactggcacatatgcaggacagtttgttatgggaggtttccttaatcttcgattgaagaagtggctacgggcaatgattactcgaagttttgccattattccaactatgattgtggctttatttttcgatactgaagatcctactatggacattctgaatgaagcactcaatgttcttcagtccatacagattccgtttgctctaattcctctcatcaccctcgtttcaaaggagcaaatcatggggtcgttcgtaattggtcccatcaccaaagtgattagctggattgttacggtatttctgatgcttatcaacgggggatgacgcgccggagcacaatggcgaggtcgctgccgtttgcccgtgagactagg

SEQ ID NO: 81627 - DNA, 915 bp, Zea Mays
gctagctgtaaacaggcccggaagaatattgcgctcctgcctttacctcgcgtgcgcgacaactagggcgaccgccgtcgctaaacgcccagctgcccaggtcttcgtcgggcccctcgccggcgacgagcactcaacacactcaccagagccttcatggaggcacatcttccagcctttaaggaaaagattccacacttagaagtggtgacagagcttgtccgcggtcaacatcctaacttgaagggaatttacaagaaccataacgagcgagtggtctgcgtgagaaatttaccgccagaagaaatactcctgcaagccaccaggctaaggaactctctgggcaggaaagtggtgaagctgcggaccagacacgtaacgaagcggcccagtgtccaggggacgtggacgacggagctgaagatgtgaagccaagctagcagtcaaggtgtttcggtgttcttggtggtgtgatcgcagagaaatgtcagctgtgtcaataacttcggtagagagctgccgttatgccagcctatttcgatagccaaactatttacaccttttgttccgactaaggctgcctcgagcagtattcggtaaagggtccggtacccttgactctaacaacacctgctaaggtctagtttgggtactttagtattgaagtgatttggagggattgaagagtatataaatcccaaaaaaatcaaaaactctcataatacatctcaatccactacgatcccttttattactagattacctaaactaggcctaaatgagcctgtaaaatttagaggagcctcgtcgaacgccatatctagagttcagctctgcttaggtgtgctgcaatcaacatgaaagaaagtaggacccacatgtacctcgtgatcagagcttcacacttggattggg

SEQ ID NO: 81628 - DNA, 894 bp, Zea Mays
cttctccgtaattcctgctttgcaaagctgagcacctcaacccaaatgatggcgctgaggggggtctggcagctccagaagctcgtggtaaactactgcgactggggagggagcagcaggggcatcagagccttcatggaggcacatcttccagcctttaaggaaaagattccacacttagaagtggtgacagagcttgtccgcggtcaacatcctaacttgaagggaatttacaagaaccataacgagcgagtggtctgcgtgagaaatttaccgccagaagaaatactcctgcaagccaccaggctaaggaactctctgggcaggaaagtggtgaagctgcggaccagacacgtaacgaagcggcccagtgtccaggggacgtggacgacggagctgaagatgtgaagccaagctagcagtcaaggtgtttcggtgttcttggtggtgtgatcgcagagaaatgtcagctgtgtcaataacttcggtagagagctgccgttatgccagcctatttcgatagccaaactatttacaccttttgttccgactaaggctgcctcgagcagtattcggtaaagggtccggtacccttgactctaacaacacctgctaaggtctagtttgggtactttagtattgaagtgatttggagggattgaagagtatataaatcccaaaaaaatcaaaaactctcataatacatctcaatccactacgatcccttttattactagattacctaaactaggcctaaatgagcctgtaaaatttagaggagcctcgtcgaacgccatatctagagttcagctctgcttaggtgtgctgcaatcaacatgaaagaaagtaggacccacatgtacctcgtgatcagagcttcacacttggattggg

SEQ ID NO: 81629 - DNA, 2015 bp, Zea Mays
acaccttgtgtcgtaccctccggatcgaaggctggacgacgcgaccgcgcggcggcggctcgacgcgaccggtggctttgacgcgaccggcacggcggcgacgcacagcccgacgacgaccctccccgctgccttctccccgggcatttgctggagctggaaggcggaagcgttcccgttggattacttcttgggctggaaagagtgaaagacccggatgcactaaatcctgtcttggaacagttacggccctggaattgatcccatgctgccgaacgggccctaagttggaacctgttcaggcggggggtcagctcgcagctgactggggatccggcaccgcatcgccagacgccaggaggggactatcagccatggcagcggcgcgacacgccctcacctgtgcatggcgatgctgctgcaaaggatttttcaccacctaggcggccctcacctgtgcatggtgatgctgctgcaaaggatttttcaccacctaggcggaggcagcggcgcaacacgccctcacctgtgcatggcgatgctgctgcaaaggatttttcaccacctaggcggaggcagcggcgcgacacgccctcacctgtgccggacggtgctgctgcaaaggatttttcaccacctaggcggaggcagaggcgtcaggacacgccatcaccaaaggacagtggtgcagcggaccaggacgatatgtcaccaccgcggaagtctaggcagagagaggacctttcgccgccaaggaagggtgctcgtcatatcactgaggagccccgggatatctcgccacgaaagaagagagacatttctccctcaaggaagagtacaaaggaaggagcctcaaaacaggtgaagaaatctggactgatgacagcagaagaagttaaagaggacataagaaagattaaggaggctgagatgattaagtttgcatcacaggatccttctctggttgggaaaggggcaaaggcagtattcagagataaggaaggaagacgaataagtgaagaagaaatgtgcaaggcaaaggaacctgagaagccaaaggaaatacatatagaatggggtaaagggttggttcagaaacgagaagctgagtctaggttgaaagagattgaagctgagaagagtaaaccttttgctcgaacaagggatgatcctgagcttgataatatgctaaaagaaagaatccgatggggtgatcctatggctcatctggtcaagcggaaagatccagaatttattttggaagacttgggagatgatgaaaagatgaaagaatctggcttcatagtaccccaaagtatacctactcacagctggctgaaacgtggagtggatgctcctccaaaccgctatggcataaaacccggtcgtcattgggatggcgtggatcgcagtaatggatttgagaaggacatgttcaagctgaagaacgagaagcaagcaatggagcaagaagcctatctttggtctgtctctgatatgtgatcccaactgctgctccttacgagaggaatacagttgtgtaaaggaagaaccaatggaagacctttcaaacgatttttttttcactcttcttattacacaaagtgacatcactggtgatgctgcgccggagtagcctgaatattttccaggaaagcattttcaggaatgcagttcaatgaagctgcattacgtatttgttggaaatctgttactgctgtaccatttgtcatccttcacgttttgtaatatagatgaacgcactgcaaggttttggaacagttcaaaagatgagattttatattcactttctggtttccatgtgtataacttgtcttagcagctgtcgcggtttaatttaaattaaatgatggtggatttgagagccagcagttgtcgttccgaaagcaggaaacaacagggttattactccttattagtagtaactgtaactgatactgtgtgtacgagctgatccgtccaacagggttataacttgttcgttgaggtggagt

SEQ ID NO: 81630 - DNA, 2445 bp, Zea Mays
caggccgctgcagaggatcgacgaggatgcggccgtcgtgctgcacccgaccagctaacaagctaacctctgtcttggcagcaacttggttcaaaagattcctagggcatttgctggagctggaaggcggaagcgttcccgttggattacttcttgggctggaaagagtgaaagacccggatgcactaaatcctgtcttggaacagttacggccctggaattgatcccatgctgccgaacgggccctaagttggaacctgttcaggcggggggtcagctcgcagctgactggggatccggcaccgcatcgccagacgccaggaggggactatcagccatggcagcgaggcagccgccgccttcgtccgcgtccgcgcccgcgcccgcggcgggtctctccatgaaggactacctcaagaggtacgtgtcgggcccagggaccgacggcgaccagaagagggcgaagaagaagacgaagaagaagcccaagcccgccggcggggtgctcatcgtcgacgaggacccagtgtggcagaagcccgtgcaggtggacgaggagcccgcgtcgtcaggtgacgacaagcctctggtcgacgaggacatcgaggtcaagcggatgcgtcgcctggaggcaatacgcgccgcaaggccgtacaatgctatcgccgaggatggcagcgggtgggttaccgtggccgccccagaggagcagggcggtgggtccacccaccagcgcaggaacgacacgccgttgccagagcggggacgtgctcctacgagggaggacctttctcctgtgcggcggaggcagcggcgcgacacgccctcacctgtgcatggcgatgctgctgcaaaggatttttcaccacctaggcggccctcacctgtgcatggtgatgctgctgcaaaggatttttcaccacctaggcggaggcagcggcgcaacacgccctcacctgtgcatggcgatgctgctgcaaaggatttttcaccacctaggcggaggcagcggcgcgacacgccctcacctgtgccggacggtgctgctgcaaaggatttttcaccacctaggcggaggcagaggcgtcaggacacgccatcaccaaaggacagtggtgcagcggaccaggacgatatgtcaccaccgcggaagtctaggcagagagaggacctttcgccgccaaggaagggtgctcgtcatatcactgaggagccccgggatatctcgccacgaaagaagagagacatttctccctcaaggaagagtacaaaggaaggagcctcaaaacaggtgaagaaatctggactgatgacagcagaagaagttaaagaggacataagaaagattaaggaggctgagatgattaagtttgcatcacaggatccttctctggttgggaaaggggcaaaggcagtattcagagataaggaaggaagacgaataagtgaagaagaaatgtgcaaggcaaaggaacctgagaagccaaaggaaatacatatagaatggggtaaagggttggttcagaaacgagaagctgagtctaggttgaaagagattgaagctgagaagagtaaaccttttgctcgaacaagggatgatcctgagcttgataatatgctaaaagaaagaatccgatggggtgatcctatggctcatctggtcaagcggaaagatccagaatttattttggaagacttgggagatgatgaaaagatgaaagaatctggcttcatagtaccccaaagtatacctactcacagctggctgaaacgtggagtggatgctcctccaaaccgctatggcataaaacccggtcgtcattgggatggcgtggatcgcagtaatggatttgagaaggacatgttcaagctgaagaacgagaagcaagcaatggagcaagaagcctatctttggtctgtctctgatatgtgatcccaactgctgctccttacgagaggaatacagttgtgtaaaggaagaaccaatggaagacctttcaaacgatttttttttcactcttcttattacacaaagtgacatcactggtgatgctgcgccggagtagcctgaatattttccaggaaagcattttcaggaatgcagttcaatgaagctgcattacgtatttgttggaaatctgttactgctgtaccatttgtcatccttcacgttttgtaatatagatgaacgcactgcaaggttttggaacagttcaaaagatgagattttatattcactttctggtttccatgtgtataacttgtcttagcagctgtcgcggtttaatttaaattaaatgatggtggatttgagagccagcagttgtcgttccgaaagcaggaaacaacagggttattactccttattagtagtaactgtaactgatactgtgtgtacgagctgatccgtccaacagggttataacttgttcgttgaggtggagt

SEQ ID NO: 81631 - DNA, 984 bp, Zea Mays
ctaaggtgcaataacaatagaaagagaggaaatacatatagaatggggtaaagggttggttcagaaacgagaagctgagtctaggttgaaagagattgaagctgagaagagtaaaccttttgctcgaacaagggatgatcctgagcttgataatatgctaaaagaaagaatccgatggggtgatcctatggctcatctggtcaagcggaaagatccagaatttattttggaagacttgggagatgatgaaaagatgaaagaatctggcttcatagtaccccaaagtatacctactcacagctggctgaaacgtggagtggatgctcctccaaaccgctatggcataaaacccggtcgtcattgggatggcgtggatcgcagtaatggatttgagaaggacatgttcaagctgaagaacgagaagcaagcaatggagcaagaagcctatctttggtctgtctctgatatgtgatcccaactgctgctccttacgagaggaatacagttgtgtaaaggaagaaccaatggaagacctttcaaacgatttttttttcactcttcttattacacaaagtgacatcactggtgatgctgcgccggagtagcctgaatattttccaggaaagcattttcaggaatgcagttcaatgaagctgcattacgtatttgttggaaatctgttactgctgtaccatttgtcatccttcacgttttgtaatatagatgaacgcactgcaaggttttggaacagttcaaaagatgagattttatattcactttctggtttccatgtgtataacttgtcttagcagctgtcgcggtttaatttaaattaaatgatggtggatttgagagccagcagttgtcgttccgaaagcaggaaacaacagggttattactccttattagtagtaactgtaactgatactgtgtgtacgagctgatccgtccaacagggttataacttgttcgttgaggtggagt

SEQ ID NO: 81632 - DNA, 2446 bp, Zea Mays
ggggacagcgtcatggccacaccactcccacacaggcgcgtcgcaagcgcagggcagaagaatcagctgcccaacccaagcaaagatcaccgataaccgaagcgcgtcgatccggagggcgcccgccgccgccggcgggagcggaggcccgagcaggagcgggactggggccggcgaatctggagcccggcggacctgcattgccgcgagaccgccgcgcgtaggcagatctccccccgtcccctgccgcagcaccggcatggtggctgccgcggcggcggccaccgcgccagatccggcccgcccctcgcgcccgccgctcacgccggcgctcgacaagcccaactccgccgccgcgcggaggaactcgcgctccaacaagcccgtgtcctcgaggtacctgcccgccgccgcgtccccggcctcctccacctcgtcgtcttcctcgtcctcgtcctcgtcccgccgctccctctccgcgcagcgcgcccggtcgtccaccccgccgccgcagcactccacgtcgcccaccaccaccgcctcggcagcggcaaccgccaccgcgaccacgatgcggagcctctccgtgtcgttccagggggagtccttcttctacaagacgtcgcgcgcgccgcgggcctcgtcgccgtcctcaccggcagcgcgccgcgggcccacgccggagcgccggaagagcgtctcctccgtgccggaggccgagaacgcgcggccgccgggacggtggccggcggcgaagcccaaggcgtcggacccgctcgcccgcagccttgactgcagcctcgaccgcaaggactccatcctcgccgccgtccacctcctccgccgctctatggccttcgactccacgacgtctctctcgccgtccgacccggccgctgcagccgctccagacctctacgcgtcctctgacaccgacagcgtctcctctggtagcaactcgggtgccagtgatccgccgcgccggggcatcagcgtgccggcgagattctggcaggaaaccaacagccgcctgcgccggcttccagagcccggactgccactaccgtcgtctggcagaaggtcgttttcagacagcccaatgtcacccaggctgccaggtcggtccccgtctccatgccgtggaagcaggggcggtgcgagtccatcgagagggcgcagtggggaggcatcgccaaatgggcatatggtgcaggctccagcaaacgcgccatctatcatcagctttgcagcagaggtgagaagggcgaaaaagggggaaaacagaatcgaggaggcacacagattgaggctactggacaatcggtatttgcagtggcgatgcatcaatgctcggacggatgcgacgcttctggtgcagagcttcactgctgagaaaactctccacagtgcatggaaagaaatatcaagattgcgtgacaatgtcagtaccaaaaggagcagactccagcttcaaaagcaaaaactcaagctgtttgctattcttaggaggcagatgtcatttctagaggactggtctcatatcgaaaaacatcattcaagtgctttatcagcagcaatcaaagctctgaaggctagtactctacgtcttccagttgttgatggtgcaaaggctgatgcactagctgtgaaggaagcagttaactcagcagtggatgtaatgaacacaatgacatcatcaatatgtaatttgctgtctaaggtcgagggaacaagctctgtggtgtctgagctttctaaacttgcaacacaagaacaaatgttgttggaccaatcaaaggatctcttgtccacggttgcagcaatacatgtaaaaaactgcagtttgcaaactcatatgctacagcgaaaccaaaagcagagcccggcacagttgtagatcagtttgccctcgccacattgggtggtcactaacaacatcacacggcctcatgttttctcaccggagactgtgcctacagaagcggcccctgctcgccgcaattggtgtatacagaaacccctagccttgacccaaagataagcttcctgtagatatgaaaagagcttgtcgtttgcgtgcttgctcttctgtgtggagtgctcgagtggtgatgagtgtttgtattgtgtaagggagacggttgctggcttgatacaggtgtctcattgcaaaatcaacaagttgtttctcctgacttgctcatggaatcacagtatctgctttgatgcatactgattcctgaaagagtataaatctatctcttagcgctgtaaagattctgcttgctgcatgggccgtcaaacgtttgttgcggtctttggtgtcaagtttagggccgtggctgcaacaactgctttgggcttgttgtttttatggttatgctgatccagttgggatgcaatgcaacaaagtgaaaatgaatttgaatatacctatcagttgtgt

SEQ ID NO: 81633 - DNA, 1253 bp, Zea Mays
ctaggtgcgaagctagagcaaagttgatgggtttgtggcacttcgttgctgttgaccgctggctggcatatagggtgaaaaactgatgaaaactctccacagtgcatggaaagaaatatcaagattgcgtgacaatgtcagtaccaaaaggagcagactccagcttcaaaagcaaaaactcaagctgtttgctattcttaggaggcagatgtcatttctagaggactggtctcatatcgaaaaacatcattcaagtgctttatcagcagcaatcaaagctctgaaggctagtactctacgtcttccagttgttgatggtgcaaaggctgatgcactagctgtgaaggaagcagttaactcagcagtggatgtaatgaacacaatgacatcatcaatatgtaatttgctgtctaaggtcgagggaacaagctctgtggtgtctgagctttctaaacttgcaacacaagaacaaatgttgttggaccaatcaaaggatctcttgtccacggttgcagcaatacatgtaaaaaactgcagtttgcaaactcatatgctacagcgaaaccaaaagcagagcccggcacagttgtagatcagtttgccctcgccacattgggtggtcactaacaacatcacacggcctcatgttttctcaccggagactgtgcctacaggtaataaaaagctgtaaccatttgttgggtgtgaagcgtttcctaatctgctcggtcgacctcactgagtgtagctgattcgtgtaattgtttgagtgcatatcaaccatagaagcggcccctgctcgccgcaattggtgtatacagaaacccctagccttgacccaaagataagcttcctgtagatatgaaaagagcttgtcgtttgcgtgcttgctcttctgtgtggagtgctcgagtggtgatgagtgtttgtattgtgtaagggagacggttgctggcttgatacaggtgtctcattgcaaaatcaacaagttgtttctcctgacttgctcatggaatcacagtatctgctttgatgcatactgattcctgaaagagtataaatctatctcttagcgctgtaaagattctgcttgctgcatgggccgtcaaacgtttgttgcggtctttggtgtcaagtttagggccgtggctgcaacaactgctttgggcttgttgtttttatggttatgctgatccagttgggatgcaatgcaacaaagtgaaaatgaatttgaatatacctatcagttgtgt

SEQ ID NO: 81634 - DNA, 1200 bp, Zea Mays
cttcgttgctgttgaccgctggctggcatatagggtgaaaaactgatgaaaactctccacagtgcatggaaagaaatatcaagattgcgtgacaatgtcagtaccaaaaggagcagactccagcttcaaaagcaaaaactcaagctgtttgctattcttaggaggcagaggactggtctcatatcgaaaaacatcattcaagtgctttatcagcagcaatcaaagctctgaaggctagtactctacgtcttccagttgttgatggtgcaaaggctgatgcactagctgtgaaggaagcagttaactcagcagtggatgtaatgaacacaatgacatcatcaatatgtaatttgctgtctaaggtcgagggaacaagctctgtggtgtctgagctttctaaacttgcaacacaagaacaaatgttgttggaccaatcaaaggatctcttgtccacggttgcagcaatacatgtaaaaaactgcagtttgcaaactcatatgctacagcgaaaccaaaagcagagcccggcacagttgtagatcagtttgccctcgccacattgggtggtcactaacaacatcacacggcctcatgttttctcaccggagactgtgcctacaggtaataaaaagctgtaaccatttgttgggtgtgaagcgtttcctaatctgctcggtcgacctcactgagtgtagctgattcgtgtaattgtttgagtgcatatcaaccatagaagcggcccctgctcgccgcaattggtgtatacagaaacccctagccttgacccaaagataagcttcctgtagatatgaaaagagcttgtcgtttgcgtgcttgctcttctgtgtggagtgctcgagtggtgatgagtgtttgtattgtgtaagggagacggttgctggcttgatacaggtgtctcattgcaaaatcaacaagttgtttctcctgacttgctcatggaatcacagtatctgctttgatgcatactgattcctgaaagagtataaatctatctcttagcgctgtaaagattctgcttgctgcatgggccgtcaaacgtttgttgcggtctttggtgtcaagtttagggccgtggctgcaacaactgctttgggcttgttgtttttatggttatgctgatccagttgggatgcaatgcaacaaagtgaaaatgaatttgaatatacctatcagttgtgt

SEQ ID NO: 81635 - DNA, 2132 bp, Zea Mays
ctacgcgcaactccacctcccaatctcccatgactccatttcatttctctacctctccagctgcccacttctcccctgtgctcgcgggcgcgcgcgagtgtggagagaagggagggaattcccccctttctgttcggcgccgtgctcgcgcacacacccgcacgccccacgctgcacgccgccttttcctccgtcttgctgctgcaagtccgcaaccactggaggaaaaatcttttccttcacttttcttccctttccccccgcgcatgcacgggctctgattgacgccatgggggacgccgccgccgccgcagcctccacgtccgctcccaccacgcccacctccattctcatctgcctggaagacggcagcgaccttctcgccgatgccgacgatggcgccggcactgacctagttgtcgcccgcgacgagcgtctgcttgtcgtggaccaggacgaggagtatgtagcgctgctcctgtccaaggagagcgcgtcaggcggcggcggcggcccggtggaggaaatggaggactggatgaaggccgcgcgctccggatgcgtccgctggatcatcaaggtcgttagcgcgctcttcctctttcgccatttttttttggctaatgtccatatcttctttcttcggtgctcgcagaccacggcgatgttccggttcggcgggaagaccgcttacgtcgcggtgaattacctcgatcgcttcctggcgcaacggcgagtcaatgtaaccaccgattgccggactctcctccttccgttgtcgcgtgtttgaatgatgtactgactggctgtgcaccgcggccgtctctggcggtgacggtgggttcagagggagcatgcgtggggtctgcagctgctcatggtggcgtgcatgtcgctggcgaccaagctggaggagcagcacgctccgcggctgtcggagttgccgctggacgcgtgcgagttcgcgttcgaccgcgcgtccgtgctgcggatggagctcctcgtcctgggcaccctcgagtggcggatggtcgccgtcacccccttcccctacatcagctgcttcgcggcgcggttcgggcaggacgagcgccgggcggtcctcgtgcgcgccgtggagtgcgtcttcgcggcgatcagaggatgagctcggtggagtaccagccgtcgaccatcgccgtagcatccatcctcgtcgctcgcggcagggagacgcccgccgacaatctggacgcgctcaaggcgatcctgggctcatcatttccacagctagacaccgggcatgtgtactcctgctacagcgcaatgattcgggaggacgacaagtcgccgacgcagtcgacgtcgacgtcgacgggggtggcgtcctcgggcgtctctgtcgccgcgcacgccggggggagcgggagtcccagccccccgggcgcttccgtgtccgtgggcgccaataatgccgctggcaccgccccgccggcaaccacggacaaccgcaacaagaggagacggttgcgctcacctcagcgacagtaggagcagctcagctgctggcagtgcattgcagtgcagtgcagtccagctgcgttttcttttttcagctcaccatttccttttgctgccgattgtttcttcaggggtggccgtagagtgatttggtaatttagtgccggaaagattagtgcggtgtcgcagagtgatttggtaatttagtgccggaaagatttctttgttttgaggagatctttcgcgggaccaaagggaggggggcagtgtaaagacgacagaacaagcgtgaaggcctcgagagtcgagacctcacagggtaccgcctagcgcctactggggtgaaagtgaagtcaaggagtcgggagggtgtgtgtgaataccgtttgtagcagctagtgcgtccgtctgtctttttttttctttctgtttattaattattaatagcctgctagatttcatttgatttcatctttattaaataccccaccacataataagaaagtatcataaccgatgacgaggcacgagacaccggtgcgcgtcccttggtacgcgtgcagtgcgggttgccgtgcacagccggcagctgagagtagtttagcgtctgtcaggattaccggactaaattt

SEQ ID NO: 81636 - DNA, 2405 bp, Zea Mays
aaacaacaacgcctcgtgtcgtgccgatcgaactgagattgtgtattacacgagtatgaacagacgggggctcttgggtgggtctgggcagggcatctccggactcccacacagctcctcttggtggcgccctctgacatctcctttttcctcgccttcgatcggtggccgccgccctcctcgacttccgtcccgccgccatgaagggacccggcctcttctccgacatcggcaagaaggaaggatctactcacctacgactagaagctgtccatctccaccgccagcgcctctggagtggcgcccagacccggcaatccgttagaatccgttcgtcgcagaggccatgagctcggcgcaggatccgttctacatcgtccgggaggagatccaggagtcgattgataaattgcaaagtaccttccaccgctgggagcaaactgcttcaaacacaggagaatatgttcatctgacaaaggagcttctgatcagctgtgaaagtatcgagtggcagcaccctcactcttttctattatactttaccactttacaaatagacccttcaacttgttcataatacaccaacactccccctcaagatgggccaaatatatttaacattctcatcttgttacatgccaactcattatccttaggacctaaaccttttgtgagactatccgctacttgattacgagattttacatacttcaacttcaaagccccactatcaatcttctctttgatgaagaacttatcaatctccacatgcttcatgcgatcaaactgaactggattacttgctatgttgattgctgccacattgtcacaatggagcaacattgtctcattcttcaacacttgaagctccttcaagagactcttcaaccatatcatttcacaaactgctagagccattgctctatgttcagcctctgcagtggatcgagataccacagcttgcttcttgcttctccatgaaaccagattacctcccacaaatacacaatatccagaagtggatctccgatcatccctactgctcgcccagtccgcatcacaatacccatccaaattcatatgttgatttggtctaaaacacaatcccttgccaggggttcccttcaggtatctcatgatttgataaactatcttcatatgcccagttctaggatcatgcatatacctactcaccacacttactgcataagcaatgtccggtcttgtatggcaaagatatatcaaacgaccaactaccctctgatatctttcccgatctatagggtcacctgactcagcacaagtttggtgattcctatcaatgggtgaaccacatgggcgacacccaagcattcctgtctctgacaaaaggtcgaggacatactttctttgggagagaataattccttgagatgatctagctatctcaatcccaaggaagtatcgaagtggtccaaggtcctttacctcaaaggctctacttagcctttccttcagtttcttgatctccttcgcatcatctccagtgatcactatatcatcaacataaaccgctagaatagtgatacacgagccctgatgtttgtagaagactgtgtgatctccattgcattgatgataacccatatcacacacaactcgcctgaatctatcaaaccacgcacgtggtgactgctttaggccatagagcgacttcttaagtctacacacttttccaatagtctgtttatttgcaaatccaggtgggatttccatatagacctcttccttcagatcaccatgaagaaatgcattcttcacatccagttgatgaagaggccaaccaaagttggccgcacatgagattaaggtcctcactgtgcccatttttgccacaggtgcaaaggtctcatcatagtcgatcccatatgtctgactatatcccttcgccaccagtcttgctttgtacctgtcaatctttccttcaggagtctgctttactgtgaagacccacttgcaccccaccgccttctttccttcaggaaggtgaacaagttcccatgtcttgttcttctgcagggcaagcagctcttccttcatggcatccttccactttggatcctgtttggcacacctccaatccttcggaatagatattgtttgtagagatgcaatgaaagttctatatgcaggagagacactagagtatgagacatacttagcaatgtcatgttcataacaataacgagaaggaggtttcccagcatttaatctaggaactcttctttgcgcaagaggtaattcttcatgttcaggaatgggagaaatatggattcgagagacattaccagctgggtctggagaggagtctgaagagagatatgggactggagcttcaacacatccaggttgtggttgctccccct

SEQ ID NO: 81637 - DNA, 1638 bp, Zea Mays
aaacaacaacgcctcgtgtcgtgccgatcgaactgagattgtgtattacacgagtatgaacagacgggggctcttgggtgggtctgggcagggcatctccggactcccacacagctcctcttggtggcgccctctgacatctcctttttcctcgccttcgatcggtggccgccgccctcctcgacttccgtcccgccgccatgaagggacccggcctcttctccgacatcggcaagaaggaaggatctactcacctacgactagaagctgtccatctccaccgccagcgcctctggagtggcgcccagacccggcaatccgttagaatccgttcgtcgcagaggccatgagctcggcgcaggatccgttctacatcgtccgggaggagatccaggagtcgattgataaattgcaaagtaccttccaccgctgggagcaaactgcttcaaacacaggagaatatgttcatctgacaaaggagcttctgatcagctgtgaaagtatcgagtggcaggtagatgagctagaaaagacaatctcagttgcatcaagggatccggcatactatggacttgatgaagttgagctttccagacgaagaaactggactggttcttctcataagcaggtcggtacagtcaagagagctattgaaaagggcaagagcaatgcagcaacttcaaaataccaggatacaagcaggaccaaccactattctgcccaagataatgatgactttctttcttcagaatcagatagacagcttctactcatgaggcagcaggatgaagaacttgatgagctcagtgaaagtgtccaaaggattggtggcgtgggactaaccatacacgaagagctgtctggacaggaaaggatcctaaacgacctaagcttggagatggagactacttccaacagacttgatttcgtgcagaaaagagtggccatggtgataaagaaggccggcatcaagggtcagatcatgctgatcgtgttcctgattgttctgttcatcattcttttcgttttggtgttcttgacatagccaagtgcaccagggtcctcggttttctctctcatttgttgtgcctccctagtacgaacactagtaaattggtcgcgctccgcgtgagttgttgcttgatgtgcttacataagatgtagaatcttgttgctataggcatgtatcaacaggtgctagcagcttgcagttctcctaacagaaacaggtcgaagcagattttttgttctccaagtgatcagtttgtccaaggttgttaggctttccgtaatcgcttcgagtttgcttttcaagatcatcattcacatgttgcttgttagactttggctcaacataaggaggcagcatggttagtgccctgtccaggtctccttgtcctttttgcactggatatctgtcatggtcgggcgcacgtatgtgaggcgacatcgtgcccgtgacgtgcgccgcgccctagagcaagcagcggccaggcaggacagctaagggataggataggatagcctgctgttatccagttccttagattgtggagtgctgttattcagttccttagattagggagttccttagattatggagtttgttgctcctttcggttgggcctctggccatat

SEQ ID NO: 81638 - DNA, 1818 bp, Zea Mays
acacgagtatgaacagacgggggctcttgggtgggtctgggcagggcatctccggactcccacacagctcctcttggtggcgccctctgacatctcctttttcctcgccttcgatcggtggccgccgccctcctcgacttccgtcccgccgccatgaagggacccggcctcttctccgacatcggcaagaaggaaggatctactcacctacgactagaagctgtccatctccaccgccagcgcctctggagtggcgcccagacccggcaatccgttagaatccgttcgtcgcagaggccatgagctcggcgcaggatccgttctacatcgtccgggaggagatccaggagtcgattgataaattgcaaagtaccttccaccgctgggagcaaactgcttcaaacacaggagaatatgttcatctgacaaaggagcttctgatcagctgtgaaagtatcgagtggcagatgagctagaaaagacaatctcagttgcatcaagggatccggcatactatggacttgatgaagttgagctttccagacgaagaaactggactggttcttctcataagcaggtatgcattcgctcatattgtagcaactcttcagtgatgtggtgattggacatgttgtttcttgtatgttttgaacatgaatgagtcacactaagctcaggttgcatgatttcctgttgtttggtacagacattaaggagtaacatattaccatgttcccgaattctgcagttgacaatgtacctaaatttattgcatggatcctcacaatttatgcatgagcatattcaggtcggtacagtcaagagagctattgaaaagggcaagagcaatgcagcaacttcaaaataccaggatacaagcaggaccaaccactattctgcccaagataatgatgactttctttcttcagaatcagatagacagcttctactcatgaggcagcaggatgaagaacttgatgagctcagtgaaagtgtccaaaggattggtggcgtgggactaaccatacacgaagagctgtctggacaggaaaggatcctaaacgacctaagcttggagatggagactacttccaacagacttgatttcgtgcagaaaagagtggccatggtgataaagaaggccggcatcaagggtcagatcatgctgatcgtgttcctgattgttctgttcatcattcttttcgttttggtgttcttgacatagccaagtgcaccagggtcctcggttttctctctcatttgttgtgcctccctagtacgaacactagtaaattggtcgcgctccgcgtgagttgttgcttgatgtgcttacataagatgtagaatcttgttgctataggcatgtatcaacaggtgctagcagcttgcagttctcctaacagaaacaggtcgaagcagattttttgttctccaagtgatcagtttgtccaaggttgttaggctttccgtaatcgcttcgagtttgcttttcaagatcatcattcacatgttgcttgttagactttggctcaacataaggaggcagcatggttagtgccctgtccaggtctccttgtcctttttgcactggatatctgtcatggtcgggcgcacgtatgtgaggcgacatcgtgcccgtgacgtgcgccgcgccctagagcaagcagcggccaggcaggacagctaagggataggataggatagcctgctgttatccagttccttagattgtggagtgctgttattcagttccttagattagggagttccttagattatggagtttgttgctcctttcggttgggcctctggccatat

SEQ ID NO: 81639 - DNA, 1676 bp, Zea Mays
atcaatttctgtcttcttcgcagcctcctctgtactcattttcacagaagcatagagtcacacactcgactcctttctcgcagcctctcgagctctctactccactcgtagacctcgtcctcctctcctcctttcctcctgtttcagcctccgtgtagacaggacgcaaacgcaagtcagcagcagctcgtttgtcggagtggcgatgcgtggaggtggcagggcgctgcggttggcgactcggtgcggtctgctgctggtgaccgcgcggctgcgcctagccggcccacgcggagacgcggcgtcgggctggtggcgcggctgcgctcgacgggagcaggcggcgtggctgcgggcgtcggggcacgggctgcgggagcggcggcgggctgcggcggagaaacctagctccgtataccatgttgattttctggtagatgagctagaaaagacaatctcagttgcatcaagggatccggcatactatggacttgatgaagttgagctttccagacgaagaaactggactggttcttctcataagcaggtcggtacagtcaagagagctattgaaaagggcaagagcaatgcagcaacttcaaaataccaggatacaagcaggaccaaccactattctgcccaagataatgatgactttctttcttcagaatcagatagacagcttctactcatgaggcagcaggatgaagaacttgatgagctcagtgaaagtgtccaaaggattggtggcgtgggactaaccatacacgaagagctgtctggacaggaaaggatcctaaacgacctaagcttggagatggagactacttccaacagacttgatttcgtgcagaaaagagtggccatggtgataaagaaggccggcatcaagggtcagatcatgctgatcgtgttcctgattgttctgttcatcattcttttcgttttggtgttcttgacatagccaagtgcaccagggtcctcggttttctctctcatttgttgtgcctccctagtacgaacactagtaaattggtcgcgctccgcgtgagttgttgcttgatgtgcttacataagatgtagaatcttgttgctataggcatgtatcaacaggtgctagcagcttgcagttctcctaacagaaacaggtcgaagcagattttttgttctccaagtgatcagtttgtccaaggttgttaggctttccgtaatcgcttcgagtttgcttttcaagatcatcattcacatgttgcttgttagactttggctcaacataaggaggcagcatggattctttatgtttgcaacatttagcttagtgtaaggagccttgtttctagtggtaccaccacccggtatactaagaagactcaatgaacgcccttgattctctgggtgctgagctcttacccctgaatctgcatgtctcccattgtgttcatgaccaccaggccattgagatcaagttctactacctccatcagcttcttttccaaagggcgaacaactcttctgtttagcttctgaacatccttttttgggtcctgttagtgtccacaggagacactggtttatgcaaatgttcattttcaacagacacatcaggttgttgcttcctcgaattcttatcaattgtatggtgtgcgttagcaacagaacgaatatctttttggatc

SEQ ID NO: 81640 - DNA, 1179 bp, Zea Mays
ctgttactggattttcggaaatctgctaagcatcccggttattaatgcctttgatcagggcacaagagataggggcctgacttccacagctgtgaagaaaggaggtctttattctcttgatgtcagttcagtttacaagtacaagaataccaccgttgatgttaaactggacacagaatcaaatatctctactacattgactgtgttggacgctttgccatccacaaagcttgtcacttctgtgaagctgcctgactacaattctggaaaggtggagctgcaatacttccatgagaatgcaacttttgctactgttgttggcacgaagccgactcctgtgattgatctttctgggacagtaggtgctcaaggagttgcatttggtgcagaagctgggtatgacactgctacaggaaaatttaccaagtacactgctgcaattggtgtaaccaagccagactaccatgctgcattcattctggcggacaaaggtgacaccattaaagtgtcaggtgtttatcaccttgatgagaaacagaaggcctcagctgtggctgagctaacccggaggctctcaacaaatcagaacacactcacagtcggtggactgtacacagttgatccccagacagctgtgaaggcaagactcaataacactggaacgcttgccgcgcttcttcagcatgagcttaaacccaagtcgctcttgacaatctctggtgaattcgacacaaaggccctggacagatccccaaagtttgggttggcgcttgcactgaagccctgatcagatcatcccatgttgattggtggtgaatcttgaattcattttttttttttgcaaagctgtagccaataattcgttccacgaaccttttctgttaatccggcaaatgtttggagcactgtgggtaggatccggatgggtcgcctacatgaaattttacctgtctgcccttattgttgaaagcatctggccgttggtaaatgtacattgtgcttgtttctttagcacctaggcctctctgccactgctactgagggcttgaggagccgctacagtaaccttttccatgtagaaattgcatgctgatcgtttgatttactgctcacctaaggtttaccacttgtttggagctcatttattctgtgtatatgcatgcacggtgttgctttgtt

SEQ ID NO: 81641 - DNA, 1174 bp, Zea Mays
gtcctttgactgaactagatgagatcaacctaacacttgttaactgtgtaactgaacgatgtaaaatgggcctgacttccacagctgtgaagaaaggaggtctttattctcttgatgtcagttcagtttacaagtacaagaataccaccgttgatgttaaactggacacagaatcaaatatctctactacattgactgtgttggacgctttgccatccacaaagcttgtcacttctgtgaagctgcctgactacaattctggaaaggtggagctgcaatacttccatgagaatgcaacttttgctactgttgttggcacgaagccgactcctgtgattgatctttctgggacagtaggtgctcaaggagttgcatttggtgcagaagctgggtatgacactgctacaggaaaatttaccaagtacactgctgcaattggtgtaaccaagccagactaccatgctgcattcattctggcggacaaaggtgacaccattaaagtgtcaggtgtttatcaccttgatgagaaacagaaggcctcagctgtggctgagctaacccggaggctctcaacaaatcagaacacactcacagtcggtggactgtacacagttgatccccagacagctgtgaaggcaagactcaataacactggaacgcttgccgcgcttcttcagcatgagcttaaacccaagtcgctcttgacaatctctggtgaattcgacacaaaggccctggacagatccccaaagtttgggttggcgcttgcactgaagccctgatcagatcatcccatgttgattggtggtgaatcttgaattcattttttttttttgcaaagctgtagccaataattcgttccacgaaccttttctgttaatccggcaaatgtttggagcactgtgggtaggatccggatgggtcgcctacatgaaattttacctgtctgcccttattgttgaaagcatctggccgttggtaaatgtacattgtgcttgtttctttagcacctaggcctctctgccactgctactgagggcttgaggagccgctacagtaaccttttccatgtagaaattgcatgctgatcgtttgatttactgctcacctaaggtttaccacttgtttggagctcatttattctgtgtatatgcatgcacggtgttgctttgtt

SEQ ID NO: 81642 - DNA, 1985 bp, Zea Mays
cagacgctgagacgcaccccacatccacgcattttcatttcatcaatcaaacagaacctctggtcacacacacgcagcaaccaccgagcccagcgcccggcccagccagccagggccaacggcaaggcaacaccctcctcagcccgacgccgacgctcgccgtcatcctcgtaaatccacagcgcgcgcctcccgtcctcccaggcctcacccctagcgatgcgccactcccggcgctcgtgatccatggcctcactccccgttcctcacactcttccgcgggtctcgccagcgatagtgggcgccgcgagggggagggccgcggtgcgcgtacgcactgccaccgcggcattgggcggtgggtgcggcggcggcggcggaatggagcagcgccacggggatgccccgcacagcccagaatccagagggtgacgtgtcggacggggccgggtggttgttcctgtacatgaggttatctacctgctgcatctgcttcactggtcatcagccactgccgctaacctttgtgtcctggcgatcatccggtaaggatgatggataagtaaatacgtgtggaactggatctcgaactggagccgattggacgtttgacagcgatgttctactcctgttctagtatatttcccccctctttaagaagggcagtaggaaggttggtattgtcattctgacggctcgcgttctgttcttttgatgattgttcctggtcgctcggagggttgtcatcattcatcaatatcgtggcggcagataattctgtgatgaggaatcttataaatacatgggatgggacgggtggtgttttcaaataaacttgaaacgtgatgcctcaatggcatacatcttatgaattgagtgaaggagaagcctgtaatgtcaaacattgggaaatcgactaatattttatggcacaattgcttgattggacaatctgatagacagaaattgctgggacaaaaaggctgtgtcgtatggataacaggactcagtggttcagggaaaagtactcttgcatgtgcactgagtcgtgagttgcattgcagaggccacctcacgtatgtacttgatggtgacaacctcagacatggcctaaatagagatttaagctttaaggcagaagaccgtgcagaaaatatacgaagagttggtgaagtggcaaagcttttcgctgatgctggtgtcatatgcattgctagcttgatatctccatacaggagagatcgtgatgcatgccgtgctctacttccacattctaactttattgaagtatttattgatttgcccctaaaaatttgtgaagctcgtgatcctaaaggcctatacaagcttgcacgtacaggaaagattaaaggtttcactggaattgatgatccatacgaaccaccaattaatgtaattaagatgaaagatggggaatgcccttcacccaaagcaatggccaagcaagttctatgctaccttgaagagaacggatatttgcaagcttagcatatgtattttgagaagattgatctgattcttgtgtgtccattacttgtggacacaataagatctgttgttggtcacatgaataaaaggcatcaacacgtaggaagtaacagaagctgtgattcatctgcatcagcaattcaggatgcattcggttaactcgcgttgaccgttcgcgtcaattcgggtagttgttctgtgcttgctagttgggttctgttggcaatgtatttgttacaagtaaatacggacaatgtgtgtaatttgtgtatcactttttttcctcttggaataaaaaccgaggaacattgtaacttcttccattgaattcatgcttttggcttttgctgcctctttcattgttgcagtttctgaggcagtaagaacgggtttacgaacccttccacagaaaaagctgccattttatcttgttatatgctcttttttcatacaggaagttatattctcaacttctc

SEQ ID NO: 81643 - DNA, 1478 bp, Zea Mays
ctgagacgcaccccacatccacgcattttcatttcatcaatcaaacagaacctctggtcacacacacgcagcaaccaccgagcccagcgcccggcccagccagccagggccaacggcaaggcaacaccctcctcagcccgacgccgacgctcgccgtcatcctcgtaaatccacagcgcgcgcctcccgtcctcccaggcctcacccctagcgatgcgccactcccggcgctcgtgatccatggcctcactccccgttcctcacactcttccgcgggtctcgccagcgatagtgggcgccgcgagggggagggccgcggtgcgcgtacgcactgccaccgcggcattgggcggtgggtgcggcggcggcggcggaatggagcagcgccacggggatgccccgcacagcccagaatccagagggtgacgtgtcggacggggccgggtggttgttcctgtacatgaggttatctacctgctgcatctgcttcactggtcatcagccactgccgctaacctttgtgtcctggcgatcatccggtaaggatgatggataagtaaatacgtgtggaactggatctcgaactggagccgattggacgtttgacagcgatgttctactcctgttctagtatatttcccccctctttaagaagggcagtaggaaggttggtattgtcattctgacggctcgcgttctgttcttttgatgattgttcctggtcgctcggagggttgtcatcattcatcaatatcgtggcggcagataattctggtaactctggatcgtctagttttcccgaaagcatcttaatcgttcacaatgacctaatagcaattcgttccacagtgatgaggaatcttataaatacatgggatgggacgggtggtgttttcaaataaacttgaaacgtgatgcctcaatggcatacatcttatgaattgaggtaaaagatagtgataacttgttagttcatcgttcacaattgacgaaaaaacataataatataggcaggacaaagaaacaaaccactttgatttatgtgtcactttaggatcatggataatattccttacaagaacttttattttttcacagtttcctgtaaataggaatatcagcctttgtgtatctgatgctgtgaagcaaacattcgttaaaaatatgcgtcgcggttatgtccttataagttatgctatgccattttatttactttttactgttgtgcaaatggattgaacaacatgaggaatagagctgtactaaccgtttagtgatatccatcatcatcagtgaaggagaagcctgtaatgtcaaacattgggaaatcgactaatattttatggcacaattgcttgattggacaatctgatagacagaaattgctgggacaaaaaggctgtgtcgtatggataacaggactcagtggttcagaatttgcattgtttcaagaacttgcatgttggtctaagttaaca

SEQ ID NO: 81644 - DNA, 1541 bp, Zea Mays
ctggtcacacacacgcagcaaccaccgagcccagcgcccggcccagccagccagggccaacggcaaggcaacaccctcctcagcccgacgccgacgctcgccgtcatcctcgtaaatccacagcgcgcgcctcccgtcctcccaggcctcacccctagcgatgcgccactcccggcgctcgtgatccatggcctcactccccgttcctcacactcttccgcgggtctcgccagcgatagtgggcgccgcgagggggagggccgcggtgcgcgtacgcactgccaccgcggcattgggcggtgggtgcggcggcggcggcggaatggagcagcgccacggggatgccccgcacagcccagaatccagagggtgacgtgtcggacggggccgggtggttgttcctgtacatgaggttatctacctgctgcatctgcttcactggtcatcagccactgccgctaacctttgtgtcctggcgatcatccggtaaggatgatggataagtaaatacgtgtggaactggatctcgaactggagccgattggacgtttgacagcgatgttctactcctgttctagtatatttcccccctctttaagaagggcagtaggaaggttggtattgtcattctgacggctcgcgttctgttcttttgatgattgttcctggtcgctcggagggttgtcatcattcatcaatatcgtggcggcagataattctggtaactctggatcgtctagttttcccgaaagcatcttaatcgttcacaatgacctaatagcaattcgttccacagtgatgaggaatcttataaatacatgggatgggacgggtggtgttttcaaataaacttgaaacgtgatgcctcaatggcatacatcttatgaattgaggtaaaagatagtgataacttgttagttcatcgttcacaattgacgaaaaaacataataatataggcaggacaaagaaacaaaccactttgatttatgtgtcactttaggatcatggataatattccttacaagaacttttattttttcacagtttcctgtaaataggaatatcagcctttgtgtatctgatgctgtgaagcaaacattcgttaaaaatatgcgtcgcggttatgtccttataagttatgctatgccattttatttactttttactgttgtgcaaatggattgaacaacatgaggaatagagctgtactaaccgtttagtgatatccatcatcatcagtgaaggagaagcctgtaatgtcaaacattgggaaatcgactaatattttatggcacaattgcttgattggacaatctgatagacagaaattgctgggacaaaaaggctgtgtcgtatggataacaggactcagtggttcagggaaaagtactcttgcatgtgcactgagtcgtgagttgcattgcagaggccacctcacgtatgtacttgatggtgacaacctcagacatggcctaaatagagatttaagctttaaggcagaagaccgtgcagaaaatatacgaagagttgccaaatcttt

SEQ ID NO: 81645 - DNA, 1636 bp, Zea Mays
ctggtcacacacacgcagcaaccaccgagcccagcgcccggcccagccagccagggccaacggcaaggcaacaccctcctcagcccgacgccgacgctcgccgtcatcctcgtaaatccacagcgcgcgcctcccgtcctcccaggcctcacccctagcgatgcgccactcccggcgctcgtgatccatggcctcactccccgttcctcacactcttccgcgggtctcgccagcgatagtgggcgccgcgagggggagggccgcggtgcgcgtacgcactgccaccgcggcattgggcggtgggtgcggcggcggcggcggaatggagcagcgccacggggatgccccgcacagcccagaatccagagggtgacgtgtcggacggggccgggtggttgttcctgtacatgaggttatctacctgctgcatctgcttcactggtcatcagccactgccgctaacctttgtgtcctggcgatcatccggtaaggatgatggataagtaaatacgtgtggaactggatctcgaactggagccgattggacgtttgacagcgatgttctactcctgttctagtatatttcccccctctttaagaagggcagtaggaagtgaaggagaagcctgtaatgtcaaacattgggaaatcgactaatattttatggcacaattgcttgattggacaatctgatagacagaaattgctgggacaaaaaggctgtgtcgtatggataacaggactcagtggttcagggaaaagtactcttgcatgtgcactgagtcgtgagttgcattgcagaggccacctcacgtatgtacttgatggtgacaacctcagacatggcctaaatagagatttaagctttaaggcagaagaccgtgcagaaaatatacgaagagttggtgaagtggcaaagcttttcgctgatgctggtgtcatatgcattgctagcttgatatctccatacaggagagatcgtgatgcatgccgtgctctacttccacattctaactttattgaagtatttattgatttgcccctaaaaatttgtgaagctcgtgatcctaaaggcctatacaagcttgcacgtacaggaaagattaaaggtttcactggaattgatgatccatacgaaccaccaattaatggtgaggtgagcctgaagagcatgccttccttcataatcacgccgtacaattgctagagtaaactgaaactctgaaatacaaagtcgtcatcagccactattgatgtggtgcttccttcatgatcacaccgtacaattgctagagtacactgaaactctgaaatacaaaacccttcattatgctgtgactactgaagtttagcacaaacaatcacttcgtttctacactcttattccttaacattgagaaataaaaaataactgccggtgataagacagctctgggcattgtgtgatagagaggacctctcacgcaatctaagaagacctctgtgttagagtgtgtgttcctatattatccatgtatccgtagatgggctggcaccgctgttaggctgctggcctattagggttagagttttttggatctatatatgtagccctcctctatgcaatacacaaggattctcactctcttacactctg

SEQ ID NO: 81646 - DNA, 1840 bp, Zea Mays
ctggtcacacacacgcagcaaccaccgagcccagcgcccggcccagccagccagggccaacggcaaggcaacaccctcctcagcccgacgccgacgctcgccgtcatcctcgtaaatccacagcgcgcgcctcccgtcctcccaggcctcacccctagcgatgcgccactcccggcgctcgtgatccatggcctcactccccgttcctcacactcttccgcgggtctcgccagcgatagtgggcgccgcgagggggagggccgcggtgcgcgtacgcactgccaccgcggcattgggcggtgggtgcggcggcggcggcggaatggagcagcgccacggggatgccccgcacagcccagaatccagagggtgacgtgtcggacggggccgggtggttgttcctgtacatgaggttatctacctgctgcatctgcttcactggtcatcagccactgccgctaacctttgtgtcctggcgatcatccggtaaggatgatggataagtaaatacgtgtggaactggatctcgaactggagccgattggacgtttgacagcgatgttctactcctgttctagtatatttcccccctctttaagaagggcagtaggaaggttggtattgtcattctgacggctcgcgttctgttcttttgatgattgttcctggtcgctcggagggttgtcatcattcatcaatatcgtggcggcagataattctgtgatgaggaatcttataaatacatgggatgggacgggtggtgttttcaaataaacttgaaacgtgatgcctcaatggcatacatcttatgaattgagtgaaggagaagcctgtaatgtcaaacattgggaaatcgactaatattttatggcacaattgcttgattggacaatctgatagacagaaattgctgggacaaaaaggctgtgtcgtatggataacaggactcagtggttcagggaaaagtactcttgcatgtgcactgagtcgtgagttgcattgcagaggccacctcacgtatgtacttgatggtgacaacctcagacatggcctaaatagagatttaagctttaaggcagaagaccgtgcagaaaatatacgaagagttggtgaagtggcaaagcttttcgctgatgctggtgtcatatgcattgctagcttgatatctccatacaggagagatcgtgatgcatgccgtgctctacttccacattctaactttattgaagtatttattgatttgcccctaaaaatttgtgaagctcgtgatcctaaaggcctatacaagcttgcacgtacaggaaagattaaaggtttcactggaattgatgatccatacgaaccaccaattaatggtgaggtgagcctgaagagcatgccttccttcataatcacgccgtacaattgctagagtaaactgaaactctgaaatacaaagtcgtcatcagccactattgatgtggtgcttccttcatgatcacaccgtacaattgctagagtacactgaaactctgaaatacaaaacccttcattatgctgtgactactgaagtttagcacaaacaatcacttcgtttctacactcttattccttaacattgagaaataaaaaataactgccggtgataagacagctctgggcattgtgtgatagagaggacctctcacgcaatctaagaagacctctgtgttagagtgtgtgttcctatattatccatgtatccgtagatgggctggcaccgctgttaggctgctggcctattagggttagagttttttggatctatatatgtagccctcctctatgcaatacacaaggattctcactctcttacactctg

SEQ ID NO: 81647 - DNA, 1240 bp, Zea Mays
ctggtcacacacacgcagcaaccaccgagcccagcgcccggcccagccagccagggccaacggcaaggcaacaccctcctcagcccgacgccgacgctcgccgtcatcctcgtaaatccacagcgcgcgcctcccgtcctcccaggcctcacccctagcgatgcgccactcccggcgctcgtgatccatggcctcactccccgttcctcacactcttccgcgggtctcgccagcgatagtgggcgccgcgagggggagggccgcggtgcgcgtacgcactgccaccgcggcattgggcggtgggtgcggcggcggcggcggaatggagcagcgccacggggatgccccgcacagcccagggaaaagtactcttgcatgtgcactgagtcgtgagttgcattgcagaggccacctcacgtatgtacttgatggtgacaacctcagacatggcctaaatagagatttaagctttaaggcagaagaccgtgcagaaaatatacgaagagttggtgaagtggcaaagcttttcgctgatgctggtgtcatatgcattgctagcttgatatctccatacaggagagatcgtgatgcatgccgtgctctacttccacattctaactttattgaagtatttattgatttgcccctaaaaatttgtgaagctcgtgatcctaaaggcctatacaagcttgcacgtacaggaaagattaaaggtttcactggaattgatgatccatacgaaccaccaattaatggtgaggtgagcctgaagagcatgccttccttcataatcacgccgtacaattgctagagtaaactgaaactctgaaatacaaagtcgtcatcagccactattgatgtggtgcttccttcatgatcacaccgtacaattgctagagtacactgaaactctgaaatacaaaacccttcattatgctgtgactactgaagtttagcacaaacaatcacttcgtttctacactcttattccttaacattgagaaataaaaaataactgccggtgataagacagctctgggcattgtgtgatagagaggacctctcacgcaatctaagaagacctctgtgttagagtgtgtgttcctatattatccatgtatccgtagatgggctggcaccgctgttaggctgctggcctattagggttagagttttttggatctatatatgtagccctcctctatgcaatacacaaggattctcactctcttacactctg

SEQ ID NO: 81648 - DNA, 1911 bp, Zea Mays
ctggtcacacacacgcagcaaccaccgagcccagcgcccggcccagccagccagggccaacggcaaggcaacaccctcctcagcccgacgccgacgctcgccgtcatcctcgtaaatccacagcgcgcgcctcccgtcctcccaggcctcacccctagcgatgcgccactcccggcgctcgtgatccatggcctcactccccgttcctcacactcttccgcgggtctcgccagcgatagtgggcgccgcgagggggagggccgcggtgcgcgtacgcactgccaccgcggcattgggcggtgggtgcggcggcggcggcggaatggagcagcgccacggggatgccccgcacagcccagaatccagagggtgacgtgtcggacggggccgggtggttgttcctgtacatgaggttatctacctgctgcatctgcttcactggtcatcagccactgccgctaacctttgtgtcctggcgatcatccggtaaggatgatggataagtaaatacgtgtggaactggatctcgaactggagccgattggacgtttgacagcgatgttctactcctgttctagtatatttcccccctctttaagaagggcagtaggaaggttggtattgtcattctgacggctcgcgttctgttcttttgatgattgttcctggtcgctcggagggttgtcatcattcatcaatatcgtggcggcagataattctgtgaaggagaagcctgtaatgtcaaacattgggaaatcgactaatattttatggcacaattgcttgattggacaatctgatagacagaaattgctgggacaaaaaggctgtgtcgtatggataacaggactcagtggttcagggaaaagtactcttgcatgtgcactgagtcgtgagttgcattgcagaggccacctcacgtatgtacttgatggtgacaacctcagacatggcctaaatagagatttaagctttaaggcagaagaccgtgcagaaaatatacgaagagttggtgaagtggcaaagcttttcgctgatgctggtgtcatatgcattgctagcttgatatctccatacaggagagatcgtgatgcatgccgtgctctacttccacattctaactttattgaagtatttattgatttgcccctaaaaatttgtgaagctcgtgatcctaaaggcctatacaagcttgcacgtacaggaaagattaaaggtttcactggaattgatgatccatacgaaccaccaattaatgtaattaagatgaaagatggggaatgcccttcacccaaagcaatggccaagcaagttctatgctaccttgaagagaacggatatttgcaagcttagcatatgtattttgagaagattgatctgattcttgtgtgtccattacttgtggacacaataagatctgttgttggtcacatgaataaaaggcatcaacacgtaggaagtaacagaaggtaccgttcattcagaaacggaaatggattcattcgtttcattgttgatgatatttgtttcgcgtgtattttgcctgcatagctgtgattcatctgcatcagcaattcaggatgcattcggttaactcgcgttgaccgttcgcgtcaattcgggtagttgttctgtgcttgctagttgggttctgttggcaatgtatttgttacaagtaaatacggacaatgtgtgtaatttgtgtatcactttttttcctcttggaataaaaaccgaggaacattgtaacttcttccattgaattcatgcttttggcttttgctgcctctttcattgttgcagtttctgaggcagtaagaacgggtttacgaacccttccacagaaaaagctgccattttatcttgttatatgctcttttttcatacaggaagttatattctcaacttctc

SEQ ID NO: 81649 - DNA, 1920 bp, Zea Mays
ctggtcacacacacgcagcaaccaccgagcccagcgcccggcccagccagccagggccaacggcaaggcaacaccctcctcagcccgacgccgacgctcgccgtcatcctcgtaaatccacagcgcgcgcctcccgtcctcccaggcctcacccctagcgatgcgccactcccggcgctcgtgatccatggcctcactccccgttcctcacactcttccgcgggtctcgccagcgatagtgggcgccgcgagggggagggccgcggtgcgcgtacgcactgccaccgcggcattgggcggtgggtgcggcggcggcggcggaatggagcagcgccacggggatgccccgcacagcccagaatccagagggtgacgtgtcggacggggccgggtggttgttcctgtacatgaggttatctacctgctgcatctgcttcactggtcatcagccactgccgctaacctttgtgtcctggcgatcatccggtaaggatgatggataagtaaatacgtgtggaactggatctcgaactggagccgattggacgtttgacagcgatgttctactcctgttctagtatatttcccccctctttaagaagggcagtaggaaggttggtattgtcattctgacggctcgcgttctgttcttttgatgattgttcctggtcgctcggagggttgtcatcattcatcaatatcgtggcggcagataattctgtgaaggagaagcctgtaatgtcaaacattgggaaatcgactaatattttatggcacaattgcttgattggacaatctgatagacagaaattgctgggacaaaaaggctgtgtcgtatggataacaggactcagtggttcagggaaaagtactcttgcatgtgcactgagtcgtgagttgcattgcagaggccacctcacgtatgtacttgatggtgacaacctcagacatggcctaaatagagatttaagctttaaggcagaagaccgtgcagaaaatatacgaagagttggtgaagtggcaaagcttttcgctgatgctggtgtcatatgcattgctagcttgatatctccatacaggagagatcgtgatgcatgccgtgctctacttccacattctaactttattgaagtatttattgatttgcccctaaaaatttgtgaagctcgtgatcctaaaggcctatacaagcttgcacgtacaggaaagattaaaggtttcactggaattgatgatccatacgaaccaccaattaatggtgagatagtaattaagatgaaagatggggaatgcccttcacccaaagcaatggccaagcaagttctatgctaccttgaagagaacggatatttgcaagcttagcatatgtattttgagaagattgatctgattcttgtgtgtccattacttgtggacacaataagatctgttgttggtcacatgaataaaaggcatcaacacgtaggaagtaacagaaggtaccgttcattcagaaacggaaatggattcattcgtttcattgttgatgatatttgtttcgcgtgtattttgcctgcatagctgtgattcatctgcatcagcaattcaggatgcattcggttaactcgcgttgaccgttcgcgtcaattcgggtagttgttctgtgcttgctagttgggttctgttggcaatgtatttgttacaagtaaatacggacaatgtgtgtaatttgtgtatcactttttttcctcttggaataaaaaccgaggaacattgtaacttcttccattgaattcatgcttttggcttttgctgcctctttcattgttgcagtttctgaggcagtaagaacgggtttacgaacccttccacagaaaaagctgccattttatcttgttatatgctcttttttcatacaggaagttatattctcaacttctc

SEQ ID NO: 81650 - DNA, 690 bp, Zea Mays
cggtggcttgccgggtggcagcggaaacccaacgcctttgggtgcctgctcctcatacccatggcgccgcttatctactccaaccgatacgcgctgcagcaaaagtggaggagttaagctgaaaactgcacaagctagaacggaaagaaacagcggttggaatttatgaaaagaagaggctgattggcgcgccgaatcaagaaagatgcgattggagtggagcagcatgaatggggccctgaaatttctccggaaagaaatgggtttctcaccaacattagaactaacccagattcgtcgtctacagtcaaatcagcggactactaaaggaaagaggcaaactaactgaattgtagcagctaatcacggcctgctacccgctccctggccacggccaaaaatgaagcgacagaaatggagaactgtatcaagagtccggtaaaacagctcatcatgatcggcggccatagattcgtaaggaggccggatagttcagcaagaaccgcgcacgcttcgcaggaaaagaaaaatgaggaggcgaagaagagaagagggagagacagcggtgctcaccattggcaggttgatccagagaagcgaagaggacaaatgaaaggctaagctaaacaaaacaaaacccagttccgtcaggtaagtacctgttctgctaccagctagctgtagaataac

SEQ ID NO: 81651 - DNA, 1243 bp, Zea Mays
acgctgcagatgggccgaatcagatggcccaaccatgcctcgaagcacacatatgggccacaccgcatcgtgtgcgtccatccacttttgagtgcctgctgaccgcatgatcgaacctggaaaccctcgagtcgtatataggtagtccgctgccccaaagtgctttctcccgcagagccgccgacaacgctctctaccgtccgagaccccaagcaccagcgcggcggcgggggcggcggcgaccatggctgtcggaaagaacaagaggatctccaagggaaagaagggtggcaagaaaaagaccgtcgaccctttctctaagaaggattggtatgacatcaaggcaccgtcggtgttcagtgtgcgcaacatcgggaagactctcgtatccaggacacagggtaccaggggcgacgaggatcaagcttacaggaaaatcaggctccgtgctgaagatgtgcagggcaggaatgtgctcacaaacttttggggcatgaattttaccactgataaactcagatccctagtgaagaagtggcagacattaatcgaagcccatgttgatgtcaagacaaccgacaactacatgttgcgtttgttctgcatcggcttcaccaagaggcgcccaaaccaagtcaagagaacctgctatgctcaggcatcccagatccgtcagatccgccgtaagatggttgagattatgatcaaccaggcttctacatgtgacctgaaagaacttgtttcgaagttcattccagaagttattggtaaggagattgagaagtctacctccagcatcttcccacttcaaaacgtcttcatccgcaaggtgaagatactcaaggcccccaagttcgatcttgggaaactcatggaggttcatggcgactacaaagaggatgttggtgtgaagcttgagaggcctgtcgagggagatgaggctgggcaggaggttgctgctgccgagtagtttgtttgctacttctgtatctaggcgagtctggacatgaggttgcttatgacgtgaacttatagagttgtcttggctacgtgttttcatctggccctaagattttgtcttgaaacaagtttaaaattaagattactcgtggcgatcttctgtgttcgagtactgatgtactaagttcctttgcatcctcatttttgtttggtcatcgataatttactttctcattcatatgagatgctgttctctgcttatttattgttagctgacactggc

SEQ ID NO: 81652 - DNA, 711 bp, Zea Mays
aatatattaatcgcatcagtgagcatgttggataatggactgcaaacatatgatcacgtacactaaaaagtggagtcggataggactagtagctaggagtagaatggaacacacattgctcaacagaaacatcatgcatgggcatcactgctgcagtcctttatgcacggatcaatatatcactatgtacacgaaaaatctacagcacaattacaacgcttctgttcatggctagcagctgcgtgactaggatctcaacacaattacaacgtgtggtttgaggaataaggtgatcaattatcttctcatttcttttttttgtttggtttgtgtaatagaatataataagttgatccattattatgttattctttatagactaataattattaatataataatatgaggaataggttcatttcacaaaatttatagaatatactaacgataaaccacctcatgtagaaaaacagccgttagtcgatcatggttgcttcttttgtcagctttacgtgcaactccagcttcgttcccggtgcagagatgcaaacggcgccaggctaccaccagctgctcaacgcggtggttgatctcctcgctgatgggcaccctgacccaggccaggaggaagacgtcgtttcttgggcttgtggtcgaccacacgatcagaagcatgcgtccatgaggcagcagcaacagattgcggcaaac

SEQ ID NO: 81653 - DNA, 834 bp, Zea Mays
atgacattgacagcccgcggacgtgtcaacggcccaacagcaggagcgcgcacggcggtttctttcgggcacgtacgtacgtaccatccttccgcgaacgacgcgccggtcttccgtggtggcggcggcggcggctgcgcgtacggcggcgggtacatcgccggtggcggcggcggctgtccgtacggcgacgcgtacaccggctgtccgtacggctgctggtacatcggcggcggcggcggctgcccgtacggcgacgcgtacatcggctgcggcggaggcggcccgtactggtggtggtggtggtgctccatcccgcgctccgcgtacgggtccattgggtaccctgataggtcaggtcaggtcagattgaaaggcacgtcggcatctcgagaggaacatgaggtcggaggagtcaccttggggcggcggcgggggcggagacggggaggggcacggcgaagacgggggcgcgccgccatggccgtggggattgtagtagctcatcgtccccgccggagcgacggcgggattgggataggaatcgcaggggcgatggtggtgttggtggtgttcgcgttggatttcgagaagaatagagagggggaacgcgtgagggtgccgagggaacgacagaggaaggaggatcatgccagttttgtcgatcgtttttgtggacgcaagagccaacctatagctattcctggcaggcttcgacggctcgctgcgttgggcacttcatgcatcagcggacagcagcgggccgaaccctgggtccgttcaggtcacagctgcaagcaaaggatacctgtgaactgctcgggaaatcattaa

SEQ ID NO: 81654 - DNA, 1657 bp, Zea Mays
gttttggggcggcgacctctgttcacggttctttgaagatttcgattgctttaagcattccagttccagtagaattcctcttctcttctattgtgcgaggcttcgctgttggatctttctctgtgaagagagtgcaagcagacgggcggtctgaactgatgccgtgttgattcgtctgcagttacatgccttcttcgggcgggcagccgagagaaagcagcaaattagtcgctacgtctgtcctatttgctcttaatatctttttgagtttgccaaagtactggtgctgtgatgaagatgctcaactatttctatgtctggacatctgagatcaatttctgtgattggtttacgcatcattctgagctccgaacaattatatctttttatcaatttactgttgcgcctggcttatattcttcttgggaagggctcaatcatcgattgaagcaagcccaaagatcctgagaaagcaaagctggtgcagacatcgagatggttaacttaccaaccctttgcagccttgcattgcactggagtcaaatggtttaatcgaaattacttcatgttgtttttctgattcagttcactcgtttgtcagcgcttattatgacggcaagtgatgtgcaaatctttatcctacacacttaatggaattactgccatgtgtggactaatctccgcttattatctgatgcttttgtcaggcgctgctccatttttcttataaaaaatctttttcttgatattttaagagcttagattttctgtcaatacaaagcagattgtggcaagtgatgcagaagttaatattatgctatacactgaaaccttttgtggacaaaaaaactccgcttattatctgatgccacatcccaagaacgcttggaactcagtttatctcaaaatggatgaattcttctgtatacaattttaaattttggtctttaccactttttttacttgataatcgtcagaatgttggcaaatttcatgttcacgtgaaactacaaattttcagttctcataaagtttggttgagcatcttatgatcgatttatcttcatcaatttctgatgcagcttgatctcttgaattaaagataacccgcatgagcaatgatgatatgccctgggtacacagtggtagattaaagcataaacaagtactcctgtacaagaactactggacttttagttcatgatgtttaaaatttaccaggaactaagctgatatgttggttttgatatatttggcacgcaacattacacctacagttatttggatgctgaattgctgatacacaacatcaacgacagttgtttggttgctaatacacaacattaaccccaaacgatattttttttgcatattgcttccgtgcaaaaaatgctctggagcagctatagatcgtctagtgaaggccaggttgcttcaggcaagcctaatgagtttggcagtcattaaacgggtagaggtctggacgacagataaagaaagagcaagttaaatgtagcctataatttttttacacacatgtactaggcatatgttggttagttaattagcccttattatatttaatgcattttacaatgtggacaaaaaatagttggatcaaaaagacccataatctgctggagctggtagggggttc

SEQ ID NO: 81655 - DNA, 677 bp, Zea Mays
atttttttgtaatgtataatcacaataaatggagaggacgatgtactcagggtgtttgtctcgcacccaagcagaagatcagaatcaagctgcggtcctactgggtgccgttgatagaggactcatgcaagaagataattgaagctgcccaaacaaccaacgcaaagaccatgggtcctgttcctctgcccactaagcggagagtctattgtgtgctcaactctcctcacgtgcacaaggattcacggttccattttgagatccggacgcatcagcggctgattgatatcatgtatccaactgcccaaacaattgattcattgatgcaactccagctccctgccggtgtggatgttgaggttaagctatgattctgttggagctaaacttttccaagtttgatgtaatgtggtactcattttctgcagcttttcttcttgatccttttgttgtctggatgggcaaaacactttttcatgctggttgcactgattctgggacaagactaacgaagctttctaacttgcagactactttcatattttcttttagagacttttggactgagctcaactggtcatatcaaactattatttggtcaattttatatgtatccaagtaaacaacagttgtaaatcaattattaggataactacatagcaaaaattgttgtgcaa

SEQ ID NO: 81656 - DNA, 2308 bp, Zea Mays
gcgcatcctttttatatcttgcctttcccctcccgttccgttcccgtctcgctctcgcatcggccaacaacgcttcacggcaaaatccttccacaggcgggggagtcgcctcacctcacttcaccccgttcatccccagcgaagaagcaaaatacttagcacaccagtgatggcggctacttaccaaactggccttgtggccgagccacagttgctgaacactgaaattatcactcggagggccaccaactctgttgctgacactaacagaaaagacaaatgcgtcggctacttggatgtgtttgtacaccaagcacgcgacatccacaatgtttgtatctatcacaagcaggatgtgtatgcaaagctgtgcctcacgagcagccctgatgtttcgtgctcaaccaaggtgatcaacagtgctgggcgcaacccagtatttgaggaaagcctacgccttgatgtgcaaactgtggatgcttctctcaagtgcgagatatggatgttaagcagagtgaggaactacctggaggatcagctccttggctttgcccttgttcctctggtagacattgtaattggtaatggaaagctggtccaggagttctccttgacatctactgacctattccacacaccagctggatttgtgcacttgtccttgtcatatgctggttgttccccagatgttgtcctcatctcatcacccaataagtccccatcaacagtggatgattctggaaatgatcatgtggttcctgctcagcttgagaagattgtgttcccagacctaaatgtggagaaggaagacgagattatggtctcaaagtatctcgagatgacttcagactctgaaacccctataaaagttgagaacgtcatgtcactgcattctgcaaatgatgatgatgttccttctaaacttgaaaagatcaagttcatagattctgagagccgtgcgaaagctgaaaatggcaagatgctactatttggtgtagctgtgcctagtactgcaatttgtgcagataaggttgaggaacaccgcgatgaaagccctctaagttgtgtctcaaccacaggctcctccactaccctttctgcaacaacacaatcagtttctgagccttcggagaccagtgtcgaggcatcccctagacaatgccatagggagaaaagccaagatgttacaggtggtgaggctaattcttctgaaacaccagcaaaggatgaagttatcaagcctgtgatctgcgttaaccttcagccagagcagtcagttgtccaacaggacatagttgacatgtacatgaagagcatgcaacagttcacagaatctcttgcaaaaatgaaacttccattggacgttgagaatactagtccctcaaacgatgattcatactccagtacaattgagaagacatccccatccccatcttcatctgcagcaaagggttctagggtcttttatggaagcagggccttcttttaagtttctaatgcaaagtagtacactagctcgttactatctcctacatacatatacatggttccaggtttatcagatatcttctggcatgtaatcacatactttctgtctccataatatgcttctaggactcactcctggtattgctattagtgttatgctttgttagaagataataatttcatctcatagtaatcccatgtactaatacatacccatgaaatataatgtcatgaaatcagttctgactcgagattaattcctgcactgtattgtgaccaggtggggactcttcgtcccccccgttgccctgtcaaaaagaagtattgtgtttatctgaaggtctgggtgacaggtgaatcatattctgcttctcagaaataggtagaggcacgaccatgacagagcactagagcagcaatggctgctgggtgaaacattttattttcatcaagaaaagcaggaactggaagctgcgattgtttccttgtcataatttacattgcaactttaaaaagatggtgctaagtgataacgtgatatcacgggcacttgtttctagtgaagtagcatttgaggaaaaaccatgtgacttctgtagttctgttcttgaataatgtaggagagctgcctaccttgtattgtgatttgtgaaaggaagagaatatttgtacagagctccttaggagaagaaaagggggaggggcacggaatgtgcactttatttgccttattatcagttaatcatgcttcctaggtgctgccactttttagcaatctcattttgttctcaaatatttggctggtaatatatttcctcat

SEQ ID NO: 81657 - DNA, 3139 bp, Zea Mays
atcctttttatatcttgcctttcccctcccgttccgttcccgtctcgctctcgcatcggccaacaacgcttcacggcaaaatccttccacaggcgggggagtcgcctcacctcacttcaccccgttcatccccagcgaagaaggtaactaccgccatctcccggtaatgatcctcggtatcttccggccagaaaagatttgttttcggtacggatagggtttctgatcaagtgcgcgcgagcccaggagctaagaagaatcccagttctttgttcgccgactcgagtttgacattatggtacgtgcctagctattagtaccccccgcaccacctgcttcctttcccgtttgcacttcgccgtgaccgggtgagttatcagaccacaacttcttcgttggttccagtattggggctgacactgacagtgggttccaattagatgtaccaaatgtgcgttcgcttgaacgcactctccgatctatggcagtcatgaatctaggctatcggtaaagatgcaaattgtcaaatcgtgcaggctcttacgttttttttttcacactggatactgcttctgttctctgtcccaagtttgttagccctcacgtttgcctgagatctttcagccacaattcctccagatcttagcccaatacctaaaagttagtttcctgattacagactagccaggggccaacgtatgcttctgtctggttcagctatttattttaaatctagagctagcagctgccctacttttcagtcttacatgattgtgctctgaaaattgtgagccggaagatgtagatccgatcgttttagctaagtactgaaacagatctatgactatcagtttgacctaggctgaactttccatcattatatttttttcttacaaggctacaggctgtgttatttgtccaagcaactttctttatgatctggcattgaacctatttctttttttttttggtatgtagcaaaatacttagcacaccagtgatggcggctacttaccaaactggccttgtggccgagccacagttgctgaacactgaaattatcactcggagggccaccaactctgttgctgacactaacagaaaagacaaatgcgtcggctacttggatgtgtttgtacaccaagcacgcgacatccacaatgtttgtatctatcacaagcaggatgtgtatgcaaagctgtgcctcacgagcagccctgatgtttcgtgctcaaccaaggtgatcaacagtgctgggcgcaacccagtatttgaggaaagcctacgccttgatgtgcaaactgtggatgcttctctcaagtgcgagatatggatgttaagcagagtgaggaactacctggaggatcagctccttggctttgcccttgttcctctggtagacattgtaattggtaatggaaagctggtccaggagttctccttgacatctactgacctattccacacaccagctggatttgtgcacttgtccttgtcatatgctggttgttccccagatgttgtcctcatctcatcacccaataagtccccatcaacagtggatgattctggaaatgatcatgtggttcctgctcagcttgagaagattgtgttcccagacctaaatgtggagaaggaagacgagattatggtctcaaagtatctcgagatgacttcagactctgaaacccctataaaagttgagaacgtcatgtcactgcattctgcaaatgatgatgatgttccttctaaacttgaaaagatcaagttcatagattctgagagccgtgcgaaagctgaaaatggcaagatgctactatttggtgtagctgtgcctagtactgcaatttgtgcagataaggttgaggaacaccgcgatgaaagccctctaagttgtgtctcaaccacaggctcctccactaccctttctgcaacaacacaatcagtttctgagccttcggagaccagtgtcgaggcatcccctagacaatgccatagggagaaaagccaagatgttacaggtggtgaggctaattcttctgaaacaccagcaaaggatgaagttatcaagcctgtgatctgcgttaaccttcagccagagcagtcagttgtccaacaggacatagttgacatgtacatgaagagcatgcaacagttcacagaatctcttgcaaaaatgaaacttccattggacgttgagaatactagtccctcaaacgatgattcatactccagtacaattgagaagacatccccatccccatcttcatctgcagcaaagggttctagggtcttttatggaagcagggccttcttttaagtttctaatgcaaagtagtacactagctcgttactatctcctacatacatatacatggttccaggtttatcagatatcttctggcatgtaatcacatactttctgtctccataatatgcttctaggactcactcctggtattgctattagtgttatgctttgttagaagataataatttcatctcatagtaatcccatgtactaatacatacccatgaaatataatgtcatgaaatcagttctgactcgagattaattcctgcactgtattgtgaccaggtggggactcttcgtcccccccgttgccctgtcaaaaagaagtattgtgtttatctgaaggtctgggtgacaggtgaatcatattctgcttctcagaaataggtagaggcacgaccatgacagagcactagagcagcaatggctgctgggtgaaacattttattttcatcaagaaaagcaggaactggaagctgcgattgtttccttgtcataatttacattgcaactttaaaaagatggtgctaagtgataacgtgatatcacgggcacttgtttctagtgaagtagcatttgaggaaaaaccatgtgacttctgtagttctgttcttgaataatgtaggagagctgcctaccttgtattgtgatttgtgaaaggaagagaatatttgtacagagctccttaggagaagaaaagggggaggggcacggaatgtgcactttatttgccttattatcagttaatcatgcttcctaggtgctgccactttttagcaatctcattttgttctcaaatatttggctggtaatatatttcctcat

SEQ ID NO: 81658 - DNA, 2291 bp, Zea Mays
cagaccacaacttcttcgttggttccagtattggggctgacactgacagtgggttccaattagatgtaccaaatgtgcgttcgcttgaacgcactctccgatctatggcagtcatgaatctaggctatcgcaaaatacttagcacaccagtgatggcggctacttaccaaactggccttgtggccgagccacagttgctgaacactgaaattatcactcggagggccaccaactctgttgctgacactaacagaaaagacaaatgcgtcggctacttggatgtgtttgtacaccaagcacgcgacatccacaatgtttgtatctatcacaagcaggatgtgtatgcaaagctgtgcctcacgagcagccctgatgtttcgtgctcaaccaaggtgatcaacagtgctgggcgcaacccagtatttgaggaaagcctacgccttgatgtgcaaactgtggatgcttctctcaagtgcgagatatggatgttaagcagagtgaggaactacctggaggatcagctccttggctttgcccttgttcctctggtagacattgtaattggtaatggaaagctggtccaggagttctccttgacatctactgacctattccacacaccagctggatttgtgcacttgtccttgtcatatgctggttgttccccagatgttgtcctcatctcatcacccaataagtccccatcaacagtggatgattctggaaatgatcatgtggttcctgctcagcttgagaagattgtgttcccagacctaaatgtggagaaggaagacgagattatggtctcaaagtatctcgagatgacttcagactctgaaacccctataaaagttgagaacgtcatgtcactgcattctgcaaatgatgatgatgttccttctaaacttgaaaagatcaagttcatagattctgagagccgtgcgaaagctgaaaatggcaagatgctactatttggtgtagctgtgcctagtactgcaatttgtgcagataaggttgaggaacaccgcgatgaaagccctctaagttgtgtctcaaccacaggctcctccactaccctttctgcaacaacacaatcagtttctgagccttcggagaccagtgtcgaggcatcccctagacaatgccatagggagaaaagccaagatgttacaggtggtgaggctaattcttctgaaacaccagcaaaggatgaagttatcaagcctgtgatctgcgttaaccttcagccagagcagtcagttgtccaacaggacatagttgacatgtacatgaagagcatgcaacagttcacagaatctcttgcaaaaatgaaacttccattggacgttgagaatactagtccctcaaacgatgattcatactccagtacaattgagaagacatccccatccccatcttcatctgcagcaaagggttctagggtcttttatggaagcagggccttcttttaagtttctaatgcaaagtagtacactagctcgttactatctcctacatacatatacatggttccaggtttatcagatatcttctggcatgtaatcacatactttctgtctccataatatgcttctaggactcactcctggtattgctattagtgttatgctttgttagaagataataatttcatctcatagtaatcccatgtactaatacatacccatgaaatataatgtcatgaaatcagttctgactcgagattaattcctgcactgtattgtgaccaggtggggactcttcgtcccccccgttgccctgtcaaaaagaagtattgtgtttatctgaaggtctgggtgacaggtgaatcatattctgcttctcagaaataggtagaggcacgaccatgacagagcactagagcagcaatggctgctgggtgaaacattttattttcatcaagaaaagcaggaactggaagctgcgattgtttccttgtcataatttacattgcaactttaaaaagatggtgctaagtgataacgtgatatcacgggcacttgtttctagtgaagtagcatttgaggaaaaaccatgtgacttctgtagttctgttcttgaataatgtaggagagctgcctaccttgtattgtgatttgtgaaaggaagagaatatttgtacagagctccttaggagaagaaaagggggaggggcacggaatgtgcactttatttgccttattatcagttaatcatgcttcctaggtgctgccactttttagcaatctcattttgttctcaaatatttggctggtaatatatttcctcat

SEQ ID NO: 81659 - DNA, 1805 bp, Zea Mays
aaagcgcccgccacttctaaagggtcatgcttgtggggtggggaggcaacaacgggtccacgctgacggctggggtcattgccaacagggaggggatctcatgggcgaccaaggacaaggtgcagcaagccaactactacggctccctcacccaggcttccaccatcagagtaggcagctacaacggggaggagatatatgcgccgttcaagagcctcctacccatggtgaacccagacgaccttgtgtttggaggctgggacatcagcagcatgaacctggcagatgccatgaccagggccaaggtgctggacattgacctgcagaagcagctcaggccctacatggagtccatggtgccacttcccggtgtctatgatccggacttcatcgccgctaaccagggctctcgtgccaacaatgtcatcaagggcaccaagaaagaacaggtggagcagatcatcaaagatatcagggagtttaaggagaagaacaaagtggacaaggtagttgtgctgtggactgcaaacactgaaaggtacagcaatgtatgtgctggtctcaacgacacaatggagaatctgctggcatctgtggacaagaacgaggcggagatctcgccatcaacactatatgccattgcctgtgtcacggagggggtgccgttcatcaatgggagcccccagaacacttttgtgcctgggctgattgatcttgctatcaagaacaactgcctgatcggtggtgacgacttcaagagtgggcagaccaagatgaaatcggtcctggttgattttcttgttggtgctggaataaagcccacctcgattgtgagctacaaccacttgggaaacaacgacggcatgaacctgtctgcccctcaaacattcaggtccaaggagatctccaagagcaacgtggtggatgacatggtctcaagcaatgccattctctatgggcccggcgagcatcccgatcatgttgttgtcatcaagtatgtgccgtatgtgggagacagtaagagggctatggacgagtacacatcagagatcttcatgggcggcaagagcaccatcgtgctgcacaacacctgcgaggactcgctcctcgccgcaccgatcatcctcgatctggtgctcctggctgagctcagcaccaggatccagttaaaacctgagggaacggtaagagcccacgaataatccgaagcatgctgggtgattcagcgcttcggcaatcagcaccatcatctaacgtctctctcattatgcaggacaagttccactccttccacccggtggccaccatccttagctacctcaccaaggcaccactggttccacccggcacaccggtggtgaacgctcttgcaaagcagagggcgatgctggagaacatcatgagggcttgcgttggcctggccccagagaacaacatgatcctggagtacaagtgagcgaagtggcgtggcctgcagctagatatggaggaggctgcacgaaggggactagagaggcgagattagctgtggaattgtgttggcttctcgtgttttcttttgcgttcttttcctggtcatcgctgtggcgcttttgtattttatttgttggacccgtaacactatcagggctctgctattagcgcttgaagcctgtaatggcattggcatcgtatgataatgtgatcgagggtgctagttcccctaagcattatttatataagttcaaatggcggcccggcccggtccggcctgagcctgagcccgctgtggcctggcacgaattgggacaggcccgttacgtcac

SEQ ID NO: 81660 - DNA, 2070 bp, Zea Mays
ccattgtcatcgctcagtcacagaggcagccactgccgacgggcgacggccgacggcctcccatttcgatcccctcctactcctatgctgcggtccagcataagttcgggacttccggcaatccgccggcgcccgtcggctcaaatcgcatctaccgcggctagaagctctctcttcctccctccgatccggtggggtccatttccttcaattgtggcagtggccgtctcgaaccctctataaatcccccaccccggacacccttccccgaccacacggtccacacagcccaacaaaggagcgcggcggcccctccttccttcctcccacttctctcgcgcggcgctcgcttacctcgcctcgcattccgttcgagcaggggagcggcagtgagaagggagggaattaaggcaagatgttcatcgagagcttccgcgtcgagagcccccacgtgcggtacggcccgacggagatcgagtcggagtaccggtacgacacgacggagctggtgcacgaggccaaggacggcgcctcccgctgggtcgtccgccccaagtccgtcaagtacaacttccggaccagcaccgcggtccccaagctcggggtcatgcttgtggggtggggaggcaacaacgggtccacgctgacggctggggtcattgccaacagggaggggatctcatgggcgaccaaggacaaggtgcagcaagccaactactacggctccctcacccaggcttccaccatcagagtaggcagctacaacggggaggagatatatgcgccgttcaagagcctcctacccatggtgaacccagacgaccttgtgtttggaggctgggacatcagcagcatgaacctggcagatgccatgaccagggccaaggtgctggacattgacctgcagaagcagctcaggccctacatggagtccatggtgccacttcccggtgtctatgatccggacttcatcgccgctaaccagggctctcgtgccaacaatgtcatcaagggcaccaagaaagaacaggtggagcagatcatcaaagatatcagggctgattgatcttgctatcaagaacaactgcctgatcggtggtgacgacttcaagagtgggcagaccaagatgaaatcggtcctggttgattttcttgttggtgctggaataaagcccacctcgattgtgagctacaaccacttgggaaacaacgacggcatgaacctgtctgcccctcaaacattcaggtccaaggagatctccaagagcaacgtggtggatgacatggtctcaagcaatgccattctctatgggcccggcgagcatcccgatcatgttgttgtcatcaagtatgtgccgtatgtgggagacagtaagagggctatggacgagtacacatcagagatcttcatgggcggcaagagcaccatcgtgctgcacaacacctgcgaggactcgctcctcgccgcaccgatcatcctcgatctggtgctcctggctgagctcagcaccaggatccagttaaaacctgagggaacggacaagttccactccttccacccggtggccaccatccttagctacctcaccaaggcaccactggttccacccggcacaccggtggtgaacgctcttgcaaagcagagggcgatgctggagaacatcatgagggcttgcgttggcctggccccagagaacaacatgatcctggagtacaagtgagcgaagtggcgtggcctgcagctagatatggaggaggctgcacgaaggggactagagaggcgagattagctgtggaattgtgttggcttctcgtgttttcttttgcgttcttttcctggtcatcgctgtggcgcttttgtattttatttgttggacccgtaacactatcagggctctgctattagcgcttgaagcctgtaatggcattggcatcgtatgataatgtgatcgagggtgctagttcccctaagcattatttatataagttcaaatggcggcccggcccggtccggcctgagcctgagcccgctgtggcctggcacgaattgggacaggcccgttacgtcac

SEQ ID NO: 81661 - DNA, 1853 bp, Zea Mays
cttttcctctgaactttgtcttagttttttttttcttttttggcctgtgcacgtgagctggtatatcagtttgttcctgagagatccaagtccagcagggacgatgagcagtagccagcggacaaaactcaataactcatcacctagtatactggccaaggtcatgcttgtggggtggggaggcaacaacgggtccacgctgacggctggggtcattgccaacagggaggggatctcatgggcgaccaaggacaaggtgcagcaagccaactactacggctccctcacccaggcttccaccatcagagtaggcagctacaacggggaggagatatatgcgccgttcaagagcctcctacccatggtgaacccagacgaccttgtgtttggaggctgggacatcagcagcatgaacctggcagatgccatgaccagggccaaggtgctggacattgacctgcagaagcagctcaggccctacatggagtccatggtgccacttcccggtgtctatgatccggacttcatcgccgctaaccagggctctcgtgccaacaatgtcatcaagggcaccaagaaagaacaggtggagcagatcatcaaagatatcagggagtttaaggagaagaacaaagtggacaaggtagttgtgctgtggactgcaaacactgaaaggtacagcaatgtatgtgctggtctcaacgacacaatggagaatctgctggcatctgtggacaagaacgaggcggagatctcgccatcaacactatatgccattgcctgtgtcacggagggggtgccgttcatcaatgggagcccccagaacacttttgtgcctgggctgattgatcttgctatcaagaacaactgcctgatcggtggtgacgacttcaagagtgggcagaccaagatgaaatcggtcctggttgattttcttgttggtgctggaataaagcccacctcgattgtgagctacaaccacttgggaaacaacgacggcatgaacctgtctgcccctcaaacattcaggtccaaggagatctccaagagcaacgtggtggatgacatggtctcaagcaatgccattctctatgggcccggcgagcatcccgatcatgttgttgtcatcaagtatgtgccgtatgtgggagacagtaagagggctatggacgagtacacatcagagatcttcatgggcggcaagagcaccatcgtgctgcacaacacctgcgaggactcgctcctcgccgcaccgatcatcctcgatctggtgctcctggctgagctcagcaccaggatccagttaaaacctgagggaacggacaagttccactccttccacccggtggccaccatccttagctacctcaccaaggcaccactggttccacccggcacaccggtggtgaacgctcttgcaaagcagagggcgatgctggagaacatcatgagggcttgcgttggcctggccccagagaacaacatgatcctggagtacaagtgagcgaagtggcgtggcctgcagctagatatggaggaggctgcacgaaggggactagagaggcgagattagctgtggaattgtgttggcttctcgtgttttcttttgcgttcttttcctggtcatcgctgtggcgcttttgtattttatttgttggacccgtaacactatcagggctctgctattagcgcttgaagcctgtaatggcattggcatcgtatgataatgtgatcgagggtgctagttcccctaagcattatttatataagttcaaatggcggcccggcccggtccggcctgagcctgagcccgctgtggcctggcacgaattgggacaggcccgttacgtcac

SEQ ID NO: 81662 - DNA, 1784 bp, Zea Mays
atactggccaagtgcgcatgcgaagccatctgccatcttggacccccctcccccccccccccccccccccggtttcgttcctgttcctatggtcatgcttgtggggtggggaggcaacaacgggtccacgctgacggctggggtcattgccaacagggaggggatctcatgggcgaccaaggacaaggtgcagcaagccaactactacggctccctcacccaggcttccaccatcagagtaggcagctacaacggggaggagatatatgcgccgttcaagagcctcctacccatggtgaacccagacgaccttgtgtttggaggctgggacatcagcagcatgaacctggcagatgccatgaccagggccaaggtgctggacattgacctgcagaagcagctcaggccctacatggagtccatggtgccacttcccggtgtctatgatccggacttcatcgccgctaaccagggctctcgtgccaacaatgtcatcaagggcaccaagaaagaacaggtggagcagatcatcaaagatatcagggagtttaaggagaagaacaaagtggacaaggtagttgtgctgtggactgcaaacactgaaaggtacagcaatgtatgtgctggtctcaacgacacaatggagaatctgctggcatctgtggacaagaacgaggcggagatctcgccatcaacactatatgccattgcctgtgtcacggagggggtgccgttcatcaatgggagcccccagaacacttttgtgcctgggctgattgatcttgctatcaagaacaactgcctgatcggtggtgacgacttcaagagtgggcagaccaagatgaaatcggtcctggttgattttcttgttggtgctggaataaagcccacctcgattgtgagctacaaccacttgggaaacaacgacggcatgaacctgtctgcccctcaaacattcaggtccaaggagatctccaagagcaacgtggtggatgacatggtctcaagcaatgccattctctatgggcccggcgagcatcccgatcatgttgttgtcatcaagtatgtgccgtatgtgggagacagtaagagggctatggacgagtacacatcagagatcttcatgggcggcaagagcaccatcgtgctgcacaacacctgcgaggactcgctcctcgccgcaccgatcatcctcgatctggtgctcctggctgagctcagcaccaggatccagttaaaacctgagggaacggacaagttccactccttccacccggtggccaccatccttagctacctcaccaaggcaccactggttccacccggcacaccggtggtgaacgctcttgcaaagcagagggcgatgctggagaacatcatgagggcttgcgttggcctggccccagagaacaacatgatcctggagtacaagtgagcgaagtggcgtggcctgcagctagatatggaggaggctgcacgaaggggactagagaggcgagattagctgtggaattgtgttggcttctcgtgttttcttttgcgttcttttcctggtcatcgctgtggcgcttttgtattttatttgttggacccgtaacactatcagggctctgctattagcgcttgaagcctgtaatggcattggcatcgtatgataatgtgatcgagggtgctagttcccctaagcattatttatataagttcaaatggcggcccggcccggtccggcctgagcctgagcccgctgtggcctggcacgaattgggacaggcccgttacgtcac

SEQ ID NO: 81663 - DNA, 1557 bp, Zea Mays
atactggccaagtgcgcatgcgaagccatctgccatcttggacccccctcccccccccccccccccccccggtttcgttcctgttcctatggtcatgcttgtggggtggggaggcaacaacgggtccacgctgacggctggggtcattgccaacagggaggggatctcatgggcgaccaaggacaaggtgcagcaagccaactactacggctccctcacccaggcttccaccatcagagtaggcagctacaacggggaggagatatatgcgccgttcaagagcctcctacccatggtgaacccagacgaccttgtgtttggaggctgggacatcagcagcatgaacctggcagatgccatgaccagggccaaggtgctggacattgacctgcagaagcagctcaggccctacatggagtccatggtgccacttcccggtgtctatgatccggacttcatcgccgctaaccagggctctcgtgccaacaatgtcatcaagggcaccaagaaagaacaggtggagcagatcatcaaagatatcagggctgattgatcttgctatcaagaacaactgcctgatcggtggtgacgacttcaagagtgggcagaccaagatgaaatcggtcctggttgattttcttgttggtgctggaataaagcccacctcgattgtgagctacaaccacttgggaaacaacgacggcatgaacctgtctgcccctcaaacattcaggtccaaggagatctccaagagcaacgtggtggatgacatggtctcaagcaatgccattctctatgggcccggcgagcatcccgatcatgttgttgtcatcaagtatgtgccgtatgtgggagacagtaagagggctatggacgagtacacatcagagatcttcatgggcggcaagagcaccatcgtgctgcacaacacctgcgaggactcgctcctcgccgcaccgatcatcctcgatctggtgctcctggctgagctcagcaccaggatccagttaaaacctgagggaacggacaagttccactccttccacccggtggccaccatccttagctacctcaccaaggcaccactggttccacccggcacaccggtggtgaacgctcttgcaaagcagagggcgatgctggagaacatcatgagggcttgcgttggcctggccccagagaacaacatgatcctggagtacaagtgagcgaagtggcgtggcctgcagctagatatggaggaggctgcacgaaggggactagagaggcgagattagctgtggaattgtgttggcttctcgtgttttcttttgcgttcttttcctggtcatcgctgtggcgcttttgtattttatttgttggacccgtaacactatcagggctctgctattagcgcttgaagcctgtaatggcattggcatcgtatgataatgtgatcgagggtgctagttcccctaagcattatttatataagttcaaatggcggcccggcccggtccggcctgagcctgagcccgctgtggcctggcacgaattgggacaggcccgttacgtcac

SEQ ID NO: 81664 - DNA, 1623 bp, Zea Mays
atactggccaagtgcgcatgcgaagccatctgccatcttggacccccctcccccccccccccccccccccggtttcgttcctgttcctatggtcatgcttgtggggtggggaggcaacaacgggtccacgctgacggctggggtcattgccaacagggaggggatctcatgggcgaccaaggacaaggtgcagcaagccaactactacggctccctcacccaggcttccaccatcagagtaggcagctacaacggggaggagatatatgcgccgttcaagagcctcctacccatggtaatctattctaggatcttttactgaaaccaaacatacatgcagaacaaggcatatttctgtaaggtgaacccagacgaccttgtgtttggaggctgggacatcagcagcatgaacctggcagatgccatgaccagggccaaggtgctggacattgacctgcagaagcagctcaggccctacatggagtccatggtgccacttcccggtgtctatgatccggacttcatcgccgctaaccagggctctcgtgccaacaatgtcatcaagggcaccaagaaagaacaggtggagcagatcatcaaagatatcagggctgattgatcttgctatcaagaacaactgcctgatcggtggtgacgacttcaagagtgggcagaccaagatgaaatcggtcctggttgattttcttgttggtgctggaataaagcccacctcgattgtgagctacaaccacttgggaaacaacgacggcatgaacctgtctgcccctcaaacattcaggtccaaggagatctccaagagcaacgtggtggatgacatggtctcaagcaatgccattctctatgggcccggcgagcatcccgatcatgttgttgtcatcaagtatgtgccgtatgtgggagacagtaagagggctatggacgagtacacatcagagatcttcatgggcggcaagagcaccatcgtgctgcacaacacctgcgaggactcgctcctcgccgcaccgatcatcctcgatctggtgctcctggctgagctcagcaccaggatccagttaaaacctgagggaacggacaagttccactccttccacccggtggccaccatccttagctacctcaccaaggcaccactggttccacccggcacaccggtggtgaacgctcttgcaaagcagagggcgatgctggagaacatcatgagggcttgcgttggcctggccccagagaacaacatgatcctggagtacaagtgagcgaagtggcgtggcctgcagctagatatggaggaggctgcacgaaggggactagagaggcgagattagctgtggaattgtgttggcttctcgtgttttcttttgcgttcttttcctggtcatcgctgtggcgcttttgtattttatttgttggacccgtaacactatcagggctctgctattagcgcttgaagcctgtaatggcattggcatcgtatgataatgtgatcgagggtgctagttcccctaagcattatttatataagttcaaatggcggcccggcccggtccggcctgagcctgagcccgctgtggcctggcacgaattgggacaggcccgttacgtcac

SEQ ID NO: 81665 - DNA, 1568 bp, Zea Mays
aaaaggttctcggtgaactgaaaggttccagcatctttggattacactgggcagtactgacagacggtggtgctaactggtgaacccagacgaccttgtgtttggaggctgggacatcagcagcatgaacctggcagatgccatgaccagggccaaggtgctggacattgacctgcagaagcagctcaggccctacatggagtccatggtgccacttcccggtgtctatgatccggacttcatcgccgctaaccagggctctcgtgccaacaatgtcatcaagggcaccaagaaagaacaggtggagcagatcatcaaagatatcagggagtttaaggagaagaacaaagtggacaaggtagttgtgctgtggactgcaaacactgaaaggtacagcaatgtatgtgctggtctcaacgacacaatggagaatctgctggcatctgtggacaagaacgaggcggagatctcgccatcaacactatatgccattgcctgtgtcacggagggggtgccgttcatcaatgggagcccccagaacacttttgtgcctgggctgattgatcttgctatcaagaacaactgcctgatcggtggtgacgacttcaagagtgggcagaccaagatgaaatcggtcctggttgattttcttgttggtgctggaataaagcccacctcgattgtgagctacaaccacttgggaaacaacgacggcatgaacctgtctgcccctcaaacattcaggtccaaggagatctccaagagcaacgtggtggatgacatggtctcaagcaatgccattctctatgggcccggcgagcatcccgatcatgttgttgtcatcaagtatgtgccgtatgtgggagacagtaagagggctatggacgagtacacatcagagatcttcatgggcggcaagagcaccatcgtgctgcacaacacctgcgaggactcgctcctcgccgcaccgatcatcctcgatctggtgctcctggctgagctcagcaccaggatccagttaaaacctgagggaacggacaagttccactccttccacccggtggccaccatccttagctacctcaccaaggcaccactggttccacccggcacaccggtggtgaacgctcttgcaaagcagagggcgatgctggagaacatcatgagggcttgcgttggcctggccccagagaacaacatgatcctggagtacaagtgagcgaagtggcgtggcctgcagctagatatggaggaggctgcacgaaggggactagagaggcgagattagctgtggaattgtgttggcttctcgtgttttcttttgcgttcttttcctggtcatcgctgtggcgcttttgtattttatttgttggacccgtaacactatcagggctctgctattagcgcttgaagcctgtaatggcattggcatcgtatgataatgtgatcgagggtgctagttcccctaagcattatttatataagttcaaatggcggcccggcccggtccggcctgagcctgagcccgctgtggcctggcacgaattgggacaggcccgttacgtcac

SEQ ID NO: 81666 - DNA, 1003 bp, Zea Mays
ctctccgtctccttctggcgatttggggacgattcgactccgccgccttctcacctccgggctccagccttcggtcaggtcctccaccgctccacctcacgcccccctggcttcccctcacgacctcacctggtggctgcctggctggtggttcggtcacggatttggttaagggcgctcaaagaagagaaaattgctgctcgcagtgctatactgccgatgctccaagcagaagaggatgaaagatttgtcaaagagtggaagaagtgtcttgaggaggaggcgaggatcatgaaagacgttccagggtggaaggtcggcgagagcgtgtacaactctgggaaatggatgcccccggctactggtgagctccgccctgaggtttggtaagggcctgttgcaggcactgaatgccatcatgtcacgggggcacggataaagcttcatttttcattaaggatcagctgtttaaagacctgtatttgttgtacttgaaatctggctggttaataattggacatgtaaagccgacgtttacattgatgtaacgtgttcttgtctgctattgcttcccagcctctggtgtttcttcctgtaagtcattccgaacatgaatccttgttattgaagaaagtatgaaatataagcagcgcgtagcgtggtggcggcgcctcctgtcgcgtgtggattttcccgtgttgatggaacctgatgttgcaccggggattttccccggagggagccgagcggtcagtatagtttccagagcggagtttgtgtgggtagtgtttaatatgtggtcagtataggtgcccagagctgtgagtagtgtgtgcgtgttctcgggtagtttcgagtatgcgatcagtatgtgtctctatgagttacttgatacgccactgctcatatatgagtgttactctgtatgttaagaaaaaaaagtggaatctaaagtagaaaagttgtctgtgtgctacatctccgtgctgtattttgattttgg

SEQ ID NO: 81667 - DNA, 2381 bp, Zea Mays
cgcctccctccactactgctaacccctgctccccaatcccgatccaccgcgcacccgatccccggatccgccgtcccaccaccccgctcccggtccgcgattccgtcccctcttccaccgatctccccgatctttctcaattcctcggggggttttggtttccatctattctgggttgcgtgtgttgttccggagtgctgttaattagtatcgacatgagggcctcggactcggcggcggcagcggcggcggcggaggcggagtggacggaagagatagattttctactcggcgtcggcgagatcccccacgtcacctctccgcaggggcggcagcgcggggtgggtgttatcggcgacggcaacggcgtgcatcgcgcctcgggttccgacggctacacttcaccattgcgccttgggtgccgacgggtacactgcccccctggcgccgacgggtacgatgcgcagcacgccaagtacccctactacatggtcctgaaccgtcgggacaatgctgctccaccccatggcggaggcgatgcggggggcatgggcttccccactcagtcatcggtcacgggaccgctcgtcggtagcgcggtgccgtcgccgtcgccgcctccgccgtcgccgctgccactgggggcggacgatccggaccagcagctgatcgcgaaccagctccgctgcctgcgcatcggggacgcgcagggcgcgctcctgcaccagggccgggcgccaatcatgagcaccgcccggaccgatgtccccgcagggcacgacgcctaccatgggtacaccttcgccgcgtcaggttcttccttcccccgtgatcgcgtgttccttgatcaagccaaagctgtcgggcacgtcgcagcacggccgcatcatcgcttcgtgtcggacgctggcctggatgactttggtggtttccccggagccctggacaccagcattggaagcttcatgtacaatagggcagggcatgccaccggcatcggttgtggccaaggtttggtacagtctgatttccccgagtcgtcctacctgcttccgagtcaggcttgtgtagaatttcccagctcgagtcggtttgcccttaagcggcaccatgcatgtggtggtgtccctatggcagacaacggatttgggagaggcagaaatccttgtgagaacagtctaatgttcgataaaaagaacatgaactccctggaacgtgagaaggagaggagattccagcgtgtcagttctaggactttgaggtttaacaacttggttccggtcaagggaggatccatctaccacatggccaaggaccaaaattggtgccggtatttgcaggacaagttattggaagggaagcatcatgttgatgtgatctttgaaggaataattaaccatattgcagaccttatgatcagtagttttggcaactatcttgcacaggagatagtggaagtgtgtgatgaagggcaaatgttgaggatcatcttagtgctgacacagtaccctctgaagcagctgattgccgtctctctaaacacacatgggacaagggtagtacagaaattgatagagaaagttagcagcagagagcagattatgctcattatttcagccctacagccaagcttcatgctgcttgtcaatgatcacaatggtcatcatgtaatacagagatgtctggtcaactttggagtcgaggataataaggaactacgtggtccaatgtgttttggaacaggaaattccttccgcaaatgcacacttggcatctctgtttgaaggaaagtatgtttatctctcaaagcagcaggggagcagcaatgtggtggagaaatgcttaatgtttttcccggacgatgccaaagctgtcataatacaagaattactcatgctcagcggttctgatttcgaacaactgctgcaggaccgtttcgccaactatgtctttcgcactgcccttgaccacaccaggggccgtctgtacgatgtccttgttgaagcgatcctcccttatgagaatgccattcggaacagcccctattgcaataagaggatcatcatgcacctgaccaggaggtgaaagttgtactatctgtatacctttggtaccagggggaaggccgctttcctgttgttgacaatttatgttcgctctgtcagagttcagaaaggcaggttttggttgcaagaacaacggttcaagtgttgtatcgtgtgtcttccgtgttgtagtttttttttcctgatggtgtgctgtagtgtactttaaagttttaaaaggaacccgtgtgcttcccccttgtttcttttttgtacctgctgtaatgatttccactttggattctgtgaattgttactgtttgataaggaccattc

SEQ ID NO: 81668 - DNA, 2026 bp, Zea Mays
aaaaggccaactgctaaaaccacccaccttctcagtgactcacgaactcacgactccagatctcccaccgctcgccatggacctcctcgacgcgaggcaccgccacacgccggattcgagctcctccccacatgccgcctccgacatgggtctcccgctcgccggggctgcctaccagccctacgtctctgagctcctctccttctccatcgagcgcctccacaaggagccggagcttctgagggtcgacgcggagcgagtgcgacggcagatgcaggaggtggcggtggagaactacggcgccttcatcgccgcctccgaggcgctctccttcgtccgcgcgcagctcgagagcttcgatggccacctcgaggccatgatagaggagataccaaacttaacatctggctgcactgagtttgttgagtctgcacaacaaattctggaggagaggaagcttaaccaaacattactagccaaccacactacattgcttgacttgcttgaaatcccaccattgatggacacgtgtatacggaatgggaactatgatgaagcacttgatctagaagcttttgtgagcaaaatatcgaagttgcacccagatttacctgttgtccaaggattagctgctgaagtaaagaagacagtacaatcattaatttcccagcttctccagaaactccgatcaaatattcagttacctgagtgcctccgtattgtagcacatctgcgtcgaattggagttttcagtgagtcagaattgcgcttacagttcctgaggtgcagggaagcttggctttctggaattcttgaagatctggaccaaaggaatgtttatgattacctcaaaggcatggtgacttgccacagggtacatctattcgatgttgttaatcaatatcgagcaatattcaacaatgataaatctggaaatgatgagaactccgaaggtgggctgcttttcagctgggcaatgcaacaagttagtaatcacctcgctactcttcaagttatgttaccaagcataacagaaggtgggtctctgtccaacattcttgaacaatgcatgtattgtgcaatgggccttggcttagttggattggatttccgtggcctccttccgccaatctttgaggagtaattggtgtttaaattattgaattttatcactgactctaaaggggctttgttattgatgctgttatctgcattttgcagcgcggttctaaatttattctcaaagaatatgagtatggcggttgaaaattttcaggttgttttggattcgcaccgctgggttccgatgccatctgttggctttgtagcaaatggtgttgtcgatgacacttctgatgatgtgactccaccttctgttttaatggagcatccacctcttgcagtgtttgttaacggtgtttcagcagcaatgaatgagctaagaccgtgcacaccattgagcttgaaagtcatccttgctcaggaggtggtcaagggactacatgcagtctctgactccctagtaagatacaaagctatgcggatgcttcgtggaaatgagtccgctcttttcctgtcactctgccaggcatttatcgaggttgtacatccttattgtgccgcatgttttggtcgatgctacccgaatggggcaacattgatctcagagtgtcaaggcacactggacgctgtccgtcagctattgaccatacctgcaagatctaacagttccagtatcgaaagaaagcagtcaggagccattgaaagaaagcaatctgttgagagccctgggacagcagtcacgaataacgagctgtcagccgatggacctgggctagagatcaacgatgctgctacaaccaccaccccaccggtagaggacgacgtgagtacccatccaccagcaactttagtttaaattgagcagaaaagagggtgcaagtaaagtatcaaatgtgctaaaatataccatgccgttgtttgcttatctcatcctattctctctccctaaggctgtctccagcag

SEQ ID NO: 81669 - DNA, 2594 bp, Zea Mays
aaaaggccaactgctaaaaccacccaccttctcagtgactcacgaactcacgactccagatctcccaccgctcgccatggacctcctcgacgcgaggcaccgccacacgccggattcgagctcctccccacatgccgcctccgacatgggtctcccgctcgccggggctgcctaccagccctacgtctctgagctcctctccttctccatcgagcgcctccacaaggagccggagcttctgagggtcgacgcggagcgagtgcgacggcagatgcaggaggtggcggtggagaactacggcgccttcatcgccgcctccgaggcgctctccttcgtccgcgcgcagctcgagagcttcgatggccacctcgaggccatgatagaggagataccaaacttaacatctggctgcactgagtttgttgagtctgcacaacaaattctggaggagaggaagcttaaccaaacattactagccaaccacactacattgcttgacttgcttgaaatcccaccattgatggacacgtgtatacggaatgggaactatgatgaagcacttgatctagaagcttttgtgagcaaaatatcgaagttgcacccagatttacctgttgtccaaggattagctgctgaagtaaagaagacagtacaatcattaatttcccagcttctccagaaactccgatcaaatattcagttacctgagtgcctccgtattgtagcacatctgcgtcgaattggagttttcagtgagtcagaattgcgcttacagttcctgaggtgcagggaagcttggctttctggaattcttgaagatctggaccaaaggaatgtttatgattacctcaaaggcatggtgacttgccacagggtacatctattcgatgttgttaatcaatatcgagcaatattcaacaatgataaatctggaaatgatgagaactccgaaggtgggctgcttttcagctgggcaatgcaacaagttagtaatcacctcgctactcttcaagttatgttaccaagcataacagaaggtgggtctctgtccaacattcttgaacaatgcatgtattgtgcaatgggccttggcttagttggattggatttccgtggcctccttccgccaatctttgaggacgcggttctaaatttattctcaaagaatatgagtatggcggttgaaaattttcaggttgttttggattcgcaccgctgggttccgatgccatctgttggctttgtagcaaatggtgttgtcgatgacacttctgatgatgtgactccaccttctgttttaatggagcatccacctcttgcagtgtttgttaacggtgtttcagcagcaatgaatgagctaagaccgtgcacaccattgagcttgaaagtcatccttgctcaggaggtggtcaagggactacatgcagtctctgactccctagtaagatacaaagctatgcggatgcttcgtggaaatgagtccgctcttttcctgtcactctgccaggcatttatcgaggttgtacatccttattgtgccgcatgttttggtcgatgctacccgaatggggcaacattgatctcagagtgtcaaggcacactggacgctgtccgtcagctattgaccatacctgcaagatctaacagttccagtatcgaaagaaagcagtcaggagccattgaaagaaagcaatctgttgagagccctgggacagcagtcacgaataacgagctgtcagccgatggacctgggctagagatcaacgatgctgctacaaccaccaccccaccggtagaggacgacgtgagtacccatccaccagcaagtaagtagcttggacctccgtttgaatttgttaaagctctttatcaaggcctggtttagtcaaccagagaagaaattgctgcaaacattatattcatcgataataattcatagttttgctccagttctacagtgtacacaatacctcactggatatttgtatcttattttttttatcactcattaaatttttagctgttcattgttatagtcaatacctagatgttgtagagtgtgtccaacctgaacattcagtaatatgatgagtacaaacggtgttcatcgtgttgactgcacacttctgaaataaaagatctgattcatgagtcatatatatgtaattgatactactgaccatatttttctctatatgattctatctagctttagtttaaattgagcagaaaagagggtgcaagtaaagtatcaaatgtgctaaaatataccatgccgttgtttgcttatctcatcctattctctctccctaaggctgtctccagcagattgtatatgtgattgtgtaaaatatctttttgcactgcactattttatatagtgaagtttgaaattggagaagatataggagatagggatgagacgttcctcagataagtttgtttggttcagaattagagatgggaacaggactagcccttccttaaaattagaggaatgagaaaggatataataaattagaggaatgagaaaggatataatgggacatagttgtcctggctgtctctagccgttccataaccaaacacgttct

SEQ ID NO: 81670 - DNA, 1972 bp, Zea Mays
accttctcagtgactcacgaactcacgactccagatctcccaccgctcgccatggacctcctcgacgcgaggcaccgccacacgccggattcgagctcctccccacatgccgcctccgacatgggtctcccgctcgccggggctgcctaccagccctacgtctctgagctcctctccttctccatcgagcgcctccacaaggagccggagcttctgagggtcgacgcggagcgagtgcgacggcagatgcaggaggtggcggtggagaactacggcgccttcatcgccgcctccgaggcgctctccttcgtccgcgcgcagctcgagagcttcgatggccacctcgaggccatgatagaggagataccaaacttaacatctggctgcactgagtttgttgagtctgcacaacaaattctggaggagaggaagcttaaccaaacattactagccaaccacactacattgcttgacttgcttgaaatcccaccattgatggacacgtgtatacggaatgggaactatgatgaagcacttgatctagaagcttttgtgagcaaaatatcgaagttgcacccagatttacctgttgtccaaggattagctgctgaagtaaagaagacagtacaatcattaatttcccagcttctccagaaactccgatcaaatattcagttacctgagtgcctccgtattgtagcacatctgcgtcgaattggagttttcagtgagtcagaattgcgcttacagttcctgaggtgcagggaagcttggctttctggaattcttgaagatctggaccaaaggaatgtttatgattacctcaaaggcatggtgacttgccacagggtacatctattcgatgttgttaatcaatatcgagcaatattcaacaatgataaatctggaaatgatgagaactccgaaggtgggctgcttttcagctgggcaatgcaacaacgcggttctaaatttattctcaaagaatatgagtatggcggttgaaaattttcaggttgttttggattcgcaccgctgggttccgatgccatctgttggctttgtagcaaatggtgttgtcgatgacacttctgatgatgtgactccaccttctgttttaatggagcatccacctcttgcagtgtttgttaacggtgtttcagcagcaatgaatgagctaagaccgtgcacaccattgagcttgaaagtcatccttgctcaggaggtggtcaagggactacatgcagtctctgactccctagtaagatacaaagctatgcggatgcttcgtggaaatgagtccgctcttttcctgtcactctgccaggcatttatcgaggttgtacatccttattgtgccgcatgttttggtcgatgctacccgaatggggcaacattgatctcagagtgtcaaggcacactggacgctgtccgtcagctattgaccatacctgcaagatctaacagttccagtatcgaaagaaagcagtcaggagccattgaaagaaagcaatctgttgagagccctgggacagcagtcacgaataacgagctgtcagccgatggacctgggctagagatcaacgatgctgctacaaccaccaccccaccggtagaggacgacgtgagtacccatccaccagcaagtaagtagcttggacctccgtttgaatttgttaaagctctttatcaaggcctggtttagtcaaccagagaagaaattgctgcaaacattatattcatcgataataattcatagttttgctccagttctacagtgtacacaatacctcactggatatttgtatcttattttttttatcactcattaaatttttagctgttcattgttatagtcaatacctagatgttgtagagtgtgtccaacctgaacattcagtaatatgatgagtacaaacggtgttcatcgtgttgactgcacacttctgaaataaaagatctgattcatgag

SEQ ID NO: 81671 - DNA, 1963 bp, Zea Mays
cacgaactcacgactccagatctcccaccgctcgccatggacctcctcgacgcgaggcaccgccacacgccggattcgagctcctccccacatgccgcctccgacatgggtctcccgctcgccggggctgcctaccagccctacgtctctgagctcctctccttctccatcgagcgcctccacaaggagccggagcttctgagggtcgacgcggagcgagtgcgacggcagatgcaggaggtggcggtggagaactacggcgccttcatcgccgcctccgaggcgctctccttcgtccgcgcgcagctcgagagcttcgatggccacctcgaggccatggtgtatacggaatgggaactatgatgaagcacttgatctagaagcttttgtgagcaaaatatcgaagttgcacccagatttacctgttgtccaaggattagctgctgaagtaaagaagacagtacaatcattaatttcccagcttctccagaaactccgatcaaatattcagttacctgagtgcctccgtattgtagcacatctgcgtcgaattggagttttcagtgagtcagaattgcgcttacagttcctgaggtgcagggaagcttggctttctggaattcttgaagatctggaccaaaggaatgtttatgattacctcaaaggcatggtgacttgccacagggtacatctattcgatgttgttaatcaatatcgagcaatattcaacaatgataaatctggaaatgatgagaactccgaaggtgggctgcttttcagctgggcaatgcaacaagttagtaatcacctcgctactcttcaagttatgttaccaagcataacagaaggtgggtctctgtccaacattcttgaacaatgcatgtattgtgcaatgggccttggcttagttggattggatttccgtggcctccttccgccaatctttgaggacgcggttctaaatttattctcaaagaatatgagtatggcggttgaaaattttcaggttgttttggattcgcaccgctgggttccgatgccatctgttggctttgtagcaaatggtgttgtcgatgacacttctgatgatgtgactccaccttctgttttaatggagcatccacctcttgcagtgtttgttaacggtgtttcagcagcaatgaatgagctaagaccgtgcacaccattgagcttgaaagtcatccttgctcaggaggtggtcaagggactacatgcagtctctgactccctagtaagatacaaagctatgcggatgcttcgtggaaatgagtccgctcttttcctgtcactctgccaggcatttatcgaggttgtacatccttattgtgccgcatgttttggtcgatgctacccgaatggggcaacattgatctcagagtgtcaaggcacactggacgctgtccgtcagctattgaccatacctgcaagatctaacagttccagtatcgaaagaaagcagtcaggagccattgaaagaaagcaatctgttgagagccctgggacagcagtcacgaataacgagctgtcagccgatggacctgggctagagatcaacgatgctgctacaaccaccaccccaccggtagaggacgacgtgagtacccatccaccagcaagtaagtagcttggacctccgtttgaatttgttaaagctctttatcaaggcctggtttagtcaaccagagaagaaattgctgcaaacattatattcatcgataataattcatagttttgctccagttctacagtgtacacaatacctcactggatatttgtatcttattttttttatcactcattaaatttttagctgttcattgttatagtcaatacctagatgttgtagagtgtgtccaacctgaacattcagtaatatgatgagtacaaacggtgttcatcgtgttgactgcacacttctgaaataaaagatctgattcatgag

SEQ ID NO: 81672 - DNA, 2098 bp, Zea Mays
cacgaactcacgactccagatctcccaccgctcgccatggacctcctcgacgcgaggcaccgccacacgccggattcgagctcctccccacatgccgcctccgacatgggtctcccgctcgccggggctgcctaccagccctacgtctctgagctcctctccttctccatcgagcgcctccacaaggagccggagcttctgagggtcgacgcggagcgagtgcgacggcagatgcaggaggtggcggtggagaactacggcgccttcatcgccgcctccgaggcgctctccttcgtccgcgcgcagctcgagagcttcgatggccacctcgaggccatgatagaggagataccaaacttaacatctggctgcactgagtttgttgagtctgcacaacaaattctggaggagaggaagcttaaccaaacattactagccaaccacactacattgcttgacttgcttgaaatcccaccattgatggacacgtgtatacggaatgggaactatgatgaagcacttgatctagaagcttttgtgagcaaaatatcgaagttgcacccagatttacctgttgtccaaggattagctgctgaagtaaagaagacagtacaatcattaatttcccagcttctccagaaactccgatcaaatattcagttacctgagtgcctccgtattgtagcacatctgcgtcgaattggagttttcagtgagtcagaattgcgcttacagggaagcttggctttctggaattcttgaagatctggaccaaaggaatgtttatgattacctcaaaggcatggtgacttgccacagggtacatctattcgatgttgttaatcaatatcgagcaatattcaacaatgataaatctggaaatgatgagaactccgaaggtgggctgcttttcagctgggcaatgcaacaagttagtaatcacctcgctactcttcaagttatgttaccaagcataacagaaggtgggtctctgtccaacattcttgaacaatgcatgtattgtgcaatgggccttggcttagttggattggatttccgtggcctccttccgccaatctttgaggacgcggttctaaatttattctcaaagaatatgagtatggcggttgaaaattttcaggttgttttggattcgcaccgctgggttccgatgccatctgttggctttgtagcaaatggtgttgtcgatgacacttctgatgatgtgactccaccttctgttttaatggagcatccacctcttgcagtgtttgttaacggtgtttcagcagcaatgaatgagctaagaccgtgcacaccattgagcttgaaagtcatccttgctcaggaggtggtcaagggactacatgcagtctctgactccctagtaagatacaaagctatgcggatgcttcgtggaaatgagtccgctcttttcctgtcactctgccaggcatttatcgaggttgtacatccttattgtgccgcatgttttggtcgatgctacccgaatggggcaacattgatctcagagtgtcaaggcacactggacgctgtccgtcagctattgaccatacctgcaagatctaacagttccagtatcgaaagaaagcagtcaggagccattgaaagaaagcaatctgttgagagccctgggacagcagtcacgaataacgagctgtcagccgatggacctgggctagagatcaacgatgctgctacaaccaccaccccaccggtagaggacgacgtgagtacccatccaccagcaagtaagtagcttggacctccgtttgaatttgttaaagctctttatcaaggcctggtttagtcaaccagagaagaaattgctgcaaacattatattcatcgataataattcatagttttgctccagttctacagtgtacacaatacctcactggatatttgtatcttattttttttatcactcattaaatttttagctgttcattgttatagtcaatacctagatgttgtagagtgtgtccaacctgaacattcagtaatatgatgagtacaaacggtgttcatcgtgttgactgcacacttctgaaataaaagatctgattcatgag

SEQ ID NO: 81673 - DNA, 1925 bp, Zea Mays
gaactcacgactccagatctcccaccgctcgccatggacctcctcgacgcgaggcaccgccacacgccggattcgagctcctccccacatgccgcctccgacatgggtctcccgctcgccggggctgcctaccagccctacgtctctgagctcctctccttctccatcgagcgcctccacaaggagccggagcttctgagggtcgacgcggagcgagtgcgacggcagatgcaggaggtggcggtggagaactacggcgccttcatcgccgcctccgaggcgctctccttcgtccgcgcgcagctcgagagcttcgatggccacctcgaggccatggtgtatacggaatgggaactatgatgaagcacttgatctagaagcttttgtgagcaaaatatcgaagttgcacccagatttacctgttgtccaaggattagctgctgaagtaaagaagacagtacaatcattaatttcccagcttctccagaaactccgatcaaatattcagttacctgagtgcctccgtattgtagcacatctgcgtcgaattggagttttcagtgagtcagaattgcgcttacagttcctgaggtgcagggaagcttggctttctggaattcttgaagatctggaccaaaggaatgtttatgattacctcaaaggcatggtgacttgccacagggtacatctattcgatgttgttaatcaatatcgagcaatattcaacaatgataaatctggaaatgatgagaactccgaaggtgggctgcttttcagctgggcaatgcaacaagttagtaatcacctcgctactcttcaagttatgttaccaagcataacagaagtattgtgcaatgggccttggcttagttggattggatttccgtggcctccttccgccaatctttgaggacgcggttctaaatttattctcaaagaatatgagtatggcggttgaaaattttcaggttgttttggattcgcaccgctgggttccgatgccatctgttggctttgtagcaaatggtgttgtcgatgacacttctgatgatgtgactccaccttctgttttaatggagcatccacctcttgcagtgtttgttaacggtgtttcagcagcaatgaatgagctaagaccgtgcacaccattgagcttgaaagtcatccttgctcaggaggtggtcaagggactacatgcagtctctgactccctagtaagatacaaagctatgcggatgcttcgtggaaatgagtccgctcttttcctgtcactctgccaggcatttatcgaggttgtacatccttattgtgccgcatgttttggtcgatgctacccgaatggggcaacattgatctcagagtgtcaaggcacactggacgctgtccgtcagctattgaccatacctgcaagatctaacagttccagtatcgaaagaaagcagtcaggagccattgaaagaaagcaatctgttgagagccctgggacagcagtcacgaataacgagctgtcagccgatggacctgggctagagatcaacgatgctgctacaaccaccaccccaccggtagaggacgacgtgagtacccatccaccagcaagtaagtagcttggacctccgtttgaatttgttaaagctctttatcaaggcctggtttagtcaaccagagaagaaattgctgcaaacattatattcatcgataataattcatagttttgctccagttctacagtgtacacaatacctcactggatatttgtatcttattttttttatcactcattaaatttttagctgttcattgttatagtcaatacctagatgttgtagagtgtgtccaacctgaacattcagtaatatgatgagtacaaacggtgttcatcgtgttgactgcacacttctgaaataaaagatctgattcatgag

SEQ ID NO: 81674 - DNA, 1700 bp, Zea Mays
atggacctcctcgacgcgaggcaccgccacacgccggattcgagctcctccccacatgccgcctccgacatgggtctcccgctcgccggggctgcctaccagccctacgtctctgagctcctctccttctccatcgagcgcctccacaaggagccggagcttctgagggtcgacgcggagcgagtgcgacggcagatgcaggaggtggcggtggagaactacggcgccttcatcgccgcctccgaggcgctctccttcgtccgcgcgcagctcgagagcttcgatggccacctcgaggccatgttacctgagtgcctccgtattgtagcacatctgcgtcgaattggagttttcagtgagtcagaattgcgcttacagttcctgaggtgcagggaagcttggctttctggaattcttgaagatctggaccaaaggaatgtttatgattacctcaaaggcatggtgacttgccacagggtacatctattcgatgttgttaatcaatatcgagcaatattcaacaatgataaatctggaaatgatgagaactccgaaggtgggctgcttttcagctgggcaatgcaacaagttagtaatcacctcgctactcttcaagttatgttaccaagcataacagaaggtgggtctctgtccaacattcttgaacaatgcatgtattgtgcaatgggccttggcttagttggattggatttccgtggcctccttccgccaatctttgaggagttgttttggattcgcaccgctgggttccgatgccatctgttggctttgtagcaaatggtgttgtcgatgacacttctgatgatgtgactccaccttctgttttaatggagcatccacctcttgcagtgtttgttaacggtgtttcagcagcaatgaatgagctaagaccgtgcacaccattgagcttgaaagtcatccttgctcaggaggtggtcaagggactacatgcagtctctgactccctagtaagatacaaagctatgcggatgcttcgtggaaatgagtccgctcttttcctgtcactctgccaggcatttatcgaggttgtacatccttattgtgccgcatgttttggtcgatgctacccgaatggggcaacattgatctcagagtgtcaaggcacactggacgctgtccgtcagctattgaccatacctgcaagatctaacagttccagtatcgaaagaaagcagtcaggagccattgaaagaaagcaatctgttgagagccctgggacagcagtcacgaataacgagctgtcagccgatggacctgggctagagatcaacgatgctgctacaaccaccaccccaccggtagaggacgacgtgagtacccatccaccagcaagtaagtagcttggacctccgtttgaatttgttaaagctctttatcaaggcctggtttagtcaaccagagaagaaattgctgcaaacattatattcatcgataataattcatagttttgctccagttctacagtgtacacaatacctcactggatatttgtatcttattttttttatcactcattaaatttttagctgttcattgttatagtcaatacctagatgttgtagagtgtgtccaacctgaacattcagtaatatgatgagtacaaacggtgttcatcgtgttgactgcacacttctgaaataaaagatctgattcatgag

SEQ ID NO: 81675 - DNA, 2213 bp, Zea Mays
atcttctcttaagaacaaaattctccttttctaaataaaatacaatcccacatcgagcacatcaacctcgttcgctgtccgttgtcctctccctgccccaagggtcctggcgcggcaagatcaaagcctcccaacagccaacaagtcgatcgcaaatcgcaagaacaagagaagaaccaatccgacaacgtctccattctccctcacatctccttgctcgcccagcagctggcactccccgtctcccctcgcatccgcatcgaatcgaggcatatcgccctatatatcccattccgctcggttggattcagcttcccctccctctcccccatcgataaaaccgatgcgtcgcccggcctcgcgtaccctaccggcgacgggacgaggggaaggttacaggcacggcgcgtgaagggtcctgcccagtcctgcccggtccgccgcgatgccgtggtttgagatgtggctgcctcctgtgcctggcgagggggctgtggcggcggcgggggggctgttcctcgacggcgccgatgcggcggcgcacggcgcgctcctcgcggccatgcctggttgctccttgtcgttcgtgctccggcaccagcgttgccgggggtcgccgccggggttcctgtcgctgacgatgtcggtaaaggggggcaggggctttgtgccggccccggtggggttgctcgctggtgcggaggagaagagcggggcggaggagtcggacgcgctggtcgcggggaagagggccgtggaagcggaggcggaggcggaggcggagggagtgattctgctgcaggagaaggagaaaaagaagaagaagctggacgattgtgctggagctggcgcgatgaacatgaccaaacacctatgggccggagccgttgctgccatgatatcgagaacagccgttgctccacttgagaggctaaagttggagtatatagttcgtggtgagcagaggaatctatttgagcttatgcatgctattgcaacaacacaaggattgaaaggcttttggaaaggaaactttgtgaatatcctccgcactgctccattcaaggcagtcaacttctatgcatatgacagttacagaaagcaactggtcaaatgggctggtaatgaagaagctacgaactttgagagatttattgctggtgcttttgctggtgttacagcaacaattatgtgcatacctatggatacagacaaagatggtagctcctggcggtgaagctttaggtggggtcattggtgttgcccgccacatgatccaaactgaaggattcttctcgctgtacaagggattggtgccttctcttatcagcatggcaccctctggtgctgtattctatggagtgtatgacatactgaagatggcttatctgcattcccctgaaggaaagaaaagagtatcgatgatgaagcaacagaaacaagaggcaaatgcattggatcaacttgaattgggtactgtgaggaccttactctatggggctattgctggttgctgtgctgaagcagctacatacccgtttgaagtggtccgtaggcagctacagatgcaagtaaaagcaacaagaatgaatgcatttgcaacatgccttaagattgttgatcaaggtggggtaccagcactgtatgccggtctgatccccagcatgttacaggttctaccatcagcatcgatcagctattttgtttatgagttgatgaagatagtcctgaaagtggagtgaatacaaattaattggtgagcctacgaaccacgttcaaatggtgatcacataccttgataaaattgccgaaaaaaaagtatgtaagggctagtttggaaactctattttttaagggatttagggaaaatgggatttccaaactagccctaacttgtgaaattttctcgtagacttgtttgacgaaagctcctgatgctgagggtagcttcaggttggtaccgtaaaacattgttcagctgaggcttttcacactagttgaccaaattgtacacgaggatatattcaagacctaattcagtggcttagtagaagattgttctctgcaactctgccccagcgaaataatctcggccttgcccaatttctgttgacaatttttttcatactttgtcgttgatgtatttgacacattgacagcagtccagagcgacatttgggacattctatctgtgaccctgtctaatgcggtta

SEQ ID NO: 81676 - DNA, 2062 bp, Zea Mays
atcttctcttaagaacaaaattctccttttctaaataaaatacaatcccacatcgagcacatcaacctcgttcgctgtccgttgtcctctccctgccccaagggtcctggcgcggcaagatcaaagcctcccaacagccaacaagtcgatcgcaaatcgcaagaacaagagaagaaccaatccgacaacgtctccattctccctcacatctccttgctcgcccagcagctggcactccccgtctcccctcgcatccgcatcgaatcgaggcatatcgccctatatatcccattccgctcggttggattcagcttcccctccctctcccccatcgataaaaccgatgcgtcgcccggcctcgcgtaccctaccggcgacgggacgaggggaaggttacaggcacggcgcgtgaagggtcctgcccagtcctgcccggtccgccgcgatgccgtggtttgagatgtggctgcctcctgtgcctggcgagggggctgtggcggcggcgggggggctgttcctcgacggcgccgatgcggcggcgcacggcgcgctcctcgcggccatgcctggttgctccttgtcgttcgtgctccggcaccagcgttgccgggggtcgccgccggggttcctgtcgctgacgatgtcggtaaaggggggcaggggctttgtgccggccccggtggggttgctcgctggtgcggaggagaagagcggggcggaggagtcggacgcgctggtcgcggggaagagggccgtggaagcggaggcggaggcggaggcggagggagtgattctgctgcaggagaaggagaaaaagaagaagaagctggacgattgtgctggagctggcgcgatgaacatgaccaaacacctatgggccggagccgttgctgccatgatatcgagaacagccgttgctccacttgagaggctaaagttggagtatatagttcgtggtgagcagaggaatctatttgagcttatgcatgctattgcaacaacacaaggattgaaaggcttttggaaaggaaactttgtgaatatcctccgcactgctccattcaaggcagtcaacttctatgcatatgacagttacagaaagcaactggtcaaatgggctggtaatgaagaagctacgaactttgagagatttattgctggtgcttttgctggtgttacagcaacaattatgtgcatacctatggatacaatcaggacaaagatggtagctcctggcggtgaagctttaggtggggtcattggtgttgcccgccacatgatccaaactgaaggattcttctcgctgtacaagggattggtgccttctcttatcagcatggcaccctctggtgctgtattctatggagtgtatgacatactgaagatggcttatctgcattcccctgaaggaaagaaaagagtatcgatgatgaagcaacagaaacaagaggcaaatgcattggatcaacttgaattgggtactgtgaggaccttactctatggggctattgctggttgctgtgctgaagcagctacatacccgtttgaagtggtccgtaggcagctacagatgcaagtaaaagcaacaagaatgaatgcatttgcaacatgccttaagattgttgatcaaggtggggtaccagcactgtatgccggtctgatccccagcatgttacaggttctaccatcagcatcgatcagctattttgtttatgagttgatgaagatagtcctgaaagtggagtgaatacaaattaattgacttgtttgacgaaagctcctgatgctgagggtagcttcaggttggtaccgtaaaacattgttcagctgaggcttttcacactagttgaccaaattgtacacgaggatatattcaagacctaattcagtggcttagtagaagattgttctctgcaactctgccccagcgaaataatctcggccttgcccaatttctgttgacaatttttttcatactttgtcgttgatgtatttgacacattgacagcagtccagagcgacatttgggacattctatctgtgaccctgtctaatgcggtta

SEQ ID NO: 81677 - DNA, 2091 bp, Zea Mays
atcttctcttaagaacaaaattctccttttctaaataaaatacaatcccacatcgagcacatcaacctcgttcgctgtccgttgtcctctccctgccccaagggtcctggcgcggcaagatcaaagcctcccaacagccaacaagtcgatcgcaaatcgcaagaacaagagaagaaccaatccgacaacgtctccattctccctcacatctccttgctcgcccagcagctggcactccccgtctcccctcgcatccgcatcgaatcgaggcatatcgccctatatatcccattccgctcggttggattcagcttcccctccctctcccccatcgataaaaccgatgcgtcgcccggcctcgcgtaccctaccggcgacgggacgaggggaaggttacaggcacggcgcgtgaagggtcctgcccagtcctgcccggtccgccgcgatgccgtggtttgagatgtggctgcctcctgtgcctggcgagggggctgtggcggcggcgggggggctgttcctcgacggcgccgatgcggcggcgcacggcgcgctcctcgcggccatgcctggttgctccttgtcgttcgtgctccggcaccagcgttgccgggggtcgccgccggggttcctgtcgctgacgatgtcggtaaaggggggcaggggctttgtgccggccccggtggggttgctcgctggtgcggaggagaagagcggggcggaggagtcggacgcgctggtcgcggaggcggagggagtgattctgctgcaggagaaggagaaaaagaagaagaagctggacgattgtgctggagctggcgcgatgaacatgaccaaacacctatgggccggagccgttgctgccatgatatcgagaacagccgttgctccacttgagaggctaaagttggagtatatagttcgtggtgagcagaggaatctatttgagcttatgcatgctattgcaacaacacaaggattgaaaggcttttggaaaggaaactttgtgaatatcctccgcactgctccattcaaggcagtcaacttctatgcatatgacagttacagaaagcaactggtcaaatgggctggtaatgaagaagctacgaactttgagagatttattgctggtgcttttgctggtgttacagcaacaattatgtgcatacctatggatacaatcaggacaaagatggtagctcctggcggtgaagctttaggtggggtcattggtgttgcccgccacatgatccaaactgaaggattcttctcgctgtacaagggattggtgccttctcttatcagcatggcaccctctggtgctgtattctatggagtgtatgacatactgaagatggcttatctgcattcccctgaaggaaagaaaagagtatcgatgatgaagcaacagaaacaagaggcaaatgcattggatcaacttgaattgggtactgtgaggaccttactctatggggctattgctggttgctgtgctgaagcagctacatacccgtttgaagtggtccgtaggcagctacagatgcaagtaaaagcaacaagaatgaatgcatttgcaacatgccttaagattgttgatcaaggtggggtaccagcactgtatgccggtctgatccccagcatgttacaggttctaccatcagcatcgatcagctattttgtttatgagttgatgaagatagtcctgaaagtggagtgaatacaaattaattggtgagcctacgaaccacgttcaaatggtgatcacataccttgataaaattgccgaaaaaaaaacttgtttgacgaaagctcctgatgctgagggtagcttcaggttggtaccgtaaaacattgttcagctgaggcttttcacactagttgaccaaattgtacacgaggatatattcaagacctaattcagtggcttagtagaagattgttctctgcaactctgccccagcgaaataatctcggccttgcccaatttctgttgacaatttttttcatactttgtcgttgatgtatttgacacattgacagcagtccagagcgacatttgggacattctatctgtgaccctgtctaatgcggtta

SEQ ID NO: 81678 - DNA, 2198 bp, Zea Mays
caaaattctccttttctaaataaaatacaatcccacatcgagcacatcaacctcgttcgctgtccgttgtcctctccctgccccaagggtcctggcgcggcaagatcaaagcctcccaacagccaacaagtcgatcgcaaatcgcaagaacaagagaagaaccaatccgacaacgtctccattctccctcacatctccttgctcgcccagcagctggcactccccgtctcccctcgcatccgcatcgaatcgaggcatatcgccctatatatcccattccgctcggttggattcagcttcccctccctctcccccatcgataaaaccgatgcgtcgcccggcctcgcgtaccctaccggcgacgggacgaggggaaggttacaggcacggcgcgtgaagggtcctgcccagtcctgcccggtccgccgcgatgccgtggtttgagatgtggctgcctcctgtgcctggcgagggggctgtggcggcggcgggggggctgttcctcgacggcgccgatgcggcggcgcacggcgcgctcctcgcggccatgcctggttgctccttgtcgttcgtgctccggcaccagcgttgccgggggtcgccgccggggttcctgtcgctgacgatgtcggtaaaggggggcaggggctttgtgccggccccggtggggttgctcgctggtgcggaggagaagagcggggcggaggagtcggacgcgctggtcgcggggaagagggccgtggaagcggaggcggaggcggaggcggagggagtgattctgctgcaggagaaggagaaaaagaagaagaagctggacgattgtgctggagctggcgcgatgaacatgaccaaacacctatgggccggagccgttgctgccatgatatcgagccgttgctccacttgagaggctaaagttggagtatatagttcgtggtgagcagaggaatctatttgagcttatgcatgctattgcaacaacacaaggattgaaaggcttttggaaaggaaactttgtgaatatcctccgcactgctccattcaaggcagtcaacttctatgcatatgacagttacagaaagcaactggtcaaatgggctggtaatgaagaagctacgaactttgagagatttattgctggtgcttttgctggtgttacagcaacaattatgtgcatacctatggatacaatcaggacaaagatggtagctcctggcggtgaagctttaggtggggtcattggtgttgcccgccacatgatccaaactgaaggattcttctcgctgtacaagggattggtgccttctcttatcagcatggcaccctctggtgctgtattctatggagtgtatgacatactgaagatggcttatctgcattcccctgaaggaaagaaaagagtatcgatgatgaagcaacagaaacaagaggcaaatgcattggatcaacttgaattgggtactgtgaggaccttactctatggggctattgctggttgctgtgctgaagcagctacatacccgtttgaagtggtccgtaggcagctacagatgcaagtaaaagcaacaagaatgaatgcatttgcaacatgccttaagattgttgatcaaggtggggtaccagcactgtatgccggtctgatccccagcatgttacaggttctaccatcagcatcgatcagctattttgtttatgagttgatgaagatagtcctgaaagtggagtgaatacaaattaattggtgagcctacgaaccacgttcaaatggtgatcacataccttgataaaattgccgaaaaaaaagtatgtaagggctagtttggaaactctattttttaagggatttagggaaaatgggatttccaaactagccctaacttgtgaaattttctcgtagacttgtttgacgaaagctcctgatgctgagggtagcttcaggttggtaccgtaaaacattgttcagctgaggcttttcacactagttgaccaaattgtacacgaggatatattcaagacctaattcagtggcttagtagaagattgttctctgcaactctgccccagcgaaataatctcggccttgcccaatttctgttgacaatttttttcatactttgtcgttgatgtatttgacacattgacagcagtccagagcgacatttgggacattctatctgtgaccctgtctaatgcggtta

SEQ ID NO: 81679 - DNA, 1347 bp, Zea Mays
atttagaagattcacagtatattcatggcctctggaacagccgttgctccacttgagaggctaaagttggagtatatagttcgtggtgagcagaggaatctatttgagcttatgcatgctattgcaacaacacaaggattgaaaggcttttggaaaggaaactttgtgaatatcctccgcactgctccattcaaggcagtcaacttctatgcatatgacagttacagaaagcaactggtcaaatgggctggtaatgaagaagctacgaactttgagagatttattgctggtgcttttgctggtgttacagcaacaattatgtgcatacctatggatacaatcaggacaaagatggtagctcctggcggtgaagctttaggtggggtcattggtgttgcccgccacatgatccaaactgaaggattcttctcgctgtacaagggattggtgccttctcttatcagcatggcaccctctggtgctgtattctatggagtgtatgacatactgaagatggcttatctgcattcccctgaaggaaagaaaagagtatcgatgatgaagcaacagaaacaagaggcaaatgcattggatcaacttgaattgggtactgtgaggaccttactctatggggctattgctggttgctgtgctgaagcagctacatacccgtttgaagtggtccgtaggcagctacagatgcaagtaaaagcaacaagaatgaatgcatttgcaacatgccttaagattgttgatcaaggtggggtaccagcactgtatgccggtctgatccccagcatgttacaggttctaccatcagcatcgatcagctattttgtttatgagttgatgaagatagtcctgaaagtggagtgaatacaaattaattggtgagcctacgaaccacgttcaaatggtgatcacataccttgataaaattgccgaaaaaaaagtatgtaagggctagtttggaaactctattttttaagggatttagggaaaatgggatttccaaactagccctaacttgtgaaattttctcgtagacttgtttgacgaaagctcctgatgctgagggtagcttcaggttggtaccgtaaaacattgttcagctgaggcttttcacactagttgaccaaattgtacacgaggatatattcaagacctaattcagtggcttagtagaagattgttctctgcaactctgccccagcgaaataatctcggccttgcccaatttctgttgacaatttttttcatactttgtcgttgatgtatttgacacattgacagcagtccagagcgacatttgggacattctatctgtgaccctgtctaatgcggtta

SEQ ID NO: 81680 - DNA, 1334 bp, Zea Mays
gattcacagtatattcatggcctctggccgttgctccacttgagaggctaaagttggagtatatagttcgtggtgagcagaggaatctatttgagcttatgcatgctattgcaacaacacaaggattgaaaggcttttggaaaggaaactttgtgaatatcctccgcactgctccattcaaggcagtcaacttctatgcatatgacagttacagaaagcaactggtcaaatgggctggtaatgaagaagctacgaactttgagagatttattgctggtgcttttgctggtgttacagcaacaattatgtgcatacctatggatacaatcaggacaaagatggtagctcctggcggtgaagctttaggtggggtcattggtgttgcccgccacatgatccaaactgaaggattcttctcgctgtacaagggattggtgccttctcttatcagcatggcaccctctggtgctgtattctatggagtgtatgacatactgaagatggcttatctgcattcccctgaaggaaagaaaagagtatcgatgatgaagcaacagaaacaagaggcaaatgcattggatcaacttgaattgggtactgtgaggaccttactctatggggctattgctggttgctgtgctgaagcagctacatacccgtttgaagtggtccgtaggcagctacagatgcaagtaaaagcaacaagaatgaatgcatttgcaacatgccttaagattgttgatcaaggtggggtaccagcactgtatgccggtctgatccccagcatgttacaggttctaccatcagcatcgatcagctattttgtttatgagttgatgaagatagtcctgaaagtggagtgaatacaaattaattggtgagcctacgaaccacgttcaaatggtgatcacataccttgataaaattgccgaaaaaaaagtatgtaagggctagtttggaaactctattttttaagggatttagggaaaatgggatttccaaactagccctaacttgtgaaattttctcgtagacttgtttgacgaaagctcctgatgctgagggtagcttcaggttggtaccgtaaaacattgttcagctgaggcttttcacactagttgaccaaattgtacacgaggatatattcaagacctaattcagtggcttagtagaagattgttctctgcaactctgccccagcgaaataatctcggccttgcccaatttctgttgacaatttttttcatactttgtcgttgatgtatttgacacattgacagcagtccagagcgacatttgggacattctatctgtgaccctgtctaatgcggtta

SEQ ID NO: 81681 - DNA, 1790 bp, Zea Mays
cgaaacactaccgattgtgccgtgtttagtgccggtacatttagaatgttctatttagctatctatactactataaatgcggatagccttaaaactcggtggcgcgcagactcatcaatccgatctgcgggggccgtgagtcagccgcgaatctcgccgcagggactagagaagctgttgttaaccagcgcgcgatggataaccggataagtagatagtggccgttattactcttggattagccgcagttactcgcagtcatccgatactccgatcccgttatataaatagacgccccccttggccccgtcgcctcatcacgaatcaccaacaccctctcctccaccttccatcccgatcaccgccgccaccgctttcgttccacgtcccgatggcaccggtagatctaacccccaggcagccccggaaggcgtatggcggcgacgccggcgcctactacgagtggagcccagccgacctgcccatgctcggcgtcgcctccatcggcgcagccaagctctccctcgccgccggtgggctctcgctccccagctactccgactcttccaaggtcgcgtacgttcttgaaggcactggcacctgcggcatcgtcctgccggaggcgaccaaggagaaggtgctggccgtgaaggagggcgacgccctcgcgctccccttcggcgtggtcacgtggtggcacaacggccccgccgcgccgacccagctcacggtcctcttcctcggcgacacctccaagggccacaggccggggcagttcaccaacttccagctgacgggcgcgagcggcatcttcacgggcttctccaccgagttcgtgtcgcgcgcgtgggacctgccggaggcgaacgccgcggcgctggtgtcgagccagccggcgtcgggcatcgtcagggcctcgtccccgctgccggcgccctcggcgcaggaccgcgagggggtggcgctcaactgcctggaggcgccgctggacgtggacatcccgggcgggggccgcgtggtggtgctcaacacggcgaacctgcccctggtcagggaggtcgggctgggcgccgacctggtccgcatcgacgcgcactccatgtgctccccgggcttctcgtgcgactcggcgtaccaggtcacctacatcgtgcgcggcagcgggcgcgtgcaggtggtcgggcccgacggggtgcgcgtcctggagacgcgcgtcgagggcggcttcctcttcatcgtgccccgcttccacgtggtgtccaagatcgcggacgcgtcgggcatggaatggttctccatcatcaccacccccaaccatctggccggaaagacgtcggtgtggaaagccatctcggcggaggtgctgcaggcgtcgttcaacaccacgccggagatggagaagctgttccggtccaagaggcttgactcggagatcttcttcgcgcccccgtccaactgagcaaataggcggaagcccacggtggagtgctctcgtgaagtcgtcgtggttagattagcattagcttagctcgccttaataaagagagaatggtggtggtcctcggctcactgcttcttcagtagcttcagtcgttcagtggttcagtcgttgcgtcggtcggttgtcgtgtccgttcgtcgaactgccaagttttgttaattattattattgtcaccctctgttttgtctaggtctagggctggaaaaaaactttaagccgcggcttgttcaggctcgcgagctatattgttttaattaatctataaaataataataaatattataattc

SEQ ID NO: 81682 - DNA, 2636 bp, Zea Mays
ctctgtcaacgtgcgcggaacggagattgagcaggactgcacggcacgagcccaaggccggcgccgcttgcaagttggaagttggaaccgagcgacccaaatggcgcccctgtcaactgtcgaatgggacgcggggcgtcgtgacgtcggaagctgccgtgcggccgcagtgtcgttcggttcggttcctcgcaacgaaccacgccagcgtggcggtccgccccccaccgctcttccctcctccgccctcactggctcccgactatttctagcaccgccgcgccggatcgacacttctcatgtcataccccggctcctctgcttctcggttcccgccgttccatgtccgccacaagggcagaccggcggcagaggttgtaccgatcgctctggcccacgtcgccggccggaccatcaaccaccgcgcggagcatcaagcagctgccattccaaagcccgttgaagcatcgaaggatttccagccgtgagcgtgtgcggtggcggcgcggccgggtcgccgggatgggcaagatgaactgcttctccggcctgctcagcggcaagagcaaggcattcaagggtggcaacaagggcgcttacgccaagaaggcggccagtggtggcaacgattgccccaaggtgaagccggtagagttcgtagacatggcgggcactgctgtcgacgacttcgtcggcagacgcggcggaggcagcgttcatgcgtccgcatgcagcagtagctttgtcgttcacgcagccaccgagctgccacgccatgccactgccgagaacggtgaagacgaggccgcggttaacaaggactcatcctccgccggcgctggctcgcccggttacagcattggccgcatgtcgccaacggcatcgccgaagctgacgcgctcctgctccaacatggagacggcgaggtctgtccccccgccagggtccgactccgacctgccggcgaggtcacgctcccacaacgacctgctgaagaacctgccccccggaaggccgacgaccgcccgcagcggcttgagcccgacggcgtccttcaggtcctcgtgctccgccgaccgcgtcctgctgaagaaacggtcgtcgcggcaggtgctcccgtcccggagccggaagctgtggtggcagacgttcctctggagccaccgcaacctgcaccggccgggcgcgagcgcgaccactcccacgctgccgtctgcgtggaaagacggccgtcccgtgcaccacgggtacacgtccgacacgctgggcactgccaccgcggacgccaagaacaagggcgtcgtcgcggtggaggaggaccccgtcccgaaccagtgggtcgcgttctccgccgaggcgtctccactggaccgggtcagcgcgtgggtgaacagcctcggggacgcctcgttccacgccgtcgacgaggaggacgacgccacgctgcacggcgcgcgaccgcggccccgaccgagacgctctgagatcgtggagctgtggacggccggcggcaagaggcagccacaggcgaagcggcgcgccgcggacgaggccgcccccgcccaggcgagcggcgtcgtgcacacgctcaacgccttctcctccgtcgcgcacatcgccggcatggggctccggaccgtcccgatgatcgccgccttctcgaccctccgcgccgtcaacctgtctggaaacatgattgtgcaaatcaccgctggatcgttgcccaaaggcctgcactcactggacctgtcgcggaacagcattgcagtcatcgaggggctgcgggagctgacgaggctgcgggtgctcaacctcagctacaaccggatctcaaggatcggccatggcctgtcgagctgcacggccatcagggagctgtacctggccgggaacaagatcagcgacgtggaggggctccaccgcctgctgaagctggccgtcctggacgtgagcttcaacaagatcagcacggccaagtccctgggccagctcgtggccaactacggctcgctgcgggcgatcagcctgctgggcaacccggtgcaggcgaacaccggcgaggacacgctccgcaaggcggtgtcgggcctgctcccgcggatcgactacctgaacaagcaggccgtgaagccgcagcgcgcgcgcgaggtggccaaggacagcgtcgcgcaggcggcgctcgggaacaacgccgggggcagctcgcggaggcggctggcgcgccgcctcagccagagccccggctcgtcgtcgggcaagggccggggccggggcggcagggaggggaacggcagccgcaggggcagcaggagcaggttcgtggccaggccccagagctcgagctaccaaggagatgaggcaaaacatgacaacggtgttgggcttgaagagggagaagaaacaagtccgtgcgtttaaactgcaagatgttgttaatgagctcgagtttgacgcatctattgctagttagcggtgtgtctaatttatctttgtagtaccaccgtcgacggattaggtctccaatgcaaaaaaatgtttagcgtctaccatttgattcgttgatcttgttttctttctctggatgatgatgatgacgaagcgtaaagaatctgagactacgaattatgaggttcagt

SEQ ID NO: 81683 - DNA, 1192 bp, Zea Mays
atggccgcttgggtcagttgtttgcacctgtggcctctctctctctctctctctctctctctctctactccctctctcacacccgtcctgcagtcctgctcagcaaggaaggagatagggatcaccgccaactcgtttgtgcgtgcaactcggctcctgcttttccaagacccctgccgcagtctcacaatagaatcaccgccatttccgaatcccttccagagctcagctgccaagtgccggtcacagatgaagaggcaatccaagaggcccaccgccagccgtgactccccagaaacggtggacaagcagctggcgctcgcggagtccctaacggcgcggaagacggagcccgacgagctgggggagaagaagcggcgcctggcgccggaccaggtgcgcgcgctggagcgctgcttcgaggcggacaacaggctggacccggaccgcaaggcccgcgtcgcgcgcgacctcgcgctgaacccgcgccaggtcgccgtctggttccagaaccgccgcgcgcgctggaaggccaaggccctccaccgcgacttcgcggcgctgcgcgcgcgccacgacgcgctccgccgcgacaaggacgccctcgccgccgagataagggagctgaggcagaagctggcagagcccgcggctgtgaagacggaggcgacgggcagtgacacggcggaggcgcgcccgacgacgacgacgacggccggcgcgccggcaccgcccgcggggggctgcaaggacggctcgtcggacagcgactcgagcgtggtcctcaacgacgacgtggacgcgtcgccgtactccggcgcggcgttcgagcagccgggcgccttcgccgggttcggtgcgccgttcttggccgcatcggcggcggcggcgccgccaccgacgggctgctcgtctccccccgtgttcgagaccaagtggcagcacgggccgacgacgtacgctttcgaatcgtacaagagctgctgcgccggatacggcttcacggaggaatggctcgccagctcggacgtcgtcggcagcgacggcgcggccggcttcttctcggaggatcacgcctccagcctcaactttagctggtgtgcgagtggcgcccaggactgggagtgagcgaggtttttggtctctgcacggttactgtaaagacaccatatcttatgagcaaggagccctg

SEQ ID NO: 81684 - DNA, 2473 bp, Zea Mays
gtcgactgactgactcaggcgaacacaagtacacctcacacccactccccgcaccccagtgaccccaccacccagcccgccgcgcagagcagcgcagcgcagcgcaggcgccctccaactccgggctccgcaaccgctgctccccctccctccctccctccagctcggcctgcctcagcccgcgccgcgcgatgtcagaggaggacgaggaccagccgccgcccaagcggccgtgcgcgtcgccgcccgcggaccaggtgctcgacaacgtgctcgagacggtgctccagttcctggacgccccgcgggaccggagcgccgcctcgctggtctgccgctcctggcaccgcgccgagtccgccacccgcgactccgtcgccgtccgcaacctcctggccgcctcggccacccgcgccgcgcgccgcttccccaacgcgcggagcctcctcctcaagggccgcccgcgcttcgccgacttcaacctcctcccgcacggctgggacgcctccgccttccgcccctgggccgccgccgtcgccgccgggtccttccccgcgctcacctcgctctacctcaagcgcatccccgtcaccgacgctgacctcgacctcctctcccgcccgctcccggcgtcattccgcgacctcacactgcacctctgcgacggcttcacctcgcgcgggctcgcctccatcgcctcccattgcaggggcctgcgagtgctcgacgtggtggagtgcgacatggccgaggagcaggaggtcgtggactgggtggccgcgttcccgccggagcccaccaacctggagtcgctctcgttcgagtgctacgagccgcccgtggccttcgccacgctcgaggcgctcgtggcgcggtccccgcgcctcagccgcctgggggtcaacctgcacgtctcgctcggccagctgcgccgcctcatggcgcacgccccgcgcttgtcgcacctgggcaccgggtcgttccgcccggcggaaggcggcgagggggaggcagagttcggggaggttgtctctgcattcgtgtccgctgggcgagcgcgcacgcttgtttctctctccggcttccgtgacctcgcgcaagagtacctgccaatcatcgacgtggtgtgctcccacttgaagagccttgacttaagctacgccgcggtcaccccgaatcagatcctgatgttcatcgggcaatgctacaaccttgagacgctatgggtacttgactcggtgcgcgacgaagggctcgacgccgtggggatttactgcaagaagctccagactcttcgcgtgctcccattggatgcgcatgaggatgccgacgagttggtatcggaggtattccggttatgtataatgggacgacaccagccggaccatgcgactgaggagcccatggatgaaggattcggtgccattgttaagaactgtaggaagcttaccaggctatccacgtcggggcaacttactgaccgggcgtttgagtacattggcaggcatggcaagtccctgcggacgctctctgtagcgtttgctggaaacagcgacgtggcgctgcaatacatcctccggggctgctcaaagctcgagaagctggagataagggactgccctttcggtgatgccggcctcctctctgggatgcaccagttctataacatgcggttcgtctggatgtcaggctgcaacctgaccctgcgggggtgcaaggaggtggctcgggggctaccacgaatggtggtggagttgataaatggccagcctgatgagagcgagaggaaggaaagtgtggacatcttatacatgtatcggtcactcgatggtccaagggaagatgtaccaccatttgtgaagatcctgtgaagctgcttctggtagtatcatgctgctgcccttgatatgctagttgagtgcagatcatttaacggaatatatgtaagttgtttgggctgcagatatggtacatttttttatctcttcaaattcttaggaggatttccaaagcgctgtaatggagcggcgggcagggtgttaaattgacgttgttgttctagtaggagttcatcagtgtatgtaaagcgtacgttccacggcgagaccataaaagcgcggcagagcaggcttcttggagggggcctcatggctgcctcagttttgtttgctgctctggaggggctccggttctaggactgtctttcagtgccggtgcaatgaccatgttttccctcataattttcgaggtgaaccttgttgtatatcatattagattcattagaacttgcccttctgccgctgctgcgtgtcgtctgttccatttttcgcgttctggaactatgagacgagaaaacctcctgatccattgttaaagtccaatgttccctgtctcaagttctgtgatctgatattctgatccctgttgatgttatgaaaagtacctgcgcctgtcttttcgatatctcatctga

SEQ ID NO: 81685 - DNA, 2097 bp, Zea Mays
ctcaaatccggctgttctccaaccccacggcggccccggaccgcacccaatgtacgaacacctccccgcgttcccgatcgcgccggccgccgtcggcgactgccgcggcatccccttcgacccttcctttctcccgcgcctcctcctctccgccacctcctgcacctcccccttcctcgccgagcgcgcagtctccgccctccacgcgaccggtctcaagctcggcgcgctcccctcctccctcccggcctcgaacgccctcatctccgcctactcccaagcggacctcctcccctccgccctccgcgtcttctccctcctcagccacccctccaccgcctcctacaccaccgtcctctccgcgctctcccgccacggccgtccccacgaggcgatctccctcttcgccacctccgcgtccgcggtcgcccccgacgccgagctcctctcctgcctcgtctcatgctgccgccgcgcgtccgccttactccccgcgcgcgcggcgcacgcctacgggatcaagaacgtggcggcgctggccttctacgcctcggcaggtccggcgctggtcgccttgtacgcgagccgcgggaaggtcggtgcggctaggagggtgtttggctacatggacggcttggacgtggtgtcctggaacgccatgatcggcgggttcgctagtgccgggatggacgaggagtcgtgggcctgcttccgggagatgcactcgagaggtgttcgagggaatgcccgcacagctgtggtggtgctgggatcttgtgacatggagtccggcaggcaggtccatgggactatagtgagtagtcatggtggttcttcaaacgccattttgtggaacgcgttgatgagcatgtattcgcgtgccggctgtgtcactgatgcagagagggtgttcctggagattgtaaagaaggatgttgtgtcatggaatgtgatgatcggagcgtttgcgaagaatggatatggagaaagggcccttgaatttgtggacatggtgttgcagtgtggtatgaagccagactctgtgacattcacggccgttctcatggcatgctgccattgtggcttggttgatgaagggcttgtactattccagcgctttgtgtcagttgttgggctcgttccaactatggagcagtgtgcttgcattgtggacttgcttgcacgtgctgggaggtttctggaggccttggaatttatcggccagatgtcagtgagaccaaatacagttgtctggggtgctttgctgtctgcaagtaagatgcatcacaacgtggaatttgcaaagattgcatttgaacaactggttcaggtggagcctgagaatgctgggaattttgtgacaatgtcaaacatatatgcaaaggctgggatggtagaagatgcaaagagaaaaggattgcaacagggcaaaccaaatcatgcgattagtgatatgaagagacttgaagtgcctgcatgttttgatgcaaccaggaagctgactgaagataaatatcagcaaatgttaccacaagagatataataaaacttatccagtaacatatactgatctccttattatttcacatgaaatggtggcaaaataaaacgtatccaggatgaggatggagtcaattcaaaactgctgctgttccctgcatgcataactcatctcccagcacccatccggtagaagtactggcggtataaacacatcatgacaaagctttcatgagaagatctttgaccttccgactaaagttgtctatttgaatctgctcacattgagatagttctatttgcagacaacaaaagattgatatggagaaagggctccttgaacttgtagccaatggtttgtgacttataaagacaattatgcatcatggacaaaattttatctagttcttagttttgatcattcctgaatgttcttgtttctaatgagagctatctcactgagtcaccaggtcgtgacttcaaagcaatctctccatatttgcgagggaagacttttttgcctcattctctagacctcactcatgttggagcctccgacattgggtctgtcctgcctcgaatgttcttgtcttagag

SEQ ID NO: 81686 - DNA, 2104 bp, Zea Mays
ctgttctccaaccccacggcggccccggaccgcacccaatgtacgaacacctccccgcgttcccgatcgcgccggccgccgtcggcgactgccgcggcatccccttcgacccttcctttctcccgcgcctcctcctctccgccacctcctgcacctcccccttcctcgccgagcgcgcagtctccgccctccacgcgaccggtctcaagctcggcgcgctcccctcctccctcccggcctcgaacgccctcatctccgcctactcccaagcggacctcctcccctccgccctccgcgtcttctccctcctcagccacccctccaccgcctcctacaccaccgtcctctccgcgctctcccgccacggccgtccccacgaggcgatctccctcttcgccacctccgcgtccgcggtcgcccccgacgccgagctcctctcctgcctcgtctcatgctgccgccgcgcgtccgccttactccccgcgcgcgcggcgcacgcctacgggatcaagaacgtggcggcgctggccttctacgcctcggcaggtccggcgctggtcgccttgtacgcgagccgcgggaaggtcggtgcggctaggagggtgtttggctacatggacggcttggacgtggtgtcctggaacgccatgatcggcgggttcgctagtgccgggatggacgaggagtcgtgggcctgcttccgggagatgcactcgagaggtgttcgagggaatgcccgcacagctgtggtggtgctgggatcttgtgacatggagtccggcaggcaggtccatgggactatagtgagtagtcatggtggttcttcaaacgccattttgtggaacgcgttgatgagcatgtattcgcgtgccggctgtgtcactgatgcagagagggtgttcctggagattgtaaagaaggatgttgtgtcatggaatgtgatgatcggagcgtttgcgaagaatggatatggagaaagggcccttgaatttgtggacatggtgttgcagtgtggtatgaagccagactctgtgacattcacggccgttctcatggcatgctgccattgtggcttggttgatgaagggcttgtactattccagcgctttgtgtcagttgttgggctcgttccaactatggagcagtgtgcttgcattgtggacttgcttgcacgtgctgggaggtttctggaggccttggaatttatcggccagatgtcagtgagaccaaatacagttgtctggggtgctttgctgtctgcaagtaagatgcatcacaacgtggaatttgcaaagattgcatttgaacaactggttcaggtggagcctgagaatgctgggaattttgtgacaatgtcaaacatatatgcaaaggctgggatggtagaagatgcaaagagagtgaggatgatgattgatagtgtagagttagcgaaaccttctggaaaaagctgcgtggaaattttgtagtaaagcataagactccatggacttgtcagggtttcacatcttcaaagaggaaaggattgcaacagggcaaaccaaatcatgcgattagtgatatgaagagacttgaagtgcctgcatgttttgatgcaaccaggaagctgactgaagataaatatcagcaaatgttaccacaagagatataataaaacttatccagtaacatatactgatctccttattatttcacatgaaatggtggcaaaataaaacgtatccaggatgaggatggagtcaattcaaaactgctgctgttccctgcatgcataactcatctcccagcacccatccggtagaagtactggcgacaacaaaagattgatatggagaaagggctccttgaacttgtagccaatggtttgtgacttataaagacaattatgcatcatggacaaaattttatctagttcttagttttgatcattcctgaatgttcttgtttctaatgagagctatctcactgagtcaccaggtcgtgacttcaaagcaatctctccatatttgcgagggaagacttttttgcctcattctctagacctcactcatgttggagcctccgacattgggtctgtcctgcctcgaatgttcttgtcttagag

SEQ ID NO: 81687 - DNA, 1938 bp, Zea Mays
acaaatagggttttatcattttgggaaggagcagatcaggatccattaacacccctacgtacgcctttcctctggaaacccttctctcgcctgcctctcccccgccgcgccgccacttcccctctcccgtcaactccggcttccgcgcgaggtcgagctagcgtttggagttctcgagacctgctgtgatggcgacagagcaagcggcggagaactacacggtggaggacctcgtggccctgaacccctacaaccccgacatcctcaacgacctcgagaagttcgtcaatgagcaggtctcatctcagacatataacttggatgcaaatctcagccttcttcgcttgtaccagtttgagccagaaaggatgagcatacagattgtggcccacatactgattaaggctctcatggcaatgccagcccctgacttcagtttgtgcttattcttaatccctgaacatgtggtactaaaaattacatcctgcccttttagttgagttgtatcagatttgctgtgtagacctggaatacacagtatttaattatggctcatgctcggtgaacgtgcacaatatccaataattatagatatttggtaaacaagcccccacacccatgtttcaatgtgatttgaaattttgcacgaaacagactagccttgcaaatgccacagattcagagattccataaaagagctgtcccgttatctttacattttttggctacattattttgttggtatgttcagtttgcttgtctgtctctttgtttcagcaaatggaggagcaattcaaggtattgatagttctttctcactacctagagactgctaggttcagtcaattttgggatgaagcagcaaagaaccgccacatatcggaagcagtgccaggtaaatatatttgttgagccatcgagtttgagatatgcatagtctgttacattttataatgtgagcttgtcgcaccaatcttagtcttaatagcaaaaacaattcttatgagtgttaaagttctaatgttcacgctggatttctagtagaaatttgaaatgatgttccacgttctagtcgtcaggccttagttgagtgcaagtgctttttgtcatcagcgttgactgaagtgttacattgtgtattcaggccgaagtaaattattttgtgtgcctgccttgttctgtcacttggtgtttggtatcttttattctcctataatagcatgaagttttcttttgttaacctcatttacctgggttctttcaatgagatgggaagaacgcctgagcgctagaattttatgtggatttattcagacataatcagcagctggatgatattttaggcctgatgatgtgcattatgacctatgtctttatttgctctgactctgcacattgtgcaggtttcgaacaagcaatccaatcctatgcgattcatgtactttccttgacataccagaaagttccaaggcctattcttgtagaggcaatcaacatcgaaggtctcgcgttggacaagtttcttgagtaccatgccgcgaactcaggttgggtgattgagaagggtgggcagtctcaagtgattgttcttccgcgtaatgagttcaatcacccagagctcaagaagaacacagccgatatccttccgtttgaacacgtaacacgcatattccctgtccttggctgattcaggcgtgctgagagatctatacaaaactcagcgagtgaagcttctcttagtcattgcatcttcagtttgtagtgtaccctattgagattatctcggtataccagtcctttttatgccggagttggtttctgcaacctatggttattgttattactataacgaaatgctcagatatgagattggtcttgtccttcgaaggaggctgtcaggtccattgtttgagaaccataataataaaaatacataac

SEQ ID NO: 81688 - DNA, 1868 bp, Zea Mays
tcttcctctcactatcctttctcgatcttgttccttgcaaccaccgtcggtcgcgccccacgcccgccccaccacccgcccgccgcgcccgcccccacccaccgtgggctttccccgcaccgccgacgcccccatccgccagtcggccgccgcgcccccgcccgccgtgcccctcaccgccccgccccaccgcgcccctcgtcggttggtgctcgtggccatggcggtggcgaaggtcaaatcggtcgccgtctccgttagtcacaagtgtcggaatatcttggccaccggttgggaagcgcacctcaacactgtcaaggctgacaacaagggaagcaagaatgagatttacacgtcgagggtgcactacatgatccataagggcacaccctacttgattgtccccgagaacgacatgcacaacattaacattataatcgatgagcgggggtctcttgcagtattcagtctgattcgtgaccgagttgcgagcttattgaagccatcgaagacacctcctcgtgttggtatgactggtgatgttctgcgcctgaaagactcaaaggtaaacttgttctgcagtcaccctgcatgcataaacatgctccattgcttactattggtagtaaggtgatgccgactaatctttatgtattgtgcttaaggttccaattattgaagatagcctgaagcaaactatgcataatacttcttcctttgagtatccatctgtgttcctataatttaaacaccagtatgctcatgcccacctgcagggtgttgactccaccttctagtgcctccttatccagctctccatgtagacatgtccaatatttctccagtgcctttaaataacctaatgagggcatgtaaacattttgttatacaatgactcatttatgtcctacagatttgttatgcccatatgccagttattggaaaaacctatcatgagcagcaatactgattaaaataataatcaactttgctattttcatgtgttgcaaaataagtagaacatatcattgaacaacatgttgtcatttttttagacatttttaagttgagtatcaacatggctcttgtttaaattattgcgctcttactcaggatgagattgaagctgctcgaatggcagcgatcaacaaggaaattaagcgtgtattgactgaagtcctttcgaaggctgggcaaaaggttcgtgaataaagtgaaaggcggcgagcctgcgacagcaggaacgtgagcaaattgtaatgaagcgtaagcatgaaatgggaattggcgacaaaaattcaagatgaagcaatcaagtttggcagatcttcaagaatatattctacttgcttatatggaggtgctccaaaaggccctcagctaagagagttggagcgtggtgttgacattcttgtcgcaactcctaggagattaaatgacattttggaaatcaatagagtgagcctgcaccaagtatcatatcttgtccttgatgaagctgatcgtatgctcaacaaatatcatttgtacaagtatattagacccctccagctaccttgccgacgcatgaacgagaaaacgggttagactttgtcgaagccctcttcgctagtggaggtaccgaccatcactcgtcactgtaacccgatggtgatcggcgatcgtgagcttccatgttattgtgttctgatacttgagacttttattatgactatgtataagatattgtctcttattagtactggatgagatgtgtcttattatgactatggatgagacttttgtgatgtaattgatgagactatggatttaaatattgttatgtgattgtgtgtgagatgttttatgtgaaatatgttgtgatatat

SEQ ID NO: 81689 - DNA, 1266 bp, Zea Mays
tcttcctctcactatcctttctcgatcttgttccttgcaaccaccgtcggtcgcgccccacgcccgccccaccacccgcccgccgcgcccgcccccacccaccgtgggctttccccgcaccgccgacgcccccatccgccagtcggccgccgcgcccccgcccgccgtgcccctcaccgccccgccccaccgcgcccctcgtcggttggtgctcgtggccatggcggtggcgaaggtcaaatcggtcgccgtctccgttagtcacaagtgtcggaatatcttggccaccggttgggaagcgcacctcaacactgtcaaggctgacaacaagggaagcaagaatgagatttacacgtcgagggtgcactacatgatccataagggcacaccctacttgattgtccccgagaacgacatgcacaacattaacattataatcgatgagcgggggtctcttgcagtattcagtctgattcgtgaccgagttgcgagcttattgaagccatcgaaggatgagattgaagctgctcgaatggcagcgatcaacaaggaaattaagcgtgtattgactgaagtcctttcgaaggctgggcaaaaggttcgtgaataaagtgaaaggcggcgagcctgcgacagcaggaacgtgagcaaattgtaatgaagcgtaagcatgaaatgggaattggcgacaaaaattcaagatgaagcaatcaagtttggcagatcttcaagaatatattctacttgcttatatggaggtgctccaaaaggccctcagctaagagagttggagcgtggtgttgacattcttgtcgcaactcctaggagattaaatgacattttggaaatcaatagagtgagcctgcaccaagtatcatatcttgtccttgatgaagctgatcgtatgctcaacaaatatcatttgtacaagtatattagacccctccagctaccttgccgacgcatgaacgagaaaacgggttagactttgtcgaagccctcttcgctagtggaggtaccgaccatcactcgtcactgtaacccgatggtgatcggcgatcgtgagcttccatgttattgtgttctgatacttgagacttttattatgactatgtataagatattgtctcttattagtactggatgagatgtgtcttattatgactatggatgagacttttgtgatgtaattgatgagactatggatttaaatattgttatgtgattgtgtgtgagatgttttatgtgaaatatgttgtgatatat

SEQ ID NO: 81690 - DNA, 978 bp, Zea Mays
cgggtaacagaaggacaagcctccacgtcgatagaagcaaatcaatccatttcgtttgacaagcattttggattttccagtctcaaagcattccaaaaggaagtcttggatgcttggtttgctcacggggattgtgttctcctagcagccacaaggttttctataatgctcctctttatcttctgtaatttattacaactgctgatgtgactttgctttttatatgggctgtaagtttcagtaatattttttcataacttctatcattattgaatacttatattttgtatccttttttcgctgaaccttcttgccttatgtttgaacatgcaacattttgattggggtagaaggtaccaaaggaaatgagcaaaacatatcatacagtctcagatgctgcaggatcacatgaaaattattgaagacgacggtccaggtgcagccttctatgccagtgctaaggccttgactaatggaaatcacactttctatgtgagcaaactgatacagaggttggctagattaagtaaatatgatacaatgtatcacctgcacagggacctgtcaagcaacaacctcaatggataaggtatattaaatagtaatgctccttccatttcataatgtcattacttcttcagcatcatgggagaaaatcttactgtcagggttcagaggatgttgtacgtaacttttaatgaagagctttgctggtgttgcgacaaagatacatgccaagagcagtatggtcggaggtgaagcagtgagtaacatctgcgctatagtggcattcaacgttcaaagcaagaaatgtatttggtttaattattgcaagcagtgatctgaaatatgtaaattatctttatatggtctttgcaagggaacacattttctggctctataccatcagtgattagcctatacaaattttattgaaagaaaaactaaaggaatgttttttattgctcttgcatctag

SEQ ID NO: 81691 - DNA, 1697 bp, Zea Mays
atggatcagataggatacaatgttggtcgcacaccattcacagacatctcaaacaccatcattacaggtaatcaaaatgaatcgaactcgcttggaccaattgtcgatgctaaggaatgtaagaggcaaagggatagggaaagatatgctatgactgttgaagaaaagaatgagaaaaataggcagcgtcgtgaagcacgtcaacgaaataaaggactatcgatagagccactctcatccagagccttttgtaaatgggtgatatatgaagaagacgttaatacggaccaggcatgtgaggtggttagctttccagatgactgtagcaccattgatttcacaaatttgtcaacacaagacattgcaggtggagacgaacaagtaaatctggatgcatacgatgacaatgattggttgcataggaatgagacattccaggcaaacaacattgtcacaagtaaagaccttctgacaccagcagaagattatctgtgttcagccaaatggacataattagtgctgttttgcaaaagcattttggattttccagtctcaaagcattccaaaaggaagtcttggatgcttggtttgctcacggggattgtgttctcctagcagccacaaggttttctataatgctcctctttatcttctgtaatttattacaactgctgatgtgactttgctttttatatgggctgtaagtttcagtaatattttttcataacttctatcattattgaatacttatattttgtatccttttttcgctgaaccttcttgccttatgtttgaacatgcaacattttgattggggtagaaggtaccaaaggaaatgagcaaaacatatcatacagtctcagatgctgcaggatcacatgaaaattattgaagacgacggtccaggtgcagccttctatgccagtgctaaggccttgactaatggaaatcacactttctatgtgagcaaactgatacagaggttggctagattaagtaaatatgatacaatgtatcacctgcacaggtaatggtgaaatccaaaatctgggagagccgacttctattttctgcatgctggatataccataccttttccacctatatatacttcaaaacttgttttttagtgtttcattttgtttttgtgattccaagggatctgtctcacaacaatctaaatggaccaataccagatttctatgtcaaatgccatcacttacatttctatataagcttttttgctgatcgacctacatactttaatattgctcaaaactcctctttttatgtttacttcctcttattttgtagggacctgtcaagcaacaacctcaatggataagcattacttcttcagcatcatgggagaaaatcttactgtcagggttcagaggatgttgtacgtaacttttaatgaagagctttgctggtgttgcgacaaagatacatgccaagagcagtatggtcggaggtgaagcagtgagtaacatctgcgctatagtggcattcaacgttcaaagcaagaaatgtatttggtttaattattgcaagcagtgatctgaaatatgtaaattatctttatatggtctttgcaagggaacacattttctggctctataccatcagtgattagcctatacaaattttattgaaagaaaaactaaaggaatgttttttattgctcttgcatctag

SEQ ID NO: 81692 - DNA, 2114 bp, Zea Mays
gttcctggcttgggccgaacaaccccgtattgggctaccgctgcagcggttcattttcaccacgcgtgcgctctctctgtctgcgacgactgggctacgccgccgccgccgtcctccgtctggtgccgaggtcttcgttggacccttcgcccgcgactagcgtccgccaggctgaaggcgatggcgacggagaggaggcgcgcgtcagtcgtggtactgggcgacatcggccgcagcccgcggatgcaataccactccctctcgctcgctaaccaggccagtatggaagtggacattgttgcaaatggaggaagtgatcctcacttgtcactgagagagaatccatcaattcacatccacgagatgaaaacagtgcagttaactggaatttcaaagatatctggtgctctgtcacttctacttaaagctgctgtccagttcattttgctggtttggtttctttgttttaagattcctcgccctgatgtcttttttgttcagaatccaccctctgttccaacactggctgctgtaaaactggcaagctggctgagaggtgctaaatttattgttgattggcataactttggatatacattgctggggttgtcgcatggcagaagtcacattattgtcaaaatctatttctggtttgagaagtactttgggcagatggctgatggtgccttttgtgttacaaaagcaatgcagcatgagcttgctcaaaattggggaatcagggcgacagttctttatgatcaatctcctgatttttttcaccctgcttcattgatggagaaacatggggctagggaattccatgtgtagtgctatgggcaatgctgattgcatatcagtggaggaagtaggggaagacatgaacactactgcctttaccagtaagattgatggccaagttttcttgaagcctaacaggccagcacttgttgtgagcagcacaagctggacgccagatgaagatttcagcatacttttggaagcagcactaatgtacgacagacgcgtcgctgcagctttaggtgaagatgattcaatggatgaggggcaactttggattgatatcaagaacgggaagcagtttgtctacccaagattactgttcattattacaggtaaaggacctgataggaagaaatatgaggatcaaataaaaaggttgaagttgagacgtgttgccttgcggacaatgtggcttgcatcagaggactaccctttattgctcgggtcagctgatctaggagtgtcgttgcatacatcttcgtcagggctggacctaccaatgaaggtggttgatatgtttggatgcggattgcctgtttgtgctgcttcattctcctgcattgaggagcttgtaaaagtaaacaaaaatggtcttcttttctcaacatcttcggagcttgctgatgaacttatgatgctctttaaggggtttccagaagaatgcaatgccttgaaatccctcaaagaaggtgccatgaagtcagcatcatcttcgaaatggtcaacagaatgggaaaccaatgcactacctttggtggaccaggtcattggatgagatgtgtgcttacatacatcagatagaattgttgtattgcagagaaccagagatcggtgtactagagagaccagatgtacattaaagggtacggtttgctttcaccaaaaatcaattgctagttgctgccagtgccatgtgcaccacttcagcaaaacttgggcaagtttgtagctacgaagctctttcctttttaggctgggaaacatactctgctgaacacatgtctaagttgtttcaggatgtatactactgtaggccagcactttgtttgataatatggtctgtattggaatacctctaatctgttacgtcagaaggaaaacatagaaaaccatattgttttccctggcttcgaaggccatctgataagatcctatgcagagaggcgtgtaccaaacagaagtgtacaaggaatcaggatctctagcacgatgtctggagaatgaaaaggatatgtcagatgcatggtcctatcttatgtttacacactgctacaaatacactctgaatcagttctgatccatttgacctcttc

SEQ ID NO: 81693 - DNA, 1818 bp, Zea Mays
gttcctggcttgggccgaacaaccccgtattgggctaccgctgcagcggttcattttcaccacgcgtgcgctctctctgtctgcgacgactgggctacgccgccgccgccgtcctccgtctggtgccgaggtcttcgttggacccttcgcccgcgactagcgtccgccaggctgaaggcgatggcgacggagaggaggcgcgcgtcagtcgtggtactgggcgacatcggccgcagcccgcggatgcaataccactccctctcgctcgctaaccaggccagtatggaagtggacattgttgcaaatggaggaagtgatcctcacttgtcactgagagagaatccatcaattcacatccacgagatgaaaacagtgcagttaactggaatttcaaagatatctggtgctctgtcacttctacttaaagctgctgtccagttcattttgctggtttggtttctttgttttaagattcctcgccctgatgtcttttttgttcagaatccaccctctgttccaacactggctgctgtaaaactggcaagctggctgagaggtgctaaatttattgttgattggcataactttggatatacattgctggggttgtcgcatggcagaagtcacattattgtcaaaatctatttctggtttgagaagtactttgggcagatggctgatggtgccttttgtgttacaaaagcaatgcagcatgagcttgctcaaaattggggaatcagggcgacagttctttatgatcaatctcctgatttttttcaccctgcttcattgatggagaaacatggggctagggaattccatgtgtagtgctatgggcaatgctgattgcatatcagtggaggaagtaggggaagacatgaacactactgcctttaccagtaagattgatggccaagttttcttgaagcctaacaggccagcacttgttgtgagcagcacaagctggacgccagatgaagatttcagcatacttttggaagcagcactaatgtacgacagacgcgtcgctgcagctttaggtgaagatgattcaatggatgaggggcaactttggattgatatcaagaacgggaagcagtttgtctacccaagattactgttcattattacaggtaaaggacctgataggaagaaatatgaggatcaaataaaaaggttgaagttgagacgtgttgccttgcggacaatgtggcttgcatcagaggactaccctttattgctcgggtcagctgatctaggagtgtcgttgcatacatcttcgtcagggctggacctaccaatgaaggtggttgatatgtttggatgcggattgcctgtttgtgctgcttcattctcctgcattgaggagcttgtaaaagtaaacaaaaatggtcttcttttctcaacatcttcggagcttgctgatgaacttatgatgctctttaaggggtttccagaagaatgcaatgccttgaaatccctcaaagaaggtgccatgaagtcagcatcatcttcgaaatggtcaacagaatgggaaaccaatgcactacctttggtggaccaggtcattggatgagatgtgtgcttacatacatcagatagaattgttgtattgcagagaaccagagatcggtgtactagagagaccagatgtacattaaaggagaggcgtgtaccaaacagaagtgtacaaggaatcaggatctctagcacgatgtctggagaatgaaaaggatatgtcagatgcatggtcctatcttatgtttacacactgctacaaatacactctgaatcagttctgatccatttgacctcttc

SEQ ID NO: 81694 - DNA, 2119 bp, Zea Mays
gttcctggcttgggccgaacaaccccgtattgggctaccgctgcagcggttcattttcaccacgcgtgcgctctctctgtctgcgacgactgggctacgccgccgccgccgtcctccgtctggtgccgaggtcttcgttggacccttcgcccgcgactagcgtccgccaggctgaaggcgatggcgacggagaggaggcgcgcgtcagtcgtggtactgggcgacatcggccgcagcccgcggatgcaataccactccctctcgctcgctaaccaggccagtatggaagtggacattgttgcaaatggaggaagtgatcctcacttgtcactgagagagaatccatcaattcacatccacgagatgaaaacagtgcagttaactggaatttcaaagatatctggtgctctgtcacttctacttaaagctgctgtccagttcattttgctggtttggtttctttgttttaagattcctcgccctgatgtcttttttgttcagaatccaccctctgttccaacactggctgctgtaaaactggcaagctggctgagaggtgctaaatttattgttgattggcataactttggatatacattgctggggttgtcgcatggcagaagtcacattattgtcaaaatctatttctggtttgagaagtactttgggcagatggctgatggtgccttttgtgttacaaaagcaatgcagcatgagcttgctcaaaattggggaatcagggcgacagttctttatgatcaatctcctgatttttttcaccctgcttcattgatggagaaacatgggttgtttagcaggctagggaattccatgtgtagtgctatgggcaatgctgattgcatatcagtggaggaagtaggggaagacatgaacactactgcctttaccagtaagattgatggccaagttttcttgaagcctaacaggccagcacttgttgtgagcagcacaagctggacgccagatgaagatttcagcatacttttggaagcagcactaatgtacgacagacgcgtcgctgcagctttaggtgaagatgattcaatggatgaggggcaactttggattgatatcaagaacgggaagcagtttgtctacccaagattactgttcattattacaggacctgataggaagaaatatgaggatcaaataaaaaggttgaagttgagacgtgttgccttgcggacaatgtggcttgcatcagaggactaccctttattgctcgggtcagctgatctaggagtgtcgttgcatacatcttcgtcagggctggacctaccaatgaaggtggttgatatgtttggatgcggattgcctgtttgtgctgcttcattctcctgcattgaggagcttgtaaaagtaaacaaaaatggtcttcttttctcaacatcttcggagcttgctgatgaacttatgatgctctttaaggggtttccagaagaatgcaatgccttgaaatccctcaaagaaggtgccatgaagtcagcatcatcttcgaaatggtcaacagaatgggaaaccaatgcactacctttggtggaccaggtcattggatgagatgtgtgcttacatacatcagatagaattgttgtattgcagagaaccagagatcggtgtactagagagaccagatgtacattaaagggtacggtttgctttcaccaaaaatcaattgctagttgctgccagtgccatgtgcaccacttcagcaaaacttgggcaagtttgtagctacgaagctctttcctttttaggctgggaaacatactctgctgaacacatgtctaagttgtttcaggatgtatactactgtaggccagcactttgtttgataatatggtctgtattggaatacctctaatctgttacgtcagaaggaaaacatagaaaaccatattgttttccctggcttcgaaggccatctgataagatcctatgcagagaggcgtgtaccaaacagaagtgtacaaggaatcaggatctctagcacgatgtctggagaatgaaaaggatatgtcagatgcatggtcctatcttatgtttacacactgctacaaatacactctgaatcagttctgatccatttgacctcttc

SEQ ID NO: 81695 - DNA, 2124 bp, Zea Mays
gttcctggcttgggccgaacaaccccgtattgggctaccgctgcagcggttcattttcaccacgcgtgcgctctctctgtctgcgacgactgggctacgccgccgccgccgtcctccgtctggtgccgaggtcttcgttggacccttcgcccgcgactagcgtccgccaggtgccaggctgaaggcgatggcgacggagaggaggcgcgcgtcagtcgtggtactgggcgacatcggccgcagcccgcggatgcaataccactccctctcgctcgctaaccaggccagtatggaagtggacattgttgcaaatggaggaagtgatcctcacttgtcactgagagagaatccatcaattcacatccacgagatgaaaacagtgcagttaactggaatttcaaagatatctggtgctctgtcacttctacttaaagctgctgtccagttcattttgctggtttggtttctttgttttaagattcctcgccctgatgtcttttttgttcagaatccaccctctgttccaacactggctgctgtaaaactggcaagctggctgagaggtgctaaatttattgttgattggcataactttggatatacattgctggggttgtcgcatggcagaagtcacattattgtcaaaatctatttctggtttgagaagtactttgggcagatggctgatggtgccttttgtgttacaaaagcaatgcagcatgagcttgctcaaaattggggaatcagggcgacagttctttatgatcaatctcctgatttttttcaccctgcttcattgatggagaaacatgggcaggctagggaattccatgtgtagtgctatgggcaatgctgattgcatatcagtggaggaagtaggggaagacatgaacactactgcctttaccagtaagattgatggccaagttttcttgaagcctaacaggccagcacttgttgtgagcagcacaagctggacgccagatgaagatttcagcatacttttggaagcagcactaatgtacgacagacgcgtcgctgcagctttaggtgaagatgattcaatggatgaggggcaactttggattgatatcaagaacgggaagcagtttgtctacccaagattactgttcattattacaggtaaaggacctgataggaagaaatatgaggatcaaataaaaaggttgaagttgagacgtgttgccttgcggacaatgtggcttgcatcagaggactaccctttattgctcgggtcagctgatctaggagtgtcgttgcatacatcttcgtcagggctggacctaccaatgaaggtggttgatatgtttggatgcggattgcctgtttgtgctgcttcattctcctgcattgaggagcttgtaaaagtaaacaaaaatggtcttcttttctcaacatcttcggagcttgctgatgaacttatgatgctctttaaggggtttccagaagaatgcaatgccttgaaatccctcaaagaaggtgccatgaagtcagcatcatcttcgaaatggtcaacagaatgggaaaccaatgcactacctttggtggaccaggtcattggatgagatgtgtgcttacatacatcagatagaattgttgtattgcagagaaccagagatcggtgtactagagagaccagatgtacattaaagggtacggtttgctttcaccaaaaatcaattgctagttgctgccagtgccatgtgcaccacttcagcaaaacttgggcaagtttgtagctacgaagctctttcctttttaggctgggaaacatactctgctgaacacatgtctaagttgtttcaggatgtatactactgtaggccagcactttgtttgataatatggtctgtattggaatacctctaatctgttacgtcagaaggaaaacatagaaaaccatattgttttccctggcttcgaaggccatctgataagatcctatgcagagaggcgtgtaccaaacagaagtgtacaaggaatcaggatctctagcacgatgtctggagaatgaaaaggatatgtcagatgcatggtcctatcttatgtttacacactgctacaaatacactctgaatcagttctgatccatttgacctcttc

SEQ ID NO: 81696 - DNA, 2126 bp, Zea Mays
gttcctggcttgggccgaacaaccccgtattgggctaccgctgcagcggttcattttcaccacgcgtgcgctctctctgtctgcgacgactgggctacgccgccgccgccgtcctccgtctggtgccgaggtcttcgttggacccttcgcccgcgactagcgtccgccaggtgccaggctgaaggcgatggcgacggagaggaggcgcgcgtcagtcgtggtactgggcgacatcggccgcagcccgcggatgcaataccactccctctcgctcgctaaccaggccagtatggaagtggacattgttgcaaatggaggaagtgatcctcacttgtcactgagagagaatccatcaattcacatccacgagatgaaaacagtgcagttaactggaatttcaaagatatctggtgctctgtcacttctacttaaagctgctgtccagttcattttgctggtttggtttctttgttttaagattcctcgccctgatgtcttttttgttcagaatccaccctctgttccaacactggctgctgtaaaactggcaagctggctgagaggtgctaaatttattgttgattggcataactttggatatacattgctggggttgtcgcatggcagaagtcacattattgtcaaaatctatttctggtttgagaagtactttgggcagatggctgatggtgccttttgtgttacaaaagcaatgcagcatgagcttgctcaaaattggggaatcagggcgacagttctttatgatcaatctcctgatttttttcaccctgcttcattgatggagaaacatgggttgtttagcaggctagggaattccatgtgtagtgctatgggcaatgctgattgcatatcagtggaggaagtaggggaagacatgaacactactgcctttaccagtaagattgatggccaagttttcttgaagcctaacaggccagcacttgttgtgagcagcacaagctggacgccagatgaagatttcagcatacttttggaagcagcactaatgtacgacagacgcgtcgctgcagctttaggtgaagatgattcaatggatgaggggcaactttggattgatatcaagaacgggaagcagtttgtctacccaagattactgttcattattacaggacctgataggaagaaatatgaggatcaaataaaaaggttgaagttgagacgtgttgccttgcggacaatgtggcttgcatcagaggactaccctttattgctcgggtcagctgatctaggagtgtcgttgcatacatcttcgtcagggctggacctaccaatgaaggtggttgatatgtttggatgcggattgcctgtttgtgctgcttcattctcctgcattgaggagcttgtaaaagtaaacaaaaatggtcttcttttctcaacatcttcggagcttgctgatgaacttatgatgctctttaaggggtttccagaagaatgcaatgccttgaaatccctcaaagaaggtgccatgaagtcagcatcatcttcgaaatggtcaacagaatgggaaaccaatgcactacctttggtggaccaggtcattggatgagatgtgtgcttacatacatcagatagaattgttgtattgcagagaaccagagatcggtgtactagagagaccagatgtacattaaagggtacggtttgctttcaccaaaaatcaattgctagttgctgccagtgccatgtgcaccacttcagcaaaacttgggcaagtttgtagctacgaagctctttcctttttaggctgggaaacatactctgctgaacacatgtctaagttgtttcaggatgtatactactgtaggccagcactttgtttgataatatggtctgtattggaatacctctaatctgttacgtcagaaggaaaacatagaaaaccatattgttttccctggcttcgaaggccatctgataagatcctatgcagagaggcgtgtaccaaacagaagtgtacaaggaatcaggatctctagcacgatgtctggagaatgaaaaggatatgtcagatgcatggtcctatcttatgtttacacactgctacaaatacactctgaatcagttctgatccatttgacctcttc

SEQ ID NO: 81697 - DNA, 2121 bp, Zea Mays
gttcctggcttgggccgaacaaccccgtattgggctaccgctgcagcggttcattttcaccacgcgtgcgctctctctgtctgcgacgactgggctacgccgccgccgccgtcctccgtctggtgccgaggtcttcgttggacccttcgcccgcgactagcgtccgccaggtgccaggctgaaggcgatggcgacggagaggaggcgcgcgtcagtcgtggtactgggcgacatcggccgcagcccgcggatgcaataccactccctctcgctcgctaaccaggccagtatggaagtggacattgttgcaaatggaggaagtgatcctcacttgtcactgagagagaatccatcaattcacatccacgagatgaaaacagtgcagttaactggaatttcaaagatatctggtgctctgtcacttctacttaaagctgctgtccagttcattttgctggtttggtttctttgttttaagattcctcgccctgatgtcttttttgttcagaatccaccctctgttccaacactggctgctgtaaaactggcaagctggctgagaggtgctaaatttattgttgattggcataactttggatatacattgctggggttgtcgcatggcagaagtcacattattgtcaaaatctatttctggtttgagaagtactttgggcagatggctgatggtgccttttgtgttacaaaagcaatgcagcatgagcttgctcaaaattggggaatcagggcgacagttctttatgatcaatctcctgatttttttcaccctgcttcattgatggagaaacatggggctagggaattccatgtgtagtgctatgggcaatgctgattgcatatcagtggaggaagtaggggaagacatgaacactactgcctttaccagtaagattgatggccaagttttcttgaagcctaacaggccagcacttgttgtgagcagcacaagctggacgccagatgaagatttcagcatacttttggaagcagcactaatgtacgacagacgcgtcgctgcagctttaggtgaagatgattcaatggatgaggggcaactttggattgatatcaagaacgggaagcagtttgtctacccaagattactgttcattattacaggtaaaggacctgataggaagaaatatgaggatcaaataaaaaggttgaagttgagacgtgttgccttgcggacaatgtggcttgcatcagaggactaccctttattgctcgggtcagctgatctaggagtgtcgttgcatacatcttcgtcagggctggacctaccaatgaaggtggttgatatgtttggatgcggattgcctgtttgtgctgcttcattctcctgcattgaggagcttgtaaaagtaaacaaaaatggtcttcttttctcaacatcttcggagcttgctgatgaacttatgatgctctttaaggggtttccagaagaatgcaatgccttgaaatccctcaaagaaggtgccatgaagtcagcatcatcttcgaaatggtcaacagaatgggaaaccaatgcactacctttggtggaccaggtcattggatgagatgtgtgcttacatacatcagatagaattgttgtattgcagagaaccagagatcggtgtactagagagaccagatgtacattaaagggtacggtttgctttcaccaaaaatcaattgctagttgctgccagtgccatgtgcaccacttcagcaaaacttgggcaagtttgtagctacgaagctctttcctttttaggctgggaaacatactctgctgaacacatgtctaagttgtttcaggatgtatactactgtaggccagcactttgtttgataatatggtctgtattggaatacctctaatctgttacgtcagaaggaaaacatagaaaaccatattgttttccctggcttcgaaggccatctgataagatcctatgcagagaggcgtgtaccaaacagaagtgtacaaggaatcaggatctctagcacgatgtctggagaatgaaaaggatatgtcagatgcatggtcctatcttatgtttacacactgctacaaatacactctgaatcagttctgatccatttgacctcttc

SEQ ID NO: 81698 - DNA, 2097 bp, Zea Mays
gttcctggcttgggccgaacaaccccgtattgggctaccgctgcagcggttcattttcaccacgcgtgcgctctctctgtctgcgacgactgggctacgccgccgccgccgtcctccgtctggtgccgaggtcttcgttggacccttcgcccgcgactagcgtccgccaggtgccaggctgaaggcgatggcgacggagaggaggcgcgcgtcagtcgtggtactgggcgacatcggccgcagcccgcggatgcaataccactccctctcgctcgctaaccaggccagtatggaagtggacattgttgcaaatggaggaagtgatcctcacttgtcactgagagagaatccatcaattcacatccacgagatgaaaacagtgcagttaactggaatttcaaagatatctggtgctctgtcacttctacttaaagctgctgtccagttcattttgctggtttggtttctttgttttaagattcctcgccctgatgtcttttttgttcagaatccaccctctgttccaacactggctgctgtaaaactggcaagctggctgagaggtgctaaatttattgttgattggcataactttggatatacattgctggggttgtcgcatggcagaagtcacattattgtcaaaatctatttctggtttgagaagtactttgggcagatggctgatggtgccttttgtgttacaaaagcaatgcagcatgagcttgctcaaaattggggaatcagggcgacagttctttatgatcaatctcctgatttttttcaccctgcttcattgatggagaaacatgggttgtttagcaggctagggaattccatgtgtagtgctatgggcaatgctgattgcatatcagtggaggaagtaggggaagacatgaacactactgcctttaccagtaagattgatggccaagttttcttgaagcctaacaggccagcacttgttgtgagcagcacaagctggacgccagatgaagatttcagcatacttttggaagcagcactaatgtacgacagacgcgtcgctgcagctttaggtgaagatgattcaatggatgaggggcaactttggattgatatcaagaacgggaagcagtaaaggacctgataggaagaaatatgaggatcaaataaaaaggttgaagttgagacgtgttgccttgcggacaatgtggcttgcatcagaggactaccctttattgctcgggtcagctgatctaggagtgtcgttgcatacatcttcgtcagggctggacctaccaatgaaggtggttgatatgtttggatgcggattgcctgtttgtgctgcttcattctcctgcattgaggagcttgtaaaagtaaacaaaaatggtcttcttttctcaacatcttcggagcttgctgatgaacttatgatgctctttaaggggtttccagaagaatgcaatgccttgaaatccctcaaagaaggtgccatgaagtcagcatcatcttcgaaatggtcaacagaatgggaaaccaatgcactacctttggtggaccaggtcattggatgagatgtgtgcttacatacatcagatagaattgttgtattgcagagaaccagagatcggtgtactagagagaccagatgtacattaaagggtacggtttgctttcaccaaaaatcaattgctagttgctgccagtgccatgtgcaccacttcagcaaaacttgggcaagtttgtagctacgaagctctttcctttttaggctgggaaacatactctgctgaacacatgtctaagttgtttcaggatgtatactactgtaggccagcactttgtttgataatatggtctgtattggaatacctctaatctgttacgtcagaaggaaaacatagaaaaccatattgttttccctggcttcgaaggccatctgataagatcctatgcagagaggcgtgtaccaaacagaagtgtacaaggaatcaggatctctagcacgatgtctggagaatgaaaaggatatgtcagatgcatggtcctatcttatgtttacacactgctacaaatacactctgaatcagttctgatccatttgacctcttc

SEQ ID NO: 81699 - DNA, 1360 bp, Zea Mays
tcagtttcatgcaataaataatactatagtgtgtcatatacaattataaactatagtatttcaaaactaccgcatttcaaaattgaattaccaaacttgtccttagtctctcttttaactttactctataaacatttttactgcgaactctacttttcttgcggagtaagaagagtggcggcggcgggccggcggcgtgtataggcgtgttcccgagcagaggcccccccaaacgcgcagcgcacacaaacacacaccagcccagctccgagagatcatccggcggccggcgagatgagccgcggcacgggcgcgggttatgaccgccacatcaccattttctcccctgagggacgcctgtaccaagtcgagtacgcgttcaaggcggtgaagtcggcgggtgtcacgtcgatcggcgtccgcggcgcggactccgtctgcgtcgtcacccagaagaaagtcccggacaagttgctggatcagacgagcgtgacacacttgttcccgatcaccaagtacgtcggattgcttgccactggcctcacagctgatgcaaggtcattggtttcccaagcaaggaacgaagcagctgagtttcgtttcaaatggggctatgagatgccagttgatgtgttagcaaaatggattgctgacaaagctcaagtttacacgcaacatgcatacatgagaccccttggagtagttgctatggtcttgggctacgacgaagagaaaaatgcacaactattcaaatgcgaccctgcgggtcacttctttggacataaggcaactagtgccgggctcaaggagcaggaagcaataaatttttggagaagaaaatgaaggatgacccgaaattctcctatgatgaatactgttcagattgcaatatctgcattgcaatcagttctccaggaagatttcaaggccactgagatcgaagttggtgttgtgagaaaagaagaacgtcttttcagagttctcacaacagaggagattgaccagcacctgacggcaattagtgaacgggactgagctgccatatgttggacatttgatccctccacactgcgccgtgccattgtgcttcagcactgccatttagtttgacatcaaatgaactgagtgtaccatttcatgtctaacactgaaaacaagctcgttgattgaatttggcacagtttggttttgcattgctaactatatttgcagggctgagcgattggtagttcatttcaccaatacgcgtaaccatttttaacggtgtttgttgtgagttgccataagatttagctccacctacccatagttaagattgggagcaagaatagcagcgtttagcatgttggaaatagagtgg

SEQ ID NO: 81700 - DNA, 1100 bp, Zea Mays
gcggcggcgggccggcggcgtgtataggcgtgttcccgagcagaggcccccccaaacgcgcagcgcacacaaacacacaccagcccagctccgagagatcatccggcggccggcgagatgagccgcggcacgggcgcgggttatgaccgccacatcaccattttctcccctgagggacgcctgtaccaagtcgagtacgcgttcaaggcggtgaagtcggcgggtgtcacgtcgatcggcgtccgcggcgcggactccgtctgcgtcgtcacccagaagaaagtcccggacaagttgctggatcagacgagcgtgacacacttgttcccgatcaccaagtacgtcggattgcttgccactggcctcacagctgatgcaaggtcattggtttcccaagcaaggaacgaagcagctgagtttcgtttcaaatggggctatgagatgccagttgatgtgttagcaaaatggattgctgacaaagctcaagtttacacgcaacatgcatacatgagaccccttggagtaggcaactagtgccgggctcaaggagcaggaagcaataaatttttggagaagaaaatgaaggatgacccgaaattctcctatgatgaatactgttcagattgcaatatctgcattgcaatcagttctccaggaagatttcaaggccactgagatcgaagttggtgttgtgagaaaagaagaacgtcttttcagagttctcacaacagaggagattgaccagcacctgacggcaattagtgaacgggactgagctgccatatgttggacatttgatccctccacactgcgccgtgccattgtgcttcagcactgccatttagtttgacatcaaatgaactgagtgtaccatttcatgtctaacactgaaaacaagctcgttgattgaatttggcacagtttggttttgcattgctaactatatttgcagggctgagcgattggtagttcatttcaccaatacgcgtaaccatttttaacggtgtttgttgtgagttgccataagatttagctccacctacccatagttaagattgggagcaagaatagcagcgtttagcatgttggaaatagagtgg

SEQ ID NO: 81701 - DNA, 417 bp, Zea Mays
taaatttaacaccaaaccaaacaaagccttaaatcaattagtgcaaaaagtacaactaagacacaagggtttagggagaggtagaaggattgttctaaaaaatggcatttttaaaaaggtactgcgggagcgctgcgcaaacaacgacgagaatgcaccactggccaaaaagaggcaacagccaacagacaagaaggttatacatatgtcacgttattatgataaaacctgatgttacagcagccgcctctggggcggatgcctataagggcaatacatgcgtttgctcgtcaagaaagaggcagccaaacaccgagttgaaaaaatcacggcctctgatggtatcctggcttcctaccagagcttgcgtgtcatacttgcatgccctcccgcagtctggacagtatgtcacctcta

SEQ ID NO: 81702 - DNA, 1095 bp, Zea Mays
aaagaattagccacaaacctgtcttctttctcgccaccgaagcttaccgggaaactgttggttcctgttgtcgcggctcacgtctagggtttggcgaaccctaggccacgggtcgtgacatgacgcgcttccatgcctcgcgacgggtgcccgcatggccgtcgccggcaccagctacgaagggttcgttgcctatgccctagcgcgcggcggggcctggcaggatcggctccatggtgatatccaactccggcctgctcaagacggccgacgacgacagggcgtcgctcaagcgcgtcggtgctgggttcacacgcacggccgacctgctcatgccgttggacacacgcggcacgcggcggcttatggagccgtccttctaccagagaaagaccatcatcgtgctgccagacatcgtgattggatgggctgtgctggtaacactcagcaaccggggttctactttgagaggagaagattgaattggtgaaggcaatcactatcggcattgctagattacttagaagagcatcgtgatctctcgttagtggaatggaattttagggagattcttcagaacaacatagcaaatatcttgggtcttcagaaattatactggaaacagcgtgcgaccattaaatgggtaacctcaggggatttatgtaccaaagtctttcatgctcatgctacaattaagcacagaaagaatataattgtttcccttacagatgactcaggggaattccattcagaacatgagcaaaaggttaagcttctctagcaagcttataataaccggttaggtacttcggagttcaagcaaatattctttgacctacagtacttattggtgagccatgacaatctagaagggatgaatggcctttttcattaaacagatatgcatgcctcaactagtccacataaatcaatatggattcatcaaagggagaataattcaagactgtttagcttgggcctttgagtattttcacctttgtcactcttcaaaaaaaaaaagaacttatcgtcatgaagttgaactttgaaaaggcttttgataagttagaacatgagattattattcaggttttg

SEQ ID NO: 81703 - DNA, 839 bp, Zea Mays
cctcacccccggccgtggacacgtcgccaccttgccgcgcgacatcgccttgcgaatgtccacgccacgacgtagcttgcttcgcccgcgcgccgacctagcagagttacagtgcctctctgcgcccaccacgttgtgcgttctgcgttgcgtgagcgtcttgccacagcttgcgtcgccagtgccgcagccacgacgatggtcgcgtctcgcccagagttatgaaaaaggcctgattttcaatcgcttctttgtaagatgctagatgcagtgtcttggttagcttcactgcatggcatctttcactacccagtggattcttttcgagagccaatacctgcaatgccttctcaaacaccactgatgatactgaaccactctcacagtttgaatgtccgcttaaggtttctaatgactcaggataacacttgcttttacagtgtcgctgctgaactgtgccaacagaatccatacaatttgttcggccagaatggtcttgcaaggtcgtaattgtgcctctatttgatggcattcttggagcctcgatccccaaacacatttggtttggagccatcatatctttgttctgaattggcctgttgggatgtggcctgtctcctcccactcccagtgtaagtaacaattttgtttgcttaagacattcacgtccgactctcatctgttgaaacatagtataacttaaacctaacacttttttttacgttaacatgaaatcttcctataattcatatgtcgtcatgacatgcatgccacttcgtttgcttgctcaatagcttctaatctaagcgctaggaggatgtacgatagatcaattggtt

SEQ ID NO: 81704 - DNA, 346 bp, Zea Mays
tagaaaatttgactccttgaaacgagatgtgcatttggtttaggatgtagtagttggcaagagtgatggtgtgaggctttcattaatcattggttaatgggaagagagaccagttggtttgttcatgattctctgtgacatactttatgaacaaaacatactgcaaccaagatctagtgacaaatctaatgaacaaatcaaacggagatttttatctcataccgcgacaagacagatatacttctctctatgttgtgtgttgcatctcttctttaatgcatggaattcctgcaatgagatgacagactctcatacctttgatgcaaactttcttttaaagctttca

SEQ ID NO: 81705 - DNA, 2489 bp, Zea Mays
ccattaacgagacaccccataaacctcccactgccacggcccagcccacaagtccaagacttcgccagatatttcggcctcgaagcagctaaataccacaccaggtgcggcttaaacccttatcgccaccagtggccgcgtcctcttcatttccgccatccgtatcgtctccctagggtttggcactttggccgccgccatggcgtcggcgtcgcgtgcgctcctcctctcccgtgcgctccaggccggcgcgtctcgccgcgtccccgccctcctgcgcccggtcgctgcggccgcgagcctcctcccagcggtggcggggccggcaggggccgccctcggcgctagggtgcggtgcttcgcgacccagccggcgacgtcctcgctgcgggactcgtccccaaactggagcaatcgcccgcccaaggagacgatcctcctcgacggctgcgacttcgagcactggctcgtcatcatggagccgccgcctggtgacgcctccaaccccgacatcacacgcgacgagatcatcgatagctatatcaagactctcgcccaagtcgtcgggagtgaggaagaagctaggcaaaagatatactctgtatcgactcgtcattactttggctttggtgctcttgtatctgaggaactttcttacaaactgaaagaaattcccaaggtccgctgggttcttcctgattcatacttggatgtcaaaaacaaggactatggaggtaatgataacatgttctttatccagttatagactatgtgcattttcttggtcatgtacaaaaatcctgctcatgatactcgaattgccttttttcacattgtatttgttgtttgttaacactgttatatctttcttgcttttacacaatttattccagtttaattttgaacttgagtaatttaaaccttcattattttatatcagatgtgaaattgtgaatgccttttcaagttattttctagtgtccaagcaattctatgaaattgtgctccttgctacttaattgacttgcctgcttttgtgccctgtaattttcttttctataggcttgagatgcaaggatatcactgtccctggatgaggtgctttgtcaaatcgtattaggcgatataatattattattgtttgcatcttgaatgtgttcattgcattttgaaaaaaaaaacaatacatatttaagaacctatagcttgggatagcacttcaccacacatgccgcaccctctgttttgatcaactatgcatgtatgccttttaaagctatttttgttattttttattgatgtttttaattgaaattgtgggtggctaaagtttatgtcaatccatgtttggacaactgattctgctagtataatattaatatggattgactactccacaagtttatgataccttctacttcctgtttcaggcgaacccttcataaatgggcaagctgttccttatgatcctaaatatcatgaagagtgggtgagaaacaatgcccgtgccaatgacagaaaccggcgcaatgataggcctcgcaactttgacaggtcaaggaactttgacaggagaagggagaacatgcaaaactaccagaacagagatgggcctcctgcccaaggtttcaatggccccccacctccacctggccagaaccagatgccatcccaccatagtcagggcaacatgtctccgcaaccaccacatgctggtggtggccaaccaaactatcagccccaaatgcaaaacccacagacgggctacaaccctggcggtgctcctcactaccagcaaggtgctgctcctggctaccaaggtggacctccggggtatcaaggtggttaccaagggaacccaggccctgcctaccaaggtggtaacactggttatcaaggtggcaacccaccacctccctaccaaggaagcaacccaccacctccttaccagggaggcagcccaccagggccaccacctccctaccgaggaggcagcccaccagggccaccacctccctaccgaggaggcaaccccaacgtaccgccatattcgggtggtggcaatcctggctaccctggtggcagccctggctaccagggtcaaggaggcaactccaacttccagtgaacatgaccacgagtactaagttggcacccctgtttcagagtagccttctgcaagagatggtgcgccgtagcctagcataaatcgaacccttgttgctatcggattttcatggattgtcgctgtttgcacttaatgttctatatatagtactcaaaactatgcttggtgtctgagtgatgtacgtggaattctgaaactatggatcagctcttgtgtgcacttgctgaaccagatacccagcagtaagcttttgtttgttcgttttgagtggttggttaaccacatacttgttacagtcgattctgataaacttccatgtaatacttttgctgcattgtccgtgagacctcagcggcccggc

SEQ ID NO: 81706 - DNA, 1613 bp, Zea Mays
ccattaacgagacaccccataaacctcccactgccacggcccagcccacaagtccaagacttcgccagatatttcggcctcgaagcagctaaataccacaccaggtgcggcttaaacccttatcgccaccagtggccgcgtcctcttcatttccgccatccgtatcgtctccctagggtttggcactttggccgccgccatggcgtcggcgtcgcgtgcgctcctcctctcccgtgcgctccaggccggcgcgtctcgccgcgtccccgccctcctgcgcccggtcgctgcggccgcgagcctcctcccagcggtggcggggccggcaggggccgccctcggcgctagggtgcggtgcttcgcgacccagccggcgacgtcctcgctgcgggactcgtccccaaactggagcaatcgcccgcccaaggagacgatcctcctcgacggctgcgacttcgagcactggctcgtcatcatggagccgccgcctggtgacgcctccaaccccgacatcacacgcgacgagatcatcgatagctatatcaagactctcgcccaagtcgtcgggagtgaggaagaagctaggcaaaagatatactctgtatcgactcgtcattactttggctttggtgctcttgtatctgaggaactttcttacaaactgaaagaaattcccaaggtccgctgggttcttcctgattcatacttggatgtcaaaaacaaggactatggaggcgaacccttcataaatgggcaagctgttccttatgatcctaaatatcatgaagagtgggtgagaaacaatgcccgtgccaatgacagaaaccgatgccatcccaccatagtcagggcaacatgtctccgcaaccaccacatgctggtggtggccaaccaaactatcagccccaaatgcaaaacccacagacgggctacaaccctggcggtgctcctcactaccagcaaggtgctgctcctggctaccaaggtggacctccggggtatcaaggtggttaccaagggaacccaggccctgcctaccaaggtggtaacactggttatcaaggtggcaacccaccacctccctaccaaggaagcaacccaccacctccttaccagggaggcagcccaccagggccaccacctccctaccgaggaggcagcccaccagggccaccacctccctaccgaggaggcaaccccaacgtaccgccatattcgggtggtggcaatcctggctaccctggtggcagccctggctaccagggtcaaggaggcaactccaacttccagtgaacatgaccacgagtactaagttggcacccctgtttcagagtagccttctgcaagagatggtgcgccgtagcctagcataaatcgaacccttgttgctatcggattttcatggattgtcgctgtttgcacttaatgttctatatatagtactcaaaactatgcttggtgtctgagtgatgtacgtggaattctgaaactatggatcagctcttgtgtgcacttgctgaaccagatacccagcaatcatcatgaaatctgttgttgaaggaaaatggtggtgacatattttgccttttagtggatgagtcagccgatgtgag

SEQ ID NO: 81707 - DNA, 1197 bp, Zea Mays
gcaactgctttcagtctgagagtagctggattaatcaggcaacagttaaaaggtgttacagaaaaaaaaaactgtttgacatcatcatgtgacacaaccatacttttatacggcaagcgctaccatttgaatttactcatcatgagctctaaattctacactataaatttaaatttaccaagggtcctaacttattgggaagaaaaaaaacatttggaccgtgatccattaccacccttatatgtacttcataaatccatttcttgcaacatctcaggcaaggagaactgcagaagagcacactcattggagttaggaagtttctaacaaattcctcgtgttctcttattgcatctaccacttcagaatgacaatgtgctaacacggatcgtgcaaaatcaaacagcttcgtggttttcacgaatcattcaaccatattataaactataaacatcaagagcagaaccataagcgcaagggtccattagacctgtgcattcacagtatgactaccagtccaaacatcagtgcaatcaaacaccaacataatgtatgccattttagagccaagtggatccggcatatatatggaacatgaaaaatccagcacaatagttcacacatgccagcatgtcaccaccaagcaccgacttggtggctcatgacagcaaggaaggtatgcacatttatgaaacaggcaagatgaaccaaaaaaaaaagaagttagcattccttgcagctacaggcgaatcaaacatttcttaacaggttcctcatcaatagataaaacccatctcgaagctgtttctagattattaatatgacatttgttttgcatagtctcgtatctttgaaatcacgagcagttgattcaaatgcaaatgtagaaatggattagcagggaaacaggagtatcagaactcaagggttacatgagactgctgacaatcagctgatgtccacataattccggaactgggccagacggcagaaaccgctactacgaagaataagggccgaagcaattgggacaggctacctctgtgcataccatccttcataaatatccactgcacttatcttttattcagtggaactcagcaacccatcacggcgcagttgtacacgaagttcccagatggccgcctggcaatcaaattccacacaggcggccgctcgtttggggtccatgagttg

SEQ ID NO: 81708 - DNA, 358 bp, Zea Mays
atggcggctggagccgcgaccctcggagatgtccggcgtgtgcggctgcggagacggcggcttgctgcgcttgccgccgccgtcagcttcgtcgaggtcttcgacctcgacgtcttccggcgccgggcgcttgccgccgaggacctcgtgagcgaggtacgcccactgcgtctccgtctcgcaggagctcagcagggagcgcggaacaaggtaggacttcccttccagcatcatggcttcaccccaaaaaaaagctttctattcttgctttatttcctcctcctaaatcctaatttgaaattgatccagaaaaatatgaaaccttagcttgcttagcagtcccgttcttgcaatctgc

SEQ ID NO: 81709 - DNA, 2361 bp, Zea Mays
gcggccctatagcgactaactgtgcctggggattagtgtgtgatagtagtaggatggcgcgacgagtttccacacaaagcaacgccgcgccacggcctttaaatgcctcgccatcttcgccgctccatccaagcacccacgccacactcctcacctctcctcgctccacgcacgcgctctctcacccgctggctattagtcgtcgtcccttggatttcgacactctctctagcgggcgcctgttccgccgccgtccatcgatcctagctagctagctagctagggcgcgaccgtcgtctcggtggttgttgacaggtcccgtacgtgtgtgctcgccatggctcgtggcgacggcgggcagctggcggagctgtccgcgggggtccgcggcgcggccgcggtggtggaccacgtggccccgatcagcctcgggaggctcatcctcgccggcatggtcgccggcggcgtgcagtacggctgggcgctgcagctctccctcctcacgccctacgtgcagactctggggctttcacatgcgctcacttcattcatgtggctctgcggccctattgccggcttagtggtccaaccgctggttggcctgtacagcgacaggtgtacatcgagatgggggagacggaggccgtttatcctgacagggtgcatgctcatctgcgttgccgtgagttcattggaggagctgcaacaacagcttggtcaccgttgttcactgttgttgttgttgctgctgtttatcgtttcccggttaatgttttccagttcatatgccgtgtgcatataggtcattgttgtcggattctcgtcagacatcggagctgctctaggggacacgaaggaacactgcagcctctaccacggtcctcgttggcacgctgcgatcgtgtacgttctggggttttggctccttgacttctccaacaacactgtgcagaccatcatgggccaagtgcggctaactccatcttctgttcttggatggcgctgggaaacatcctaggctactcctctggctccacgaacaattggcacaagtggtttcccttccttaaaacgagcgcctgctgtgaggcctgtgcgaacctgaaaggtgcatttctggtggccgtggtaagttctaccgtttcttggaaacgtcccctccgtgcaatcccagtgccacaaatacagacacgttttcgatgtgtttcttcaacaggtgttcctagtcctgtgcctgacggtaaccctgatcttcgccaaggaggtgccgtacagagcgaacgagaacctcccgacgacgaaggccggcggcgaggtcgagactgagcctaccgggccacttgccgtgctcaagggcttcaaggacctgcctcccgggatgccgtccgtgctcctcgtgactgccatcacctggctttcgtggttcccgttcatcctctacgacaccgactggatgggccgggagatctaccacggcgaccccaaggggagcaacgcccagatctcggcgttcaacgaaggtgtccgagtcggcgcgttcgggctgctactcaactcggttattctagggttcagctcgttcctgatcgagcccatgtgccggaaggtcgggccgagggtggtgtgggtgacgagcaacttcatggtctgcgtcgccatggcggccaccgcgctgatcagcttctggtcgctcagggactaccacgggtacgtgcaggacgccatcaccgcgaacgccagcatcaaggccgtctgcctcgtcctcttcgccttcctgggcgtccctctcgccatcctgtacagcgtcccgttcgcggtgacggcgcagctggcggccacccggggcggcgggcaggggctgtgcaccggcgtcctcaacatctccatcgtcatccctcaggtgatcatcgcgctgggcgccggcccgtgggacgcgctgttcgggaagggcaacatcccggcgttcggcgtcgcgtcggccttcgccctcgtcggcggcgtcgtgggcgtgttcctgctgcccaagatctccaagcgccagttccgggccgtcagcgcgggcggccactgatcgaacccggccggggccggccgccggcacgcagcccggcaagagctgtatgttgttgagagttgaacagaaaccatgcatgtgtgcttctgtagttctgttgtttgtggtcgatcgatgggcgttgcgtggcagcgtgggcaagcgaggcgaggtgcgcggatccaaaaaaagggccattcgatcaatcaatgtgtagtagagtacaactagacgatgatgttcacatcatttgtctttaatacataccggtttctattgtctttacaatatttttgtctatattaatt

SEQ ID NO: 81710 - DNA, 2166 bp, Zea Mays
acccacgccacactcctcacctctcctcgctccacgcacgcgctctctcacccgctggctattagtcgtcgtcccttggatttcgacactctctctagcgggcgcctgttccgccgccgtccatcgatcctagctagctagctagctagggcgcgaccgtcgtctcggtggttgttgacaggtcccgtacgtgtgtgctcgccatggctcgtggcgacggcgggcagctggcggagctgtccgcgggggtccgcggcgcggccgcggtggtggaccacgtggccccgatcagcctcgggaggctcatcctcgccggcatggtcgccggcggcgtgcagtacggctgggcgctgcagctctccctcctcacgccctacgtgcagactctggggctttcacatgcgctcacttcattcatgtggctctgcggccctattgccggcttagtggtccaaccgctggttggcctgtacagcgacaggtgtacatcgagatgggggagacggaggccgtttatcctgacagggtgcatgctcatctgcgttgccgtgagttcattggaggagctgcaacaacagcttggtcaccgttgttcactgttgttgttgttgctgctgtttatcgtttcccggttaatgttttccagttcatatgccgtgtgcatataggtcattgttgtcggattctcgtcagacatcggagctgctctaggggacacgaaggaacactgcagcctctaccacggtcctcgttggcacgctgcgatcgtgtacgttctggggttttggctccttgacttctccaacaacactgtgcagcacgtgctatgatggctgatctatgtgaccatcatgggccaagtgcggctaactccatcttctgttcttggatggcgctgggaaacatcctaggctactcctctggctccacgaacaattggcacaagtggtttcccttccttaaaacgagcgcctgctgtgaggcctgtgcgaacctgaaaggtgcatttctggtggccgtggtgttcctagtcctgtgcctgacggtaaccctgatcttcgccaaggaggtgccgtacagagcgaacgagaacctcccgacgacgaaggccggcggcgaggtcgagactgagcctaccgggccacttgccgtgctcaagggcttcaaggacctgcctcccgggatgccgtccgtgctcctcgtgactgccatcacctggctttcgtggttcccgttcatcctctacgacaccgactggatgggccgggagatctaccacggcgaccccaaggggagcaacgcccagatctcggcgttcaacgaaggtgtccgagtcggcgcgttcgggctgctactcaactcggttattctagggttcagctcgttcctgatcgagcccatgtgccggaaggtcgggccgagggtggtgtgggtgacgagcaacttcatggtctgcgtcgccatggcggccaccgcgctgatcagcttctggtcgctcagggactaccacgggtacgtgcaggacgccatcaccgcgaacgccagcatcaaggccgtctgcctcgtcctcttcgccttcctgggcgtccctctcgccatcctgtacagcgtcccgttcgcggtgacggcgcagctggcggccacccggggcggcgggcaggggctgtgcaccggcgtcctcaacatctccatcgtcatccctcaggtgatcatcgcgctgggcgccggcccgtgggacgcgctgttcgggaagggcaacatcccggcgttcggcgtcgcgtcggccttcgccctcgtcggcggcgtcgtgggcgtgttcctgctgcccaagatctccaagcgccagttccgggccgtcagcgcgggcggccactgatcgaacccggccggggccggccgccggcacgcagcccggcaagagctgtatgttgttgagagttgaacagaaaccatgcatgtgtgcttctgtagttctgttgtttgtggtcgatcgatgggcgttgcgtggcagcgtgggcaagcgaggcgaggtgcgcggatccaaaaaaagggccattcgatcaatcaatgtgtagtagagtacaactagacgatgatgttcacatcatttgtctttaatacataccggtttctattgtctttacaatatttttgtctatattaatt

SEQ ID NO: 81711 - DNA, 2005 bp, Zea Mays
cacgccacactcctcacctctcctcgctccacgcacgcgctctctcacccgctggctattagtcgtcgtcccttggatttcgacactctctctagcgggcgcctgttccgccgccgtccatcgatcctagctagctagctagctagggcgcgaccgtcgtctcggtggttgttgacaggtcccgtacgtgtgtgctcgccatggctcgtggcgacggcgggcagctggcggagctgtccgcgggggtccgcggcgcggccgcggtggtggaccacgtggccccgatcagcctcgggaggctcatcctcgccggcatggtcgccggcggcgtgcagtacggctgggcgctgcagctctccctcctcacgccctacgtgcagactctggggctttcacatgcgctcacttcattcatgtggctctgcggccctattgccggcttagtggtccaaccgctggttggcctgtacagcgacaggtgtacatcgagatgggggagacggaggccgtttatcctgacagggtgcatgctcatctgcgttgccgtcattgttgtcggattctcgtcagacatcggagctgctctaggggacacgaaggaacactgcagcctctaccacggtcctcgttggcacgctgcgatcgtgtacgttctggggttttggctccttgacttctccaacaacactgtgcagggtccagcacgtgctatgatggctgatctatgtgaccatcatgggccaagtgcggctaactccatcttctgttcttggatggcgctgggaaacatcctaggctactcctctggctccacgaacaattggcacaagtggtttcccttccttaaaacgagcgcctgctgtgaggcctgtgcgaacctgaaaggtgcatttctggtggccgtggaggtgccgtacagagcgaacgagaacctcccgacgacgaaggccggcggcgaggtcgagactgagcctaccgggccacttgccgtgctcaagggcttcaaggacctgcctcccgggatgccgtccgtgctcctcgtgactgccatcacctggctttcgtggttcccgttcatcctctacgacaccgactggatgggccgggagatctaccacggcgaccccaaggggagcaacgcccagatctcggcgttcaacgaaggtgtccgagtcggcgcgttcgggctgctactcaactcggttattctagggttcagctcgttcctgatcgagcccatgtgccggaaggtcgggccgagggtggtgtgggtgacgagcaacttcatggtctgcgtcgccatggcggccaccgcgctgatcagcttctggtcgctcagggactaccacgggtacgtgcaggacgccatcaccgcgaacgccagcatcaaggccgtctgcctcgtcctcttcgccttcctgggcgtccctctcgccatcctgtacagcgtcccgttcgcggtgacggcgcagctggcggccacccggggcggcgggcaggggctgtgcaccggcgtcctcaacatctccatcgtcatccctcaggtgatcatcgcgctgggcgccggcccgtgggacgcgctgttcgggaagggcaacatcccggcgttcggcgtcgcgtcggccttcgccctcgtcggcggcgtcgtgggcgtgttcctgctgcccaagatctccaagcgccagttccgggccgtcagcgcgggcggccactgatcgaacccggccggggccggccgccggcacgcagcccggcaagagctgtatgttgttgagagttgaacagaaaccatgcatgtgtgcttctgtagttctgttgtttgtggtcgatcgatgggcgttgcgtggcagcgtgggcaagcgaggcgaggtgcgcggatccaaaaaaagggccattcgatcaatcaatgtgtagtagagtacaactagacgatgatgttcacatcatttgtctttaatacataccggtttctattgtctttacaatatttttgtctatattaatt

SEQ ID NO: 81712 - DNA, 1404 bp, Zea Mays
cctcattgtctgcgcgcctaaacgtactagctaccccgcctggccctgcctgcctttgtggaatcttgctgctggagcaactgcaaaggccaaaggcagaaagagagaggatttttcgaaaggtcagcagcagaatatgcaggcagagttgcgtggagtgttgagcgaggaagatgctgcggctgctggcgcagtcaatggcttcatgatggccgttccggtcccggccggcccgcatctctcatctccgtgccagtagcgatcactgattacgcgatcatctcctctccggatacttggcatatcaacagaacattttgatactggcactgaagggcagggaggcagcaggggggtcgtcggagctgatcaacctgaacaaggagacggaggcgtcctgcagcaaccgcagcgaggacagctccgagatcaacctcgacatctcgcgcacgccgccggcgtccgagggccccatggaccatccgccgccgccgccgccgcaccacgccgccggcggcggcttgatccctttctacccttccgtcggcggccgacatagtattgccgccggcgtgggtatggaccaactcctgcacgcctccaccccgaagctggagcaacacggtgacggctgcgccgtcgccgtccaggccgcggagaccgccggcagcttcggcaacctcctgtgtggcgtcgacgagacgccgccgttctggccgtgggccgaccaccaccacttccattgatcgatcatcgtccatcacaaacgatggcgatcgacactgtagtgagtagaaatatcggaggaaaggaatttatttggacaattctggcgagtgcatgcagcaagggaggagagaaaaaaaaggtcgtgtactcgtgtgtgatatctggtccatattggcggggtaggcgggtagctgcctgcctagctggtcatgcatggtgggaactgggaaggggttgtaaatggggaataagtggagaggcggtgtaatttaattaggtagattttggtttgagttttgatagtattttttttatctttttgagtcttcgttttttttttctttgcgatcttcttttttctttttggttgttgacacatataaatttgtgaattggcaagcatacaggcaaagttgtaagctgtgtataggtgttacgacagatggatcactgacgtacgagactcggggctaccctgtatgttagtggccaatgttaaggaagaggattggcttccccaaatttgcatggatcaagagcagtagggcagtacgcctctcaagtggcgaagctgaggcagacgacgaagtacagacggcggagtacggatctatagacatttatagcggttacacaggatttatagctatagtacatttatagcgattatttaac

SEQ ID NO: 81713 - DNA, 2604 bp, Zea Mays
gaagccaccgcttcccttccgcggcttccacaccaccttagctcggccggtggcggtctgcttccgaccgtccgccggtttgcttgcttgcttgcttcatctgcctccgccgcacctcgcctccgtccagccagccagccagcgccaagtcaagcgatccggccgcacccagcctcgacctacccggccgacccgtgagggcggtgtgtttgcccttcaacggcctcgcctcgcctcgaggtgtgagctcctccgacatctgctgcggcgccgccgtttctgcaagcagggttatcttcccttctcgccgccaggagtgagtctgtgagtgggtcgtcactgggcggggctcttccaccacctgcagggagaagggaaaaaaaagggcagcagcttggattcttgctaggggggcgcggttggtcagctcgagagagaagctgaccgggtttgggcgtcgagatttcgattgacttttgaggtacccggggtatagtctacaatacaggttgcttcttcttgcacgctgctttcttggctctgtggctaccgaccttgctggctttccctcccgaattagcggctgagctccatccagaccttgcaaagattggacctttggggggcggttcgctcactcctagcttgcctcgctggctggtctttgagcttctcgtgctacgagccaagggaggccatcttttcctgctcggttctgtcgtgcaaacgggaaagattgagctgatctgctgctagctggggatcctgcagaggctaccgcgttcttcttgtctggagtgcacagtgcatgggcagtgggtgaactggtagagagcaagatggggaattgcatcgacaccacggcgcgggtagatcacagcatgaacaatgctgcctacccatcaaaagtgaccagcaagacaagtttgtcgtcagtcccttccacaattaagagcaactcaagtcgttcaacactgactcttccatcaatgagagatcgaaatgagcttcctactcctcggacagaagccttcttggggaaggagggtttgggcatgtctacaaaggttggattgatgagcacacgcttgctccttcaagacctgggagtggtatggttgttgctgtgaagaagcttaaaccggaaggttttcaaggacacaaggaatggctgacagaggttgattaccttggccaacttcaccacaagaatcttgttaagctcattggttattgctcagatggtgacaaccggcttctggtgtatgaatttatgcccaagggaagtttggagaaccatctgtttagaagaggcgctgatcctttgtcatgggcaataaggctcaaagttgccattggagctgctaggggcttgtcatttttacatgatgctgaaaaccaagtcatatatcgtgatttcaaggcatcaaacattcttctcgattcggaattcaacgcaaaactttcagattttggcttggcaaaagccggtccaactggggataaaacccatgtatccacacaagtcatgggtactcatggatatgcagctccagagtacattgcaacaggccgtctctctgcaaaggcagatgtctatagcttcggggtggtgttgcttgaactgctcactggaagaagggctctggataaatcaaaaccaggctttgagcagaacctagttgactgggccagacctcacctgggcgacaagcgcagactgtaccgtatcatggacacgaagttgggaggacagtaccccaaaaagggcgcaaatgccattgcaagcattgcctcgcaatgcatttgcggtgacgccaagctgcggcctccaatgtcgcaggtgctggaagagctggaacagctacaagatgccaaatatggtgcaccatcgccattagtcgacatccggaaagcctcgcacgctgcccccaaatcgcctatgaccagcaccccaaaatcgccgctgagcagcaccccaaaatcgccgatgagagctcaaccggcagcacggccttcgccacggcgctcgcttggagcagcagcacctttggcaggataccgcactgcccaagtgcactagaactttgcccaagtgcactagaactggacttattagcggggccaaggcccctgtaggctgtgtgtttgtgggctcaagctgtgagcactgagcatgttgtagcttttgcttctactgatgtttcggcgatggtgtgtgccacgggaatatgaccatgtcaaccttatgataagttgtcaggcctggttcattattgacctgtgtcgtgactgttccgaaattcactcacttggcatcaatgtcttgatctattattgtacgttgcaatggaatctcacaattgtatgctgcaatggaatctcacaatcttaaccaacagaacagatgaatgttgcaatcatacatcatttttttgttcaaaacgacgtgaaactggtgcattcagcgtttccattttcatctctcaacaataaactcctgaatctctatcccagtgtgacgggcggcgccctgtttcctcaccagaacttcatcaccgactttcagcgaagtcacgggaatggcggtccttccacttgatc

SEQ ID NO: 81714 - DNA, 1944 bp, Zea Mays
agagctttgcaggaagattagcggctaaggctacccactgttagctcggaaccagctggattcgcatttttctttccagtttctgccgtgtcagcctcgtccgcccctatctatcccctatatagccgtgcaggtcgtcttcttcctcctctccactcctctcgtctccgtctccatctccgtctccgtctccacaccgtgccgtagctgctgctgtccgtgtccctcgcctcgaagaagacaactccaacactgttgctgcgtgactgctgaattcgctccacacacgcgcgaacccagcaaggcaagaacacgaacgagagagagagagagacagggagggatcatccatccatcagaccatcacccatggacaaccttaaggagcagcggggccacgatgccgcgggcgccaacagcggcgtctggatgacggtgccggcgttcggggactgggacacgaagaacggcgcgctgccggactactccatggacttctccaagatccgcgagacgcgcaagcagaacaagaaggagctctcccgcgccagcctcggcggcgacgacgacctcttcgcccacgcccacgcccacgcccagaagccgcaggccaacagcgcccagcccaagctcggccgcccctgccccgccgccgaccgccgaccgctccacgcccgcgaccactccccaacggtaaatctccgtgtcccggcccgtttcgttccagagtcactaaaatgaacttgacccatcttttctttcttcatttcttttgcgtggaaattcgggatattacatctcaaattcgtctcgtcttagttggattttacaagcgcggggggtaataattagtgtcggggattgaacttgctaattgcgagtgaccgcaagtacaaaagtgttaccttagtccggacaagccagattagcaaagctgacagcggagtaaaaaaaaactgtaactggcgaaaccagtttttttttagtgtagcattacaacacgcagtaaaatcgcctcgccgcttcagtaggcagcatcacatactgctgtccttctgaagcagattcttgagatggcataatggttctggaggtttagtttagaaaactagcgcatatgggttttccagtaaatggacgcatcaagccaagaaccacccattccaactccaccattgcattattatattttgtcgtaactgataggcaaggacgaatcttcctgtttttttcttaatcatactgtccatgtctacacgccttcagaaagctgcgcggatgtattgacgtggcactgtccgtaggaggatcttagggaaactgatgatgaggtttagccagttgaggggataagcaactgtccaggctgttgctgtgatatatcacaaatagcagaatggctgaagaagcatacttttaactgccaacaactacagaacactttgcatcagttcattgggttctccagaatgccttttcttacaccgttgcttggagggaagaagttcctgagctacttccagtgctgtatcaaggcctgaagaggagctgccgcaatgctatgtctgtgtgcctgtgctttgtcgcagcagaacactcgtgagcaattaggtcccggctttgttaagtatccaaaaaatgtgcaatgtatttgccctgatggtcactcgtttgacctgttagcctgtatgaagaacaagtcaggttatggggccaggcagccgtctatctgtacatggcaccatcgatttgtttgcgactggtggtataatgttgccctgtaatcattgtattggatgggaatttgcaccgcctccgtatttttgaacgatcacaaggggcatggttcgtttggattggttttgtgattacttatgatgggaaaatacggaaacaacaaatggcccctggaacattttttttatatataggagtgcactacat

SEQ ID NO: 81715 - DNA, 834 bp, Zea Mays
ctttgcaggaagattagcggctaaggctacccactgttagctcggaaccagctggattcgcatttttctttccagtttctgccgtgtcagcctcgtccgcccctatctatcccctatatagccgtgcaggtcgtcttcttcctcctctccactcctctcgtctccgtctccatctccgtctccgtctccacaccgtgccgtagctgctgctgtccgtgtccctcgcctcgaagaagacaactccaacactgttgctgcgtgactgctgaattcgctccacacacgcgcgaacccagcaaggcaagaacacgaacgagagagagagagagacagggagggatcatccatccatcagaccatcacccatggacaaccttaaggagggagggaagaagttcctgagctacttccagtgctgtatcaaggcctgaagaggagctgccgcaatgctatgtctgtgtgcctgtgctttgtcgcagcagaacactcgtgagcaattaggtcccggctttgttaagtatccaaaaaatgtgcaatgtatttgccctgatggtcactcgtttgacctgttagcctgtatgaagaacaagtcaggttatggggccaggcagccgtctatctgtacatggcaccatcgatttgtttgcgactggtggtataatgttgccctgtaatcattgtattggatgggaatttgcaccgcctccgtatttttgaacgatcacaaggggcatggttcgtttggattggttttgtgattacttatgatgggaaaatacggaaacaacaaatggcccctggaacattttttttatatataggagtgcactacat

SEQ ID NO: 81716 - DNA, 1976 bp, Zea Mays
ctttgcaggaagattagcggctaaggctacccactgttagctcggaaccagctggattcgcatttttctttccagtttctgccgtgtcagcctcgtccgcccctatctatcccctatatagccgtgcaggtcgtcttcttcctcctctccactcctctcgtctccgtctccatctccgtctccgtctccacaccgtgccgtagctgctgctgtccgtgtccctcgcctcgaagaagacaactccaacactgttgctgcgtgactgctgaattcgctccacacacgcgcgaacccagcaaggcaagaacacgaacgagagagagagagagacagggagggatcatccatccatcagaccatcacccatggacaaccttaaggagtcatcacaccgtgcgctggtgcgtgcgtgcgtgcagcagcggggccacgatgccgcgggcgccaacagcggcgtctggatgacggtgccggcgttcggggactgggacacgaagaacggcgcgctgccggactactccatggacttctccaagatccgcgagacgcgcaagcagaacaagaaggagctctcccgcgccagcctcggcggcgacgacgacctcttcgcccacgcccacgcccacgcccagaagccgcaggccaacagcgcccagcccaagctcggccgcccctgccccgccgccgaccgccgaccgctccacgcccgcgaccactccccaacggtaaatctccgtgtcccggcccgtttcgttccagagtcactaaaatgaacttgacccatcttttctttcttcatttcttttgcgtggaaattcgggatattacatctcaaattcgtctcgtcttagttggattttacaagcgcggggggtaataattagtgtcggggattgaacttgctaattgcgagtgaccgcaagtacaaaagtgttaccttagtccggacaagccagattagcaaagctgacagcggagtaaaaaaaaactgtaactggcgaaaccagtttttttttagtgtagcattacaacacgcagtaaaatcgcctcgccgcttcagtaggcagcatcacatactgctgtccttctgaagcagattcttgagatggcataatggttctggaggtttagtttagaaaactagcgcatatgggttttccagtaaatggacgcatcaagccaagaaccacccattccaactccaccattgcattattatattttgtcgtaactgataggcaaggacgaatcttcctgtttttttcttaatcatactgtccatgtctacacgccttcagaaagctgcgcggatgtattgacgtggcactgtccgtaggaggatcttagggaaactgatgatgaggtttagccagttgaggggataagcaactgtccaggctgttgctgtgatatatcacaaatagcagaatggctgaagaagcatacttttaactgccaacaactacagaacactttgcatcagttcattgggttctccagaatgccttttcttacaccgttgcttggagggaagaagttcctgagctacttccagtgctgtatcaaggcctgaagaggagctgccgcaatgctatgtctgtgtgcctgtgctttgtcgcagcagaacactcgtgagcaattaggtcccggctttgttaagtatccaaaaaatgtgcaatgtatttgccctgatggtcactcgtttgacctgttagcctgtatgaagaacaagtcaggttatggggccaggcagccgtctatctgtacatggcaccatcgatttgtttgcgactggtggtataatgttgccctgtaatcattgtattggatgggaatttgcaccgcctccgtatttttgaacgatcacaaggggcatggttcgtttggattggttttgtgattacttatgatgggaaaatacggaaacaacaaatggcccctggaacattttttttatatataggagtgcactacat

SEQ ID NO: 81717 - DNA, 2139 bp, Zea Mays
caaaattagaaattcatcactttgtaaatccaaattctatgaatctctttacctttctccgcacctaatcattatgataattaaattatcagataattaaattataagaaaagatcgtcagaaaaaaaccgaaacaatcggtctctatctttctcatgaatctcagcctagcttaccatcttgacctgccccacacgtcccaccggccaccaccgggtttcgtcgctgccgccgcccgcacctgcagccgccatgtggaggggcggctctacagccgcctccgccgcgagggctctccgctcgcgcctcctcctcgaccccatccaccacccggccacgtcgctcgctccaatcgcttcggcgcgtacctcctcctcttccaccccgtccaccgccgcggcgaacaccatcgtggaagaagcggcggcagcggtatccgtttctcagcataccggatccatctccgactcgctgcggcactacgggaagtgctactgggagctctcgaaagcccgcctcagtgctcttgttgtggcaacttcgggggctggctatgtgcttggtagtggcaacatcgtggacattgccggcctttgttgcacatgtgccggtacaatgatggttgcagcatctgcaaataccctcaaccaggtgtttgagataaaaaatgatgctaaaatgaaaaggacaatgcgacggcccctgccatctggtcgcattagtcctgcacatgctgcgatgtgggctacaagtgttggagttgcaggaacagctttgctggcctggaaggtttgtgcaggctaatggcttggcagctgggcttgcagcttctaatcttgttctgtatgcatttgtgtatacgccgttgaagcaaatacaccctgttaatacatgggttggggcagtcgttggtgccatcccaccacttctggggtgggcagcagcttcaactgaactgtcactaaacgcgatgatactccctgccgcattgtacttttggcaaatacctcattttatggctctcgcgtacttatgtcgaaatgattaccttgctggagggtatcgaatgttttcttttgctgaccctaccggtagaagaactgcatgggtgtcgctaagaaattgtctgtacatgctacctttggggttatttgcgtacaactgggggctcacatccgagtggttcagttttgaagcttcactcctaacattaggccttaccatcggagctctatcattcgtcctagaaccaagcccgaagactgcgaggagaatgttctatggtagcctgctgtatctccctgccttcatgtccggacttctgttacatcggctaccaagtgaacaaaaggcgcacaacctggctgagaacaatgagctggacggagttctgtacggggctgatctgcaggacgaagaacgagcaagacagaaacgccaagacacgaaaccttctcgtgtgcaatcactccctccagtttcctatgcttctgtggctccattccctttcctaccggtacccatatacgagtcatgaaaagttgaaaacctcctctggttcttcctgcagccgtggggtagttggagcaatgtattcatgcatttttggcttacatgagttttccgccatcaagaagagtccttggtatggtgcgtctgttgttaaaattatagaatacgtttttgtgtgtgtggattgagccttttgcggctcacctacaaatgtaaaaagtgatgttgatgttcattctgatgattcgatcgacacggatgtgctgatgtcccgaaacattatgcttttcttgtaaaattcgatgtcctgaaatataaatgatggaagaaaggatgctttaaaaggcgcgctattggagcttggagggtataggagctcccctatttagaggacagtagactttagagtcagattgaaagcgagtggctctttaggttactcgcctgccttttccgtgagagcccctcgtgcttcttctcgcaaggaaaggaaaaaaaaagcagagggaccgtgtggtcgtgtcatgggttacattatctgtgccgtcctgtggtcgatgaaaagcgatcggcgacgcctcgctggagatgagtccgtgactccgtggaactgtaccgtactccgta

SEQ ID NO: 81718 - DNA, 4464 bp, Zea Mays
gacccaaacatcgtcaattcgctcataacagacaaaaagtatgttcacagatttctttacaatgcaggtgtttgtcattgtaacaaaaaattctaagacatcttgttgctctatcatatatgaagaattaacaagtatatatagacgcacgattcagagcctcaaagcagcaatagcttcaggcctgaagtcagtcctaagtcctaacaccctccgcacctctgcaggtgtcaacagccatgtcagatggccagcattgtcaccccagaaatccagtatctctgatacccgctcaaagtttagaatggtcgacatctgcgaaagcctagagaacttgtctctgactggtctctgggacatttctgagaaatggttgatcagagaccggacctccttgtcgagctggagcccaccaagctggctgaacctcttctgcatcattatcacctcgagccttttgacaatgaagtcaatgatcaagtgcacaaaggaatcgtagttgtttgatgtcatcactggctggagccaagcaacattagtgttaactgcaagtattagcttctgcacccatggatcattcacctcattttccccatattcagcatcatccaacccataactgacagtagcaacagtgtcaaggattggacggatgcgtggcgccacagatgccactaaatgctccagcgcagaatgaaggatcttcttaaaggaagcactgatctctcctagctctgataaacaggacttgatcttctctcgatcagctggagtatgaaaaatctgttggacagacacaaatcagtggagtttgtatcaaccatattgatacagcaatcaaatcactactcactagttattaatgacaccattacgtcatacaaagccacataggatttttttagaaccattagggcaagtacatggtctcatacaaagccacataggatttttttttatgatgtggacgagaagagggagggtgagagaaagaggttgttgtttcgtgaaacaaccacctcataaactaagatttaggaatatgagactgcttctgcaccattgtatgacttgtcgacatgcaaatcaaaacattccttttgttctacacacaaattaagtaaatgtgagtcactacaagacaactcaaatgataagttattgtacagattgtgtcataattcaactcaagattacatggtactacacgagaccacctacaagacaacaccaatatacttgccctagtccatcatggacgaggctgcgaagattacgaggggctggtgcagcggtggccgctgcgggcctgcggcgtgcctagggagggggttgaaggcacataggcagcgccagcgccggccgcttggagcgctggagtggacgagcaggagctggtccggccgtccgcccaagagagaaggcgagggcagagcagggctagggtgccgccgccgcgaccttgacctggagtcccgccaccgcggcggcggcctggagagggtctcggcggggcggatacggcgtggggaggcgcgacagcgcgatggccagcaggtggcgcggctgctggctcgacctgcagtgccagcgggtggacggcggcggctggcgtcctggctacgaccccgggggagggaggggggaaggggggcagcagcgggggaggaaggggagggctgacagccggtggccagagagatgcccgggggtcggcggcggctgtggggtgggttgggagaaggtaaaactggctctggaacccagttggaatggaaaaccctagccctaggatagggatgagcagtgtattaatacaccaaataactgggcgaggcccattacaagggacgggtatctaacaccttcagcaaacgaaaggtacgttaaacaatgtactggaatgcagaatccccacaaacaagcttcatgatctattttcaaaagggatttcagataaacacaaacaagcttcatttttgtcgcgttgttttagacactgctcaataaaagtttaaggtggtcctggtgcatatcttgcttggcattagcattttgtacattattctgcttgcaagattactcattactcataagcaagctgttcgattcattagatcacaggttcccatagacaagaatgctcgatcaatcatacattccatacttcacacatcatttatcattactgtttgttctacacaataaatttagtgatttagtttgcacaaattgtttatctggcactaagtttaacagttttgttatgacgagctcaaaaaacagttcctatgacaggagtgaccataaagcagtatacaaaacactgttatcaattgtgtaacatataggtgtgctacttagaaagttgctagttcatgcatttacatctaacaatttggcatttcccagatgacagacacattaagctaaacaaccgtgcattagcatgatagaatcaagcgatgtcaaactaattttgcaaagacaatgaaatgcattctttgtgagttatgagattctctattacataagtctattcattagatcacaggttcccgcagacaagaatgctggatcaatcatacattccatactcactgttgtcactgtgtcacctaggtgacacctaggtgccagtggccggcaacgaacaccatgatctgtcacctcgcctgaacccaactagggcagcgcctggccaacttagacgacgccacagcgactaggcaggctcccaggcgacgtcgtaccattgcctagctgctgaagtgggttccaatgggccatatgtgtatgtcttgtgccctatgtgcccaggtacttgttttctcttctttctttcccatgttgtcaccgccactagagctgccaaacgcaactccggccgccccactccagctccttggcctgaacccaactagggcggcccttggccgacttagacgacgccacagcgactgggcaggctcccaggcgacaacgtgccgtcgcctagctgctgaagtgggctccaatgggccatgtgtgtatgccttgtgccctatgcgcccatgtacctgtgctttcttctttctttcccctgttgtcaccgctgctagcgccaccaaacgcaactctggccaccccactccagctcctcgctcctcaggccacccgcccccgcgccgcacgcccgcgttccctgcggcgcaccacccaccagagctgccctagcacctgcaggccccagctgtgcacgaagatgaagtcccgactcctctgctcttccttgttggtactatcttgcttgcctgagacctgagctgccggtattgtcttgcttgcctaacttggtattgcttgctatatattgcttcaacatccaccacaaccacaattttagaacaagaacaacaaagattaggagaagaggaagaagctgaatttggttttgttgctcctgatgatctacatgttgaggatgactatggccaagctcttgctacaaatggtgaagctgctgcagctgcaagtgatgaggatgtgggtgtcataatgagatagacttcaatatttattaggccttacgggcttagggcagtatgtcatatttatcagttattcaatttatcatgtatttcctggacatatatatttgcttgctacttgttggacctatattttatttgctagtatttgatatatcatatgtgttgcatgctaactgctggacaaatgggcgcctaggcgtccagctggcgactcgcttcgccgtggcactgtgataaccatgtccatacttcacacatcatttatcattacagtttgttctacataataagtttagtgatttagtttgcagaattgtttatctggcactaagtttaacggttttgctatgacaagcccaaaaacagttcctatgatagagtggccataaagcagtacacaaaatgctgttatcaatttgtgtaacataatggtgtcctacttagaaagttgctagttcatgcatttacatctaacgatttggcattcctagatggcagatacattaagctaaacatttgtgcattagcatgatagaatcaagcaatgacaaattaattttacaaagacaacgaaatgcattctttgtgagttatgatattctctattacataagatacatagagatcaaatgacagaggcggtggcagcacaaaggagacactattaccaactcacgtgggtttgttgataaacgtaggtgtaaacagctagacaaatattatgtgccaaatgatttatcacagcataaagatttttacgtttctaaaatttactctattactatcaaactaattttcagggaatgttaaaacattgtgatcaactgcatttaaattaagcaatctgcaattaagaacacattatatgactgaagatatgcacatatccaataaattgaactgatggaatgcatatatggcctaattgtta

SEQ ID NO: 81719 - DNA, 2093 bp, Zea Mays
caaagaccgagaaacagaagccaagcgtccaagcgcaatagcgttcagtccccactccccactcctcactctcgcggtcgcggcctcaccggtcactgcttctcgaaccgccgggagctggaatcgcctccatagggaactgctctaatgcccgcggcgatctggaggcggccgcccgcccacctaggccacgtgcgatggtgaggtcgaggcctagggtttggctagtggcgggctgcgccgccgtcctgctgtgggcctccgtcgcgcagctcgtcgccgtcggccgccttctcctcctttttggcctcgcgggcgacgcggtttcatcgccgccacctactgcgcttccgcccccgagaatatacaagagcaatggttatctgaagatatcttgtaatgggggtctgaatcagatgcgctcagagatatgtgacatggtagcagttgctcgccttctaaacctcactatggttgtcccagaacttgacaagagatcattctgggctgatcaaagtaattttggggacatatttgacgtgaagcattttattgactcattgagagatgaggtccacatcattgaacagcttccggagaagcttggtccaagagattcagacattattatacttgaaatgtcacctgtgagctggtcagatgaaaaatattacttgcatcagatcttaccactgttcagcaaatacagtgtcatccattttaacaaaacagatgctcgcttagccaataatgggaatgaactggtacataaactgcgagccaagggatcatttgtagccttgcatttacgttatgagatggatatgctggcgttttctggttgcaaccatggcctttcacctgaagaagctgaggagctcaaaaaaatgagatatgcttatccatggtggagagataaagaaattgattcccaagccaagaggttgcaaggactatgcccacttactcccgaggaggcatcacttgttttgaaagctcttggatttcaaaaggatgctcttatatacatcgcagctggggaaatttatgggggagataggagactagagccactacgggctgcttttccaaaccttcgttgaatatttttaggtacgaaaggtgatgctgctaaactctgaagttctgcgtcaattccaaaatcactcttcccagatggctgcacttgatttcattgtatccacagctagtgatgttttcattcccactttcgatggtaacatggcaaaacttgttgaaggtcaccgaaggttcctgggtttccggagaagtgtggtgctagaccgacggaaattagttgaacttctagacctgtacaccaacaagacaatgtcttgggacaattttgcatcttctgttcaggaagcacataagaactgtgtagctcagccatcctgcaggcgagaacttaaaaacagaccaaaagaagaggattacttctatgctaacccccacgaatgcctagccaattcaaccttgtgcagctaaactgagtttctggtttctttaaggtaaccaggtgggcgtgaaatcatttccgagcacgcagtggctcacagtcgttttggtgtcgtgttgtcaagggaccgagccagcttacacggagcatcacatatcttttggctttacattccttatttcactgttatataggtcagtttttttgcttctctgttgattcgttggcttttccaacatgccaaaagcggcctgtttggggcatgtaaatttcggtctgttgtctaccatgcttgttcattggtgactattgactaactagtgctgctaggccgaagggttagctttttattccttttcaatttatttccctaatttttacaagtgcttagtgaaattatcaccttctaaaattgtgctatgtcaaagcaggagtgctgcacctgcctgcctttttatggaaaatgctgtccagtttgcttgttgcatcaggttctcgatgaatgctttactgttagcaaacccttgtgcacgatcatctccaagagttctttagaaaaaaaaaatagtaaatcaaagttttgattgactgaaaaaggttagaagcatatttg

SEQ ID NO: 81720 - DNA, 2109 bp, Zea Mays
caagcgtccaagcgcaatagcgttcagtccccactccccactcctcactctcgcggtcgcggcctcaccggtcactgcttctcgaaccgccgggagctggaatcgcctccatagggaactgctctaatgcccgcggcgatctggaggcggccgcccgcccacctaggccacgtgcgatggtgaggtcgaggcctagggtttggctagtggcgggctgcgccgccgtcctgctgtgggcctccgtcgcgcagctcgtcgccgtcggccgccttctcctcctttttggcctcgcgggcgacgcggtttcatcgccgccacctactgcgcttccgcccccgagaatatacaagagcaatggttatctgaagatatcttgtaatgggggtctgaatcagatgcgctcagagatatgtgacatggtagcagttgctcgccttctaaacctcactatggttgtcccagaacttgacaagagatcattctgggctgatcaaagtaattttggggacatatttgacgtgaagcattttattgactcattgagagatgaggtccacatcattgaacagcttccggagaagcttggtccaagagattcagacattattatacttgaaatgtcacctgtgagctgatcttaccactgttcagcaaatacagtgtcatccattttaacaaaacagatgctcgcttagccaataatggtatcagtacagagattcaactgcttagatgccgtgttaattttcatgccctgaaattcacacctcaaattgagggattagggaatgaactggtacataaactgcgagccaagggatcatttgtagccttgcatttacgttatgagatggatatgctggcgttttctggttgcaaccatggcctttcacctgaagaagctgaggagctcaaaaaaatgagatatgcttatccatggtggagagataaagaaattgattcccaagccaagaggttgcaaggactatgcccacttactcccgaggaggcatcacttgttttgaaagctcttggatttcaaaaggatgctcttatatacatcgcagctggggaaatttatgggggagataggagactagagccactacgggctgcttttccaaaccttgtacgaaaggtgatgctgctaaactctgaagttctgcgtcaattccaaaatcactcttcccagatggctgcacttgatttcattgtatccacagctagtgatgttttcattcccactttcgatggtaacatggcaaaacttgttgaaggtcaccgaaggttcctgggtttccggagaagtgtggtgctagaccgacggaaattagttgaacttctagacctgtacaccaacaagacaatgtcttgggacaattttgcatcttctgttcaggaagcacataagaactgtgtagctcagccatcctgcaggcgagaacttaaaaacagaccaaaagaagaggattacttctatgctaacccccacgaatgcctagccaattcaaccttgtgcagctaaactgagtttctggtttctttaaggtaaccaggtgggcgtgaaatcatttccgagcacgcagtggctcacagtcgttttggtgtcgtgttgtcaagggaccgagccagcttacacggagcatcacatatcttttggctttacattccttatttcactgttatataggtcagtttttttgcttctctgttgattcgttggcttttccaacatgccaaaagcggcctgtttggggcatgtaaatttcggtctgttgtctaccatgcttgttcattggtgactattgactaactagtgctgctaggccgaagggttagctttttattccttttcaatttatttccctaatttttacaagtgcttagtgaaattatcaccttctaaaattgtgctatgtcaaagcaggagtgctgcacctgcctgcctttttatggaaaatgctgtccagtttgcttgttgcatcaggttctcgatgaatgctttactgttagcaaacccttgtgcacgatcatctccaagagttctttagaaaaaaaaaatagtaaatcaaagttttgattgactgaaaaaggttagaagcatatttg

SEQ ID NO: 81721 - DNA, 1244 bp, Zea Mays
attgaagtatctcctttcattcaattctatccaatgactagaattggataaagaaagagatatgcttatccatggtggagagataaagaaattgattcccaagccaagaggttgcaaggactatgcccacttactcccgaggaggcatcacttgttttgaaagctcttggatttcaaaaggatgctcttatatacatcgcagctggggaaatttatgggggagataggagactagagccactacgggctgcttttccaaaccttgtacgaaaggtgatgctgctaaactctgaagttctgcgtcaattccaaaatcactcttcccagatggctgcacttgatttcattgtatccacagctagtgatgttttcattcccactttcgatggtaacatggcaaaacttgttgaaggtcaccgaaggttcctgggtttccggagaagtgtggtgctagaccgacggaaattagttgaacttctagacctgtacaccaacaagacaatgtcttgggacaattttgcatcttctgttcaggaagcacataagaactgtgtagctcagccatcctgcaggcgagaacttaaaaacagaccaaaagaagaggattacttctatgctaacccccacgaatgcctagccaattcaaccttgtgcagctaaactgagtttctggtttctttaaggtaaccaggtgggcgtgaaatcatttccgagcacgcagtggctcacagtcgttttggtgtcgtgttgtcaagggaccgagccagcttacacggagcatcacatatcttttggctttacattccttatttcactgttatataggtcagtttttttgcttctctgttgattcgttggcttttccaacatgccaaaagcggcctgtttggggcatgtaaatttcggtctgttgtctaccatgcttgttcattggtgactattgactaactagtgctgctaggccgaagggttagctttttattccttttcaatttatttccctaatttttacaagtgcttagtgaaattatcaccttctaaaattgtgctatgtcaaagcaggagtgctgcacctgcctgcctttttatggaaaatgctgtccagtttgcttgttgcatcaggttctcgatgaatgctttactgttagcaaacccttgtgcacgatcatctccaagagttctttagaaaaaaaaaatagtaaatcaaagttttgattgactgaaaaaggttagaagcatatttg

SEQ ID NO: 81722 - DNA, 1250 bp, Zea Mays
ctcctttcattcaattctatccaatgactagaattggataaagaaagagatatgcttatccatggtggagagataaagaaattgattcccaagccaagaggttgcaaggactatgcccacttactcccgaggaggcatcacttgttttgaaagctcttggatttcaaaaggatgctcttatatacatcgcagctggggaaatttatgggggagataggagactagagccactacgggctgcttttccaaaccttcgttgaatatttttaggtacgaaaggtgatgctgctaaactctgaagttctgcgtcaattccaaaatcactcttcccagatggctgcacttgatttcattgtatccacagctagtgatgttttcattcccactttcgatggtaacatggcaaaacttgttgaaggtcaccgaaggttcctgggtttccggagaagtgtggtgctagaccgacggaaattagttgaacttctagacctgtacaccaacaagacaatgtcttgggacaattttgcatcttctgttcaggaagcacataagaactgtgtagctcagccatcctgcaggcgagaacttaaaaacagaccaaaagaagaggattacttctatgctaacccccacgaatgcctagccaattcaaccttgtgcagctaaactgagtttctggtttctttaaggtaaccaggtgggcgtgaaatcatttccgagcacgcagtggctcacagtcgttttggtgtcgtgttgtcaagggaccgagccagcttacacggagcatcacatatcttttggctttacattccttatttcactgttatataggtcagtttttttgcttctctgttgattcgttggcttttccaacatgccaaaagcggcctgtttggggcatgtaaatttcggtctgttgtctaccatgcttgttcattggtgactattgactaactagtgctgctaggccgaagggttagctttttattccttttcaatttatttccctaatttttacaagtgcttagtgaaattatcaccttctaaaattgtgctatgtcaaagcaggagtgctgcacctgcctgcctttttatggaaaatgctgtccagtttgcttgttgcatcaggttctcgatgaatgctttactgttagcaaacccttgtgcacgatcatctccaagagttctttagaaaaaaaaaatagtaaatcaaagttttgattgactgaaaaaggttagaagcatatttg

SEQ ID NO: 81723 - DNA, 2270 bp, Zea Mays
gtcaatacaccataccaacgccattccagagtcattggttcagtgatgctctgaagaaaaaggcatgacgaacgacgcatcgtgatgacgacaagccgacaagagcggagcaatctttggagacactgaaccattcgtgcgcgccctctgccgcgcttccgacagctgatgctgcgcaagtcgggcacccagcgccagcagccggcgttgtggcggcggtgccgcagcctccggcagatcaagcaggtccacgcgctcatggtcctccagggcttcctctcggactcctcggcgcttcgcgagctcatcttcgcctccgctgtcggtgtccggggcggcaccgcgcacgcccgcctcgtgttcgaccgaatcccgcaccccgaccggttcatgtacaacaccctcatccgcggcgccgcgcacagtgatgcgccccgggacgccgtctcgatctacgcgcgcatggcccggcacagcgccgactgcgacctgatgacgctgaggccggacaagcgcaccttcccgttcgtgctccgcgcctgcgccgccatgggcgcgggcgaaaccggggcgcaggtccacgcgcacgtcgtcaaggccgggtgcgagtcggacgctttcgtcaggaacgcgctcatcggcatgcacgctaccctgggggacctaggtgccgcggctgcgcttttcgacggagaagcgcgcgaggacgccgtggcgtggtcggcgatgatctccggcttcgcgaggagaggggacattggtgccgcccgggagctgttcgacgagagccccgtgaaggacctcgtgtcgtggaacgtgatgatcacggcatatgcgaagctgggtgacatggccccggcgagggagctcttcgacggggctcctgatcgtgatgttgtgtcgtggaacgccatgatctctgggtacgtgaggtgcggctcgcgcaagcaagcgatggagctctttgagcagatgcaggccatgggagaaaagcccgatactgtgacaatgctcagcttattgtcagcctgtgccgactctggtgatctggatgctggccgcagactgcacgggtttctatcggggaggttttctagaattgggcctaccactgctcttggaaacgcgctgatcgacatgtatgcaaagtgtgggagcatgacgagtgcactggaggtgttctggttgatgcaagataagaatgtctcgacctggaactcgatcataggaggattagcgttgcatggccatgccacagagtccatagctgtgttccggaagatgctgcaggggaatgtcaagccagacgagatcacctttgttgctgtccttgctgcgtgcagccatggcggaatggttgacaaggggcacgagtacttcagtttgatgcaacaacggtacaggattgagcccaatatcaaacactacggttgcatggttgacatgctgagtcgtggcgggctgctcaaagaagcatttgagtttattggcacaatgaagatcgagcctaatcctgtcatatggaggaccctgcttggggcttgtaggatccatggtgagatcgaactggctgagcatgcgaatcgggaacttctaaaggcaaggagtgatgcaagtggggattttgtgcttctgtcgaacatttatgcatcggttggagaatggccggggtcagagaatatgagaaagttgatggatgacagtggtgtcaacaaggaagcaggccgtgcagttatagatagcagttcaaaggatctaatgcgatcttctagactattctaattgaattctgtatttaaaagattttttcacctgtttaccaaacttccatctacagggcaagaaatcgaacacctcgtcctgttcttctgtcaatgaagagaaaaatgtccattatcactcgttgtgctatcattggctccaatgagactttgctggattttttaagatatatccagctaaaaagggcatgttgctgttaacattcaagacaagcacataaagaggtgttcaagagtgtgaatcatctaggcgccttagtgatgttttgataattaatgacaatcatatgtggactaataattcttgtaaaaataagaatgcaggttggaccacagggaaaaggctttatcgaaagtcttgtagacttaaagcattagttgtggatcgggtaaagacaaaggtataacataggttttattttttacgttcaccagatgtttagagaagaaattgactggattagtaggctagatagccgtactatcaag

SEQ ID NO: 81724 - DNA, 1410 bp, Zea Mays
gcaggagtcgctctggggaaggaacgccacagactccgggaaattgccgttgcatttgcagcaggttagacatgtcgtcgtcgtcgtcgtcaatgctacgccttcctccatgccgtcccgcagtccatccagtgtgtaggggtgctggatcatcaggagggagcagtagcacgcacccactccgatcaagctcaagatcaaggccgtcgtcgctcaccgctgcgtgcgctctcaagacgccctcgaatggcggatcgagggggaaggtcaaccccagggacctcttcaccttctcccacaagttcagcaccgacatcccgatgagcgaaacgcaaggggcgtccatcgatgagtacctgcggaacagtcccaggatcgtcggagcggtgtttccggaccagcgcaagagaaggaagatcaacgacgtgagttgcctccgtttcatctcgttggctctgagacctgaatttccggcgaggccagctacagcttcctcgccggaagcctggaaacttcaacgatacgaaacacgagaagaaggaagcgctgcttctgcttgtgagactactatacgcaagtgaaggacacgtacacgcaatgctaacagagttgccactggctgccgtctttcaggaagaatggagcgtgcagctcctgcccatccggttcctgttcctgtcggcgtcgccggtcatcgtcatgcgcttcgtcagcaagtccggcgggaaggagtacccgcccaacgtccccgtccacgccaccagcctcctcctcatggaagtgacagactacaagctgaatggtctggacagcaacgccatgccgtcgcacctggccctcaccgtccgaggcctcatgtacccgcagcggcagcgggaggggaggaagagcctcaagggccacgtcgagatgaccgtcggcttcgacctcccgccggtgctcgccttggtcccggcgagcatcatcagaggcgtcggcgagacggtgctgaggcagatggcggagcagatgaagcaggacatggacacaggacttgcagcagatttcaacaagtacaggagggagaagctaacagagaggcgctcatcgccctgaattctgagacacatttcacaatcacatcccggcctgtatcgatgtatcatcaacaagtagccatgactaggaatttcttcagactcgccttgtcgtcaagcagggtcgtcaacctcttgcactatttattcattcataagttggatgacatcaaataatgatattaacttgatgtattcgcatcttattcattgtaaaaacgttgctcataattaaagagcatccatccaatctcaaagagatttctggagcaattatgtctgtatgtactgttcattcaccagttggaagacatcaatcaaataatgacaataa

SEQ ID NO: 81725 - DNA, 1184 bp, Zea Mays
ggggaaggaacgccacagactccgggaaattgccgttgcatttgcagcaggttagacatgtcgtcgtcgtcgtcgtcaatgctacgccttcctccatgccgtcccgcagtccatccagtgtgtaggggtgctggatcatcaggagggagcagtagcacgcacccactccgatcaagctcaagatcaaggccgtcgtcgctcaccgctgcgtgcgctctcaagacgccctcgaatggcggatcgagggggaaggtcaaccccagggacctcttcaccttctcccacaagttcagcaccgacatcccgatgagcgaaacgcaaggggcgtccatcgatgagtacctgcggaacagtcccaggatcgtcggagcggtgtttccggaccagcgcaagagaaggaagatcaacgacgaagaatggagcgtgcagctcctgcccatccggttcctgttcctgtcggcgtcgccggtcatcgtcatgcgcttcgtcagcaagtccggcgggaaggagtacccgcccaacgtccccgtccacgccaccagcctcctcctcatggaagtgactacaagctgaatggtctggacagcaacgccatgccgtcgcacctggccctcaccgtccgaggcctcatgtacccgcagcggcagcgggaggggaggaagagcctcaagggccacgtcgagatgaccgtcggcttcgacctcccgccggtgctcgccttggtcccggcgagcatcatcagaggcgtcggcgagacggtgctgaggcagatggcggagcagatgaagcaggacatggacacaggacttgcagcagatttcaacaagtacaggagggagaagctaacagagaggcgctcatcgccctgaattctgagacacatttcacaatcacatcccggcctgtatcgatgtatcatcaacaagtagccatgactaggaatttcttcagactcgccttgtcgtcaagcagggtcgtcaacctcttgcactatttattcattcataagttggatgacatcaaataatgatattaacttgatgtattcgcatcttattcattgtaaaaacgttgctcataattaaagagcatccatccaatctcaaagagatttctggagcaattatgtctgtatgtactgttcattcaccagttggaagacatcaatcaaataatgacaataa

SEQ ID NO: 81726 - DNA, 1985 bp, Zea Mays
gtggagcaaggaggcccacctggcgggcggggttctcgaccaatcactccagtatccagtctctctctcggctctcctctccccgatttccttccccacccgctgtcagtctcactccccgcgcgcgcgctctctctttcctcgccttcgccgccggcgacgagcttgagctcgagctggttcctcgtatagaagacgacggccgcggtatggagcccatgaacgtagacaacggcggcagcggtggccttgacgcgcagatcgaacagctgatgcagtgccgcccgctcgccgagcaagaggttaaggcactgtgcgagaaggccaaggagatattgatggaggaaagcaacgttcagcctgtcaagagtccagtgacaatatgtggtgatatacatggacaattccacgatcttgtagagcttttccgaattggcgggaagtgtccagacaccaattacttatttatgggagattatgtagatcgtggctactattctgttgagactgtcactatgctagtagcactaaaagtgaggtatccacatcgaattacaatccttcgtggaaaccacgagagtcggcagatcacacaggtgtatggattctacgacgaatgcctacgaaagtatggcaatgcaaatgtatggaagacatttacggatctttttgattattttcctctgacagctctgtgtgcgcagcttagatcgagtccaagaggttccccatgagggacctatgtgcgatctcttatggtcagatccagacgaccgatgtggttggggcatctcccctcgcggtgctggctacactttcgggcaggacatatcagagcagtttaatcacacaaacaatctcaaactcgtagctcgggctcatcaattagttatggagggatataactgggctcatgagcaaaaggttgtcaccatattcagtgctccaaattactgctatcgatgcggcaatatggcatccattttggaagttgacgactgcaacagccacacattcatccagtttgaaccagcccctaggagaggtgagccagatgtgacgcgaagaacaccggattatttcctttgagctgtcgatgttaccgtttcccagcctgtgtcgtgataatcgatgtcaacgtctgctggatcaagggccagacagaaataacaggggaatgccgaagcactatgcccagagtttcacccttttcaggcgacagagaagggcggccatccacctacaactctggccgccctctgttttatgcagtttttacagagtcgtggaactggccaaaaagaccggagtaccatttgcacctgtgtagcgtaagcttgtactacaaataggcgtgtgctaatctgtatcaccattcatcaattgcaaggaactgttgaactccttccatcagtaaagtaaattttggtaaaagaacggcttacagtgtcgggaatgacactatcagacagccacgatgtttcgtcagatttgttactgacgaccatcacagagttcattttgttttgaagtacaagcgcaagaatcaacagctcaacatggaggagagatgaacagcatggtatatctatctttagtgcaatgcaagcgcaaccttaggttgctgctacgtacgtagcagtagtatgaggatggaacgtacggcaagattggtcgtcggtcaccggccgtgtggtgtgacggcggcatggcaatggcatgtagcagcagcaacggtctgggcctggcagatagtgtacacgcccgccgtcgcgcatgccgggcggtcacacggaggtgctggcgagcagctggttggcggcgacgcccctgcccttcatgacgtgcttccggagtccagggatgtggacgttggtgatgtagtccgcccagtccacgccccgcacgtcgaagtggaaccgcgccctctccgccggcgacatggccgcgagcagcgcctccgtgttggcgttgtcgaagcggcc

SEQ ID NO: 81727 - DNA, 1174 bp, Zea Mays
gtggagcaaggaggcccacctggcgggcggggttctcgaccaatcactccagtatccagtctctctctcggctctcctctccccgatttccttccccacccgctgtcagtctcactccccgcgcgcgcgctctctctttcctcgccttcgccgccggcgacgagcttgagctcgagctggttcctcgtatagaagacgacggccgcggtatggagcccatgaacgtagacaacggcggcagcggtggccttgacgcgcagatcgaacagctgatgcagtgccgcccgctcgccgagcaagaggttaaggcactgtgcgagaaggccaaggagatattgatggaggaaagcaacgttcagcctgtcaagagtccagtgacaatatgtggtgatatacatggacaattccacgatcttgtagagcttttccgaattggcgggaagtgtccagacaccaattacttatttatgggagattatgtagatcgtggctactattctgttgagactgtcactatgctagtagcactaaaagtgaggtatccacatcgaattacaatccttcgtggaaaccacgagagtcggcagatcacacaggtgtatggattctacgacgaatgcctacgaaagtatggcaatgcaaatgtatggaagacatttacggatctttttgattattttcctctgacagctctggtggaatctgagattttctgccttcatggtggtctatctccatcaattgaaaatcttgatagtgtgcgcagcttagatcgagtccaagaggttccccatgagggacctatgtgcgatctcttatggtcagatccagacgaccgatgtggttggggcatctcccctcgcggtgctggctacactttcgggcaggacatatcagagcagtttaatcacacaaacaatctcaaactcgtagctcgggctcatcaattagttatggagggatataactgggctcatgagcaaaaggttgtcaccatattcagtgctccaaattactgctatcgatgcggcaatatggcatccattttggaagttgacgactgcaacagccacacattcatccaggtgttggcacgcgcgagagatgcgtgctgacacgcagagctttgcatgctgaccaaaaggcttaagaaagaagacaagggagaatgagg

SEQ ID NO: 81728 - DNA, 1308 bp, Zea Mays
cgcctcgagggcccacatcgctctctcagccatcacaccaccgcctcccccgtccccgcctcgccgccgccgccgtcgtggcctgccggcctccgatggcgaagacccgcatgcctgcgtccccaccccccgcagaaacgccgactccgcagcggcggcgcaagaagaagggccgcccgtccctcctcgacctccagcgccgcagcctccgcctccaggcccaaaaccctagccccgacccctcgcccacccgccgggagcccaaccccttcgacgacgatgaggacgggaccgggagcgggcggcggcgccagaagcgcttcaagagcgtcctatccggcgttgttaaggaggagctgggggagggggagaaggatgccgcgaaagcgacggggaaaggggacgctgcgtcggatggtgggcccgcggggactcccctcccagacaaaaagttgctactcttcatcctcgataggctccagaagaaggatacttatggagttttctcggagcctgtcgacgcagaggagcttccagattactttgacattattgatcatccgatggacttctcaacgatccgtgagaagctgttgaatgactcgtattctaagttggaacagtttgaggccctcaggcgaaggagcccataggagaaggggtcctcgccaaggacaacattcgctaaccggaggtctacaagcgaaggggtctacgacccaacgggcgacgacaacttgtcagcaaaacccgaggccttcgccatctcatcgactgaaggaccatccggccgggcgcaaccggagggagcgaaaatgcgaaggctgttggagcggaggctacgtgttgaccccaaacacctctagtgcaccagaagacaccgccaagggcccacccgtcagcgtagcgtgtgagtgtgttgtctggtatacgtggattactgtacgggaagtgatgtaatactccgttacaggggatattccctggatatagttggtagccgggggcagggccgtattttagaccacctacccccagacggatctataaatactctcgtcctgtagcgggatgggacacaagaagctacagttcccccagtttgtctcattgtgcaactgagctctcaccgctccccgagtgtttgggtccacctgtcagcccagccgcgtgacagtgcccaacaatagaattatttgctctttgtaactcccagcttcatccactgacatagggttgcactgaatgctgtattgctttgttgaatttcattttcttgatgcagaatatataaatatattacaatat

SEQ ID NO: 81729 - DNA, 2151 bp, Zea Mays
  misc_feature (2150)..(2151): n is a, c, g, or t
ctcggtttctacgggataatcttggtggagccagtccaaaggaggcaattggtggagccagtccaaaggaggcaagaaattactcgattccttgccaaatcactcgtcccctctctcggagcatctccaacaatacctcaaactagtgcctcaaattgaaatatggagctctacacagaaaaaactactccaacaacagtgccctatttcataattttttattaaaaaaattatagtacaccctctcaagtgactcaaatatactacaccgtagtgggctgccctataatctatatttagggctttactgttggagcggagtgttttgttggtgccctaaattctataaaatatacttattttcaaattataggacatttttatagttcacgttgttgtagatgctctcacacagacacagtccgcagtccacacgcacctcttccttctcccgccggagggcgcgccgcggaagacgccaatgagtttggtccggtccggtccgttggctccatgtaggcgcacgggagagtggagacacctgcctgatcctgcaatgcaatccgtcgccggctgctgatcaggcaacctcctgattcggagccatttcgcgggtgtcttgggggggcccatgcccatcgccgtgtttcgtttcctgctctgcccgctttggccgtgcattaatagccgcttccttgtgatagtcctccccttccgtcctctctccctctctctcttccacctcctctcctctcgctcagtcgctcgtcggctctgttcttgggagtgccagtcgggttgcgttgcggcagcacaaaaaaaccccccttcttggacagcatctgtctgcgccggtctgatgggcttgggttgcttcgggtgcttcgcgccggaggtggatgaggacctcaagccctccaagcccgacgactcgtcagggaccgatgcgagaaggaaggtcgcgccggatgtggccaacggctacgcgcacagcttcaccttcaaggacctgcttgtcgctaccggctacttcaaccacgccaatttcatcggagaagatggtggctgttaagcagctcactcaagatggcgtgcaggggaggaacgagttcctggtcgaggtgctcatgctgacaatgctcaaccatcgcaatctcgtcagcttggtcgggttctgcgcgcagggggacgagagactgctagtgtacgactacatgccgttcggaagcctggagagccatctgtttgacgtgcctctcggcaagaaaccgctggactggaacacgcgtgtgaggatagccgtgggagtcgcggaagggctctcttacctgcacaacgtagccgatccgcccgtcatctaccgcgatatgaaggctgctaacatcctgctgggcgaggacttcagcccgaggctgtctgacttcgggctcgccaaagtcggacctgtcggagacaggacccatgtgtccacgagagtgatgggcacctatggctactgcgctcctgactacgttgtgagcggcaagcttaccatgaaatccgacatatacagcttcggcgttcttctgctggagctgatcacggggaggaggatctacgatgcttcaaggcctaaaccggagcagagcctgctgacatggtcgaggccgttcctgcatgataagaggaagttccaccggcttgctgacccgtctctgctgggctgctacccgtcatcggcgctgaaccagctagtggtgatcagcatcatgtgcctccaagaccagccccatgtccgcccaatcatctccgatgttgtgataggcctgaaccacgtcgcgagccagccatgcaccgctgagcgcacgctgccggcgtgcatgacctccccaccgagcagcgggtcgccgcagctcgtcagcacgccggcaagaaggagaggtggtaggttgatcgggcagtagtatgcttagggctcaagctcacgtctaaagaggtcagatgagaccggtaggggagggcagttgaaattgaagccgtcaagttcagttccatcgagtcagcctttttgattgaagcggtctcgagtgacttgcttgagcagttgagcttgaccatgcatgcctattgctcttttttcgacttcttcattgttttcagttttgaattcnn

SEQ ID NO: 81730 - DNA, 2592 bp, Zea Mays
tccgttcccaccacgctgtccacgtcgtcccttctcctccttctctccagctagctcccctgattactactagtagtagtaggtagtagcaggctagcagcacacacagtcggagaacgcgcgcacagcagcagcagcacaagagcacacgccctgagatcagggaggaggaagtaagagagaaacgcgcggttggttgctcggcaccacaccgtacgcgcgcgccatggggaactgctgctgcggctccgctgacgccggcacgaagccgccgggtcgtcgtcctactcctaccaaaggaacgccgccgaaggggacgacggcatgggcgccggcgccgaagccgaagccgagcgacgacggcagcagcggggcgaagcagcgagagatgggaggcgacgacgacgacggtgctccgggcccgggcccggtcgtcgggcgggtcctgcaagcgccgaggctgagggagttcacgctcgccgagctgcgggccgccacgcgcgggttcaagccggagatggtgctcggggagggcggcttcggccgggtctacaagggctgggtcgacgagcgcacgctcaacccggccaagagcaacgccggcgtcatcgtcgccgtcaagaagctcaacccggagagcgtccagggcctgcaggagtggcagtcggaggtgaacttcttgggtaggctgtggcatcccaacctggtgaggctgctgggctactgcggcgaggacagggagctgctcctggtgtacgagttcatgtccaagggcagcctggaaaaccacctcttcagaagccggggtggaaacttggaggcgctgtcgtggagccggcggctcaagatcgccacgggcgcggcgcgcggcctcgccttcctgcactcgtcggagaagcaggtcatctacagggacttcaaggcgtccaacatcctcctcgactcggatttcactgccaagctgtcggacttcgggctcgccaagaacgggccctccgccgggaagtcgcacgtcacgacccggatcatcggcacctacggctacgcggcgccggagtacgtcgccaccgggcacctgtacgtgaagagcgacgtgtacggcttcggcgtggtgctgctggagctgctgacggggatgcgcgcgcacgacccgaaccgcccgagccaccagcacaacctggtggagtgggcgcggccctacctctccggcgccggcagcaagctcaagaccctcatggaccagcggatcgacggccagtaccacaccaaggccgcgctccgggccgcaaggctcgccggcaagtgcctcacgggcgaccccaagagccggccctccatggacgacgtcgtcgccgcgctcgaggacatcgaggcccttcagcagcaggccgccggggggcaccgggacctgccgccgcggcctggagcgcgccggtctgccgccgtaccatgattcttcacgcggcgcccctgttgatgcagtgcagcatggtcgttgcttggcttgagcaagcctagctgctgattcagacagaacactagcattggttcttcagcttcgttcaactaatcgccggtgttttcattctttactcgattattaatccctcattgttacagcagtatataggttcggtaatgttcttgttggaatcggacaggatgcagggataacgaatgatcacaatcatagcaacatacatgcaggtcccattctgcatttcaacggatgatgagctcgtattgtggccctgtcatcactccagctgctctctgctttgctctgggatatgaagtgacgaaggtagcggtagggcgtccctgttggattaatgtaaactactctggttccaccctctgacctacaatgctgtaaactagcttgttacatgcaacaaacaaactacctgtactgttaagaaactgaactagaagtacaaagtcccatactctgttaccacagagactgtatgcagcagcttactgcatacagactaatcccagttgatgatagggaacaccaacagtcactttgtctccgattctgccacacaaccaccaagcagcaacagacagaagtcactaggcacttgaccattggatgatgacacaagtgtactaggcattaacagatgctgcttgtgcaatgccaacaaattctttacttccaagagagaagggatgcttttactgcatcctgatgagctttgttccattgtcaggacaaatcagtttcacccaaggaaggaacaactgaaaagtacttactggccgttagagtgtaacaagattcttactgttggagtatttgatggcttgtacacatcatcaatacactcaagcaggtttagggttaaaagaacccactctgattcatcatccaagtacttgaggtccacatacatctcctgagcgatgccgaaccgctttagaatttctccaagaagatattttgagcgcacacaaggcttgctatccatgacacctcctcagaagtttccagcgacgctgtccttgcaggaacatcaacgccactacaaaccccatctaggttgtcatgcatggatttggcatgttctggtggagtcaacg

SEQ ID NO: 81731 - DNA, 254 bp, Zea Mays
atgatctcacaatgccaactaaaaatcacaatatctgagtacagttatgatcatcatattctattagcccatatttccaagaagtcgctccactgcagcatgaacatttccagcggtagcggccaaggctcggatgttctcttgtgtgtcaaagaaacccatttcttggagctgagctaattgtgtggcgtacagttcttctggcggtgctgcaaattttgacattactttgttgatgagaaaacttcaaaaaa

SEQ ID NO: 81732 - DNA, 276 bp, Zea Mays
atgagtggcatattcatcatttccctcatcaagttcggattttcagctagctgttgctgcatttggtctaatccagggggggcagatccaaacaacccctcactgttagcagcagcgcctgtagtacccagactttgcaacaagccacccaatcctgttgccggggaactggcaggagcagcagtggtaggttcttggttggctgcaggtgcagtagatgttggtgatagcacagcaccacgtaccatgtggattgtatggtctgtctccacacct

SEQ ID NO: 81733 - DNA, 1045 bp, Zea Mays
ctagctactgcacccgcacggcggcgcgaggagcgtgtgggtaagcttaggtgccatttgtgggtggctcgtggtggtggtgtgtataaaagcagtcgtcgttcgtgaagcacaagctgccccccctcctctccctcttctcgtgtcagcgcctggaccaaagacgatggccgtccctgttggtcgcctcgccgcctccacgctcctccagctcctcgtctggctcccgctccccgcgtccgcctgcgaccgctgcgtgcgccactccaaggccgcatactactacacctcctcgctcaccctcgccggtgggctcgtccaactggaagtccatgacgcgccacagcggcgggccggcgtggagcacgaggcaggcgccggcggggccgctccagctcagggtggtggtgacgggcggctacgacggcaagtgggtgtgggcggagcgcgaggtgctgccgcggcggcggcgcgccggcgaggtctacgacacgggcgtccagatcaccgacgtcgccctggagggatgcttcccctgcgacacgcgcgagtgggagtgatgcgcatgtggacgaaccacgccagtgacggcagaagcagaagcagaagcagaaaaccaaacgctgaagcttcgactcaactgaagagcctgcctgtagaattgctctagctagctcctccgtgccactgcccttttgggcttgcctcaaaggtcaccggagacgacgagggagacgactaattaacagacgctgacagagtgacgcgcgagaggagaggagagttccgaaccccccctctccgctgtactgtacatgagctgctgacgtgtcggataagtagtagtaggctagcgtcccggcgggtgctggaaagaataataataataatgtaacgaaagatggccggcatgaggttgagggagcgaccgagcgtgaagcaacttgggcgccatggacaatacagttgggacacagacacaccggtcgtctccacttgcttttgcttacggttccttttccattccattgcctggctttggcta

SEQ ID NO: 81734 - DNA, 1765 bp, Zea Mays
ctagctactgcacccgcacggcggcgcgaggagcgtgtgggtaagcttaggtgccatttgtgggtggctcgtggtggtggtgtgtataaaagcagtcgtcgttcgtgaagcacaagctgccccccctcctctccctcttctcgtgtcagcgcctggaccaaagacgatggccgtccctgttggtcgcctcgccgcctccacgctcctccagctcctcgtctggctcccgctccccgcgtccgcctgcgaccgctgcgtgcgccactccaaggccgcatactactacacctcctcgctcaccctcgccggcggctcctgcgggtacggcaccgaggccgcctccttcagcgccgggctcctcgccgccgccggccccgcgctgtaccgcggcggcgccggctgcggcgcctgcttccaggtgcggtgcaaggacaggaagctgtgcggcgcggcgggcgccagggtggtggtcacggaccgcgccaggaccaacggcaccgacctcgtgctcagcagcaccgcgttcgcggccatggcgcgccccggcatggcccggcgcctcgccggcctccgcgccgtcgacatcgagtacaagaggtaaaacacagtgacagacgaacacccaagcgatggaaaccaaccgcgccatgcctgctgtcatccgtacccatcatcataattcatacagatacagtgtagtactagtaggaaggagtagcatagatagaaccaaaacaggacaggaggatgaagaacggttcggcgcggttggttgacgccataaactctctctctctctctctctctctcgccttaaataaatgaacggccgaattggaacctactagcaataagtttcgtcagcgccgcgcgcgcacatgtgcagggtgccgtgcgagtacaagcacaggaacctgtcggtgagggtgcaggagaagaggcgctccccggggggccctggcgacctcgccatcaggtttctctaccagggcggccagaccgacatcgtcgccgtcgacgtcgcgcaggtgggctcgtccaactggaagtccatgacgcgccacagcggcgggccggcgtggagcacgaggcaggcgccggcggggccgctccagctcagggtggtggtgacgggcggctacgacggcaagtgggtgtgggcggagcgcgaggtgctgccgcggcggcggcgcgccggcgaggtctacgacacgggcgtccagatcaccgacgtcgccctggagggatgcttcccctgcgacacgcgcgagtgggagtgatgcgcatgtggacgaaccacgccagtgacggcagaagcagaagcagaagcagaaaaccaaacgctgaagcttcgactcaactgaagagcctgcctgtagaattgctctagctagctcctccgtgccactgcccttttgggcttgcctcaaaggtcaccggagacgacgagggagacgactaattaacagacgctgacagagtgacgcgcgagaggagaggagagttccgaaccccccctctccgctgtactgtacatgagctgctgacgtgtcggataagtagtagtaggctagcgtcccggcgggtgctggaaagaataataataataatgtaacgaaagatggccggcatgaggttgagggagcgaccgagcgtgaagcaacttgggcgccatggacaatacagttgggacacagacacaccggtcgtctccacttgcttttgcttacggttccttttccattccattgcctggctttggcta

SEQ ID NO: 81735 - DNA, 2459 bp, Zea Mays
tgcacgcacgcacgcgcggcggcttgcgcttaagataccgagaacccatacaaaggtagaggcgcagggccaaggccaaccaacccacccaccgcgaaaccttcctccctctccttctctgtccccttctctcccctcctctcctccgccgctcgacagcctactctccaagccaggagaacccaacccggccagccccacacgcacacgcccacgcccacgcccacgcagccgcggcggaggccatccggcgggcgtccatgggctgctgcggctcctcgctacgggcggggacgcagccggagaagaagccggcggcgggggcgctgcccccgcgccgcccctcctactcgctgagccagaaccagaaccaggcgccgccggcagcccgcgcgggcgcccaccaggtgccgccgctcagggagttctcgctggcggagctgcgcgccgccacggccggcttcgcgccggacaacatcgtgtccgagagcggcgacaaggcgccgaatttcgtgtacaggggccgcctcgagcccagccgccgcgcgatcgccgtcaagaagttcgccaagatggcgtggcccgaccccaagcagttcgcggaggaggccaagggggtcgggaagctgcgccaccgccgcctggccaacctgatcggctactgctgcgacggcgaggagcgcctgctcgtcgccgagttcatgcccaacgacacgctcgccaagcacctcttccactgggaaaaccagacaattgaatgggctatgcgcctgagagttgcatactacatcgctgaagcactggaatattgtagcaccgaaggaaggcctttgtatcatgacctaaatgcatatagggtcctctttgatgagaatggtgatcctcgtctttcatgctttggcctgatgaaaaacagcagggatgggaaaagctatagcacaaaccttgcatatacacctccagaatatttgagaaatggaagagtaacatcagaaagtgtcatattcagctttggcactatactgctggacctcctaagtggaaaacgtatacctccatcccgtgctcttgatatgataaaaggcaacaatatccaagtactgatggattcacatctggagggaaactactcaacagaagaggcaaccacattggttgaccttgcctctcagtgcctacagtacgaacctagggatcgtcccaacactaaaaagctggtttccgtacttgagcccttgcaaataaaatcagaggtaccatcctacgagatgcttggcattccgaagcatgaagaagaagcacctccccctccacaaccgcaacaccctctttctcccatgggcgaggcctgttccaggatggatctgactgccatccatcagattctagtgaacacgcattacagggatgatgaagggagcaacgaggaatggacgcagcagatgagggacatgctggaagctaggaaacgtggggactttgctttccgtgacaaagatttcaaggcagccatagactgctacacgcagttcgtcgacgtggggacgatggtgtcgccaacagtgtacgcgaggcggagcttgtgccacctcatgtgcgaccagcctgacgccgccctccgtgacgccatgcaagcgcagtgcgcgtacccagattggccaaccgcgttctacatgcaggccgtcgcgctctcgaagctgaacatgcagagcgacgctacggacatgctgaacgaggcgtcgcagctcgaagagaagcggcagaagaacacgaaaccttgatgaaagaccagacccctctctctcgtcccggggttacggtccttctgcggctcaaataggtttgtgttgagacatgctgctcggtccttccgaaacattgtggttagttcctggtgcaagggttgggttgggacttgggaatgttaactggggggaatgtgctgtagagtaactacctggtttggcatttctgtgatgcatttttttggggcccgtgtacatgttacactgacaaaagtagtcgaaacagccagaatgcaagggaatttaattctggttatcaaatcctgagcttgtttgtttattcagtgaactccagagtcaagggaatctacttctggttgtcaaaatctgaggttgtttgtttattcagtgaactcgagagtcgtctttgtctagataacgaaccctagtgctgctcgtactgatgacatggggaaggggaaccacatcattttgacaagcagcaaagctctatgctcattctagatttctgttatggcagtggctagatgttaaggcggcgggtagggtttagagagcataaggaggccagcaagagttttttttattagatacttcctccttttaaaatagtagtcattttagctctagatttttatgaccatattcataagaatgattatgaaccttgacatatatataaaacacatacat

SEQ ID NO: 81736 - DNA, 1993 bp, Zea Mays
tgcacgcacgcacgcgcggcggcttgcgcttaagataccgagaacccatacaaaggtagaggcgcagggccaaggccaaccaacccacccaccgcgaaaccttcctccctctccttctctgtccccttctctcccctcctctcctccgccgctcgacagcctactctccaagccaggagaacccaacccggccagccccacacgcacacgcccacgcccacgcccacgcagccgcggcggaggccatccggcgggcgtccatgggctgctgcggctcctcgctacgggcggggacgcagccggagaagaagccggcggcgggggcgctgcccccgcgccgcccctcctactcgctgagccagaaccagaaccaggcgccgccggcagcccgcgcgggcgcccaccaggtgccgccgctcagggagttctcgctggcggagctgcgcgccgccacggccggcttcgcgccggacaacatcgtgtccgagagcggcgacaaggcgccgaatttcgtgtacaggggccgcctcgagcccagccgccgcgcgatcgccgtcaagaagttcgccaagatggcgtggcccgaccccaagcagttcgcggaggaggccaagggggtcgggaagctgcgccaccgccgcctggccaacctgatcggctactgctgcgacggcgaggagcgcctgctcgtcgccgagttcatgcccaacgacacgctcgccaagcacctcttccactgggaaaaccagacaattgaatgggctatgcgcctgagagttgcatactacatcgctgaagcactggaatattgtagcaccgaaggaaggcctttgtatcatgacctaaatgcatatagggtcctctttgatgagaatggtgatcctcgtctttcatgctttggcctgatgaaaaacagcagggatgggaaaagctatagcacaaaccttgcatatacacctccagaatatttgagaaatggaagagtaacatcagaaagtgtcatattcagctttggcactatactgctggacctcctaagtggaaaacgtatacctccatcccgtgctcttgatatgataaaaggcaacaatatccaagtactgatggattcacatctggagggaaactactcaacagaagaggcaaccacattggttgaccttgcctctcagtgcctacagtacgaacctagggatcgtcccaacactaaaaagctggtttccgtacttgagcccttgcaaataaaatcagaggtaccatcctacgagatgcttggcattccgaagcatgaagaagaagcacctccccctccacaaccgcaacaccctctttctcccatgggcgaggcctgttccaggatggatctgactgccatccatcagattctagtgaacacgcattacagggatgatgaagggagcaacgagctatcgttccaggaatggacgcagcagatgagggacatgctggaagctaggaaacgtggggactttgctttccgtgacaaagatttcaaggcagccatagactgctacacgcagttcgtcgacgtggggacgatggtgtcgccaacagtgtacgcgaggcggagcttgtgccacctcatgtgcgaccagcctgacgccgccctccgtgacgccatgcaagcgcagtgcgcgtacccagattggccaaccgcgttctacatgcaggccgtcgcgctctcgaagctgaacatgcagagcgacgctacggacatgctgaacgaggcgtcgcagctcgaagagaagcggcagaagaacacgaaaccttgatgaaagaccagacccctctctctcgtcccggggttacggtccttctgcggctcaaatagataacgaacccttgtgctgctcgtactgacatggggatgggcaaccacaacatttttgacaagcagcgaagctctctgctcattctaggtttctgttatggcagtagctagatgttaaggcggcggttaggttgagtgaac

SEQ ID NO: 81737 - DNA, 1443 bp, Zea Mays
cagtagtagcagcgctgcaattcattcctagcaatgatcaggtatcaggacctctcagagaaccgcaagcatcatttccagttttaagattaaccaaaaatttcaacgtcagcaatattggacaacgggttcagctagaaagccctaaaacacaagtgttcaaagcaaagcaaagcatagctatagaagatgccaccggaatttggacattcagaccacagaaaaatactgaacttcagccgcagaagacaggtctcagagtggacaacgcctactcccagccttgggcagtcggtggcggggctgcttggtcccaaccagtaggagcaaccagaggaggtacagtgccgtccaccacaggtgcaggggccccagcttgatcccagccatcaccggtaggaaccggagctgcaaccaatattgggacagtaggagcaacaggcggcgcagtcacatcagaggtccactggtcaccaccccactgatcagctccttggtaatcagtgattgcggcaaactcaggggcaacagcagcttcctcctcctgctcctttgcttcctctgggtcccatgacctcccacttgtgcccagggaggatagtgcccctcatctgcagaaccatcctggccaaaagccagaacaggcatccaatgctgttcctccccttgttgttcgctgggatgccgatatcgacataccgcatgggagagtcagtatcacagaaggcaatggtggggatgttccccagagcagactccttaattggctgcaaacaatcaccaccataacaattagttcaccatcacactgcagggtccactcactaaatatttctgaactttgaaactgaaattctgttcacctgatggtcagtccttgggtcggtaaggatgagcagccgaggctcgctgaaggaggtctggagctggttagtgaaggtaccaggggtgtgcctcccagcgatggcatgagcgccagtgtactgagcgaacttgaggacagcacgctggccataggggcgggcggactggacgatgatgtcctgcgggttctcgatggcaacgataaccctcgctgcaagctgcagtttctcccatgtcttgccaaggttgatgatgcagataccgtcggtgcggcgcttaaaggcatagcgctccatctggaaatcgcagttcttggtgccaaggtggacgtcggcggcgagcatcatctgtatgtcctgctccttctgggacagcgcacgcaccgcgcctccgcctgctgccgctgccatgactgacggggatgcgggtggtcagggctggacgagcgaagcaaggggaggagggagggtcgccgcctcgctggatcgggatcgggctctgacgctctgtgtcttgggagtggcggctcggaggtgcgggagggatctcttatctgcgacgcctcgaaaaccctaggaa

SEQ ID NO: 81738 - DNA, 1484 bp, Zea Mays
cagtagtagcagcgctgcaattcattcctagcaatgatcaggtatcaggacctctcagagaaccgcaagcatcatttccagttttaagattaaccaaaaatttcaacgtcagcaatattggacaacgggttcagctagaaagccctaaaacacaagtgttcaaagcaaagcaaagcatagctatagaagatgccaccggaatttggacattcagaccacagaaaaatactgaacttcagccgcagaagacaggtctcagagtggacaacgcctactcccagccttgggcagtcggtggcggggctgcttggtcccaaccagtaggagcaaccagaggaggtacagtgccgtccaccacaggtgcaggggccccagcttgatcccagccatcaccggtaggaaccggagctgcaaccaatattgggacagtaggagcaacaggcggcgcagtcacatcagaggtccactggtcaccaccccactgatcagctccttggtaatcagtgattgcggcaaactcaggggcaacagcagcttcctcctcctgctcctttgcttcctctgggtccctgtagaagaacaaatccacctgcaaacaacattatcatataagaatgccaaggttataagtctggactcatcacatctccaatgtcattttgaacgacatcataagctagcatcataccatgacctcccacttgtgcccagggaggatagtgcccctcatctgcagaaccatcctggccaaaagccagaacaggcatccaatgctgttcctccccttgttgttcgctgggatgccgatatcgacataccgcatgggagagtcagtatcacagaaggcaatggtggggatgttccccagagcagactccttaattggctgcaaacaatcaccaccataacaattagttcaccatcacactgcagggtccactcactaaatatttctgaactttgaaactgaaattctgttcacctgatggtcagtccttgggtcggtaaggatgagcagccgaggctcgctgaaggaggtctggagctggttagtgaaggtaccaggggtgtgcctcccagcgatggcatgagcgccagtgtactgagcgaacttgaggacagcacgctggccataggggcgggcggactggacgatgatgtcctgcgggttctcgatggcaacgataaccctcgctgcaagctgcagtttctcccatgtcttgccaaggtggacgtcggcggcgagcatcatctgtatgtcctgctccttctgggacagcgcacgcaccgcgcctccgcctgctgccgctgccatgactgacggggatgcgggtggtcagggctggacgagcgaagcaaggggaggagggagggtcgccgcctcgctggatcgggatcgggctctgacgctctgtgtcttgggagtggcggctcggaggtgcgggagggatctcttatctgcgacgcctcgaaaaccctaggaa

SEQ ID NO: 81739 - DNA, 2110 bp, Zea Mays
cgggaatggcctaattaccttccccaaaatcaatttggcagcccaactacagttgcatgcgtgacatggtcccacgttacatcctcccgtgacacaggctgatgacaggcacagccaggccggtctgaaactctgaatctgccaccgacaagtgggttcgtccaccgcaccttctcccttcttcgtctccgtctctcccagccccatatcaacgggggacggctctctcgccattctccatccgaaaaacccatagaaacttccctcgtttctctctcctcggccccgcgggagcgaaccattatcagtcgctctcgttggtccggagcagcgatgcgcaccgcctgcctccgccccaccattcgaataaaaccctcccctccgcctccctccttccgccactcctaggcccattcccacccgcgccagcctcggccgccgcggccgcaccacccacggtcccgcctcgccgtggcatgagaagatggccgcgtgctccaggggcctcgcgtggccgccgttcgatctgaccacggcgaggggggcggcgtcctggccgcgccgccgcgccacgatccggtgctgctgcgccgggacggacccagagccgcggaggcgactctcgagggcggccgcggccgcgcccgagcgtgccgaggagtggcgcgtcgatgggaacaagccgtctgccgcggcaccggcccggcggcgcgctagtctcaccgccatgcccccgctccccttcccggcacctcgttctagaagacagttcaagcaacaggacttctacccacggtgcacgccgaggggcccggctcctcaatcctgtgattccccacccaagagagacactggtattgctagtgagaaggaatggggaatcaacttgctggacgaagccgtcaaggagtctggaataaatgaagatggaagcacttggtatagggagagtggagaagatactggcgagaatgggtaccgctgccgctgggcaagaatgggaggacagaaccatgatggttccaccgaatggaaagagacttggtgggagaaaagtgactggactggatataaggaattaggtgcagagaaatctgggaagaatgctgaaggtgattcttggtgggagaagtggaaagaagtactgtaccaagatgaatggagcaatcttgcaagaatagagaagagtgctgaaaaacaagcaaaatcaggtgcagaaaatgctgggtggtatgagaaatggtgggagaaatatgatgccaaaggctggacagaaaaaggtgctcacaaatatggaaggttgaatgagcagtcgtggtgggagagatggggtgaacattatgatggccgtggatttgttttgaaatggacagataagtgggcagagacagacttaggcaccaaatggggggacaagtgggaggagaaattctttgcaggaattggttctcgacaaggggagacatggcatgtatctcctggcagagaacgttggtcaagaacttggggagaagaacactttggtaacggtaaagtccacaagtatggaaagagcacaactggcgagagctgggatttggtagtcgacgaggagacatactatgaggcggagccccactacggatgggccgatgtcgtgggggactcgacacagctgctgtccatacaacccgtggagaggccaccgggagtgttcccggccatcgacttcagctcggcgcccccgccaaaggacgctccgccgggcatgcctccttcccctctggatggagggaactagagctgccagcacaagcgaattttttctttctagaggctccaaattttgcctgtaagggaacagcattctttgtaggaagttaatggacccaatttcctgcgttcattggttggttcactctctgctacgctttcctttcctcccaaacatgccgttgcgttcctctggttggcgaccgggtgaatgcaataatcaaacggcccacccgtggtttgtattgctcgctgaggataaagcctttgttctgccttcaaggcagtgttggaaactcggccattttcctcgcgtaagggacagagattttcactccgaaccaaacggagagagggg

SEQ ID NO: 81740 - DNA, 1980 bp, Zea Mays
ctgaaactctgaatctgccaccgacaagtgggttcgtccaccgcaccttctcccttcttcgtctccgtctctcccagccccatatcaacgggggacggctctctcgccattctccatccgaaaaacccatagaaacttccctcgtttctctctcctcggccccgcgggagcgaaccattatcagtcgctctcgttggtccggagcagcgatgcgcaccgcctgcctccgccccaccattcgaataaaaccctcccctccgcctccctccttccgccactcctaggcccattcccacccgcgccagcctcggccgccgcggccgcaccacccacggtcccgcctcgccgtggcatgagaagatggccgcgtgctccaggggcctcgcgtggccgccgttcgatctgaccacggcgaggggggcggcgtcctggccgcgccgccgcgccacgatccggtgctgctgcgccgggacggacccagagccgcggaggcgactctcgagggcggccgcggccgcgcccgagcgtgccgaggagtggcgcgtcgatgggaacaagccgtctgccgcggcaccggcccggcggcgcgctagtctcaccgccatgcccccgctccccttcccggcacctcgttctagaagacagttcaagcaacaggacttctacccacggtgcacgccgaggggcccggctcctcaatcctgtgattccccacccaagagagacactggtattgctagtgagaaggaatggggaatcaacttgctggacgaagccgtcaaggagtctggaataaatgaagatggaagcacttggtatagggagagtggagaagatactggcgagaatgggtaccgctgccgctgggcaagaatgggaggacagaaccatgatggttccaccgaatggaaagagacttggtgggagaaaagtgactggactggatataaggaattagagaaatctgggaagaatgctgaaggtgattcttggtgggagaagtggaaagaagtactgtaccaagatgaatggagcaatcttgcaagaatagagaagagtgctgaaaaacaagcaaaatcaggtgcagaaaatgctgggtggtatgagaaatggtgggagaaatatgatgccaaaggctggacagaaaaaggtgctcacaaatatggaaggttgaatgagcagtcgtggtgggagagatggggtgaacattatgatggccgtggatttgttttgaaatggacagataagtgggcagagacagacttaggcaccaaatggggggacaagtgggaggagaaattctttgcaggaattggttctcgacaaggggagacatggcatgtatctcctggcagagaacgttggtcaagaacttggggagaagaacactttggtaacggtaaagtccacaagtatggaaagagcacaactggcgagagctgggatttggtagtcgacgaggagacatactatgaggcggagccccactacggatgggccgatgtcgtgggggactcgacacagctgctgtccatacaacccgtggagaggccaccgggagtgttcccggccatcgacttcagctcggcgcccccgccaaaggacgctccgccgggcatgcctccttcccctctggatggagggaactagagctgccagcacaagcgaattttttctttctagaggctccaaattttgcctgtaagggaacagcattctttgtaggaagttaatggacccaatttcctgcgttcattggttggttcactctctgctacgctttcctttcctcccaaacatgccgttgcgttcctctggttggcgaccgggtgaatgcaataatcaaacggcccacccgtggtttgtattgctcgctgaggataaagcctttgttctgccttcaaggcagtgttggaaactcggccattttcctcgcgtaagggacagagattttcactccgaaccaaacggagagagggg

SEQ ID NO: 81741 - DNA, 733 bp, Zea Mays
ctgaatctgccaccgacaagtgggttcgtccaccgcaccttctcccttcttcgtctccgtctctcccagccccatatcaacgggggacggctctctcgccattctccatccgaaaaacccatagaaacttccctcgtttctctctcctcggccccgcgggagcgaaccattatcagtcgctctcgttggtccggagcagcgatgcgcaccgcctgcctccgccccaccattcgaataaaaccctcccctccgcctccctccttccgccactcctaggcccattcccacccgcgccagcctcggccgccgcggccgcaccacccacggtcccgcctcgccgtggcatgagaagatggccgcgtgctccaggggcctcgcgtggccgccgttcgatctgaccacggcgaggggggcggcgtcctggccgcgccgccgcgccacgatccggtgctgctgcgccgggacggacccagagccgcggaggcgactctcgagggcggccgcggccgcgcccgagcgtgccgaggagtggcgcgtcgatgggaacaagccgtctgccgcggcaccggcccggcggcgcgctagtctcaccgccatgcccccgctccccttcccggcacctcgtatagttctagaagacagttcaagcaacaggacttctacccacggtgcacgccgaggggcccggctcctcaatcctgtgattccccacccaagagagacactgatatgg

SEQ ID NO: 81742 - DNA, 2060 bp, Zea Mays
ctgaatctgccaccgacaagtgggttcgtccaccgcaccttctcccttcttcgtctccgtctctcccagccccatatcaacgggggacggctctctcgccattctccatccgaaaaacccatagaaacttccctcgtttctctctcctcggccccgcgggagcgaaccattatcagtcgctctcgttggtccggagcagcgatgcgcaccgcctgcctccgccccaccattcgaataaaaccctcccctccgcctccctccttccgccactcctaggcccattcccacccgcgccagcctcggccgccgcggccgcaccacccacggtcccgcctcgccgtggcatgagaagatggccgcgtgctccaggggcctcgcgtggccgccgttcgatctgaccacggcgaggggggcggcgtcctggccgcgccgccgcgccacgatccggtgctgctgcgccgggacggacccagagccgcggaggcgactctcgagggcggccgcggccgcgcccgagcgtgccgaggagtggcgcgtcgatgggaacaagccgtctgccgcggcaccggcccggcggcgcgctagtctcaccgccatgcccccgctccccttcccggcacctcgttctagaagacagttcaagcaacaggacttctacccacggtgcacgccgaggggcccggctcctcaatcctgtgattccccacccaagagagacactggtattgctagtgagaaggaatggggaatcaacttgctggacgaagccgtcaaggagtctggaataaatgaagatggaagcacttggtatagggagagtggagaagatactggcgagaatgggtaccgctgccgctgggcaagaatgggaggacagaaccatgatggttccaccgaatggaaagagacttggtgggagaaaagtgactggactggatataaggaattaggtgcagagaaatctgggaagaatgctgaaggtgattcttggtgggagaagtggaaagaagtactgtaccaagatgaatggagagttgtatacagactttcttctagccttgctttttttaaggctactttgaaacaatggtgattccgtagctctgctgagaatcaatcttgcaagaatagagaagagtgctgaaaaacaagcaaaatcaggtgcagaaaatgctgggtggtatgagaaatggtgggagaaatatgatgccaaaggctggacagaaaaaggtgctcacaaatatggaaggttgaatgagcagtcgtggtgggagagatggggtgaacattatgatggccgtggatttgttttgaaatggacagataagtgggcagagacagacttaggcaccaaatggggggacaagtgggaggagaaattctttgcaggaattggttctcgacaaggggagacatggcatgtatctcctggcagagaacgttggtcaagaacttggggagaagaacactttggtaacggtaaagtccacaagtatggaaagagcacaactggcgagagctgggatttggtagtcgacgaggagacatactatgaggcggagccccactacggatgggccgatgtcgtgggggactcgacacagctgctgtccatacaacccgtggagaggccaccgggagtgttcccggccatcgacttcagctcggcgcccccgccaaaggacgctccgccgggcatgcctccttcccctctggatggagggaactagagctgccagcacaagcgaattttttctttctagaggctccaaattttgcctgtaagggaacagcattctttgtaggaagttaatggacccaatttcctgcgttcattggttggttcactctctgctacgctttcctttcctcccaaacatgccgttgcgttcctctggttggcgaccgggtgaatgcaataatcaaacggcccacccgtggtttgtattgctcgctgaggataaagcctttgttctgccttcaaggcagtgttggaaactcggccattttcctcgcgtaagggacagagattttcactccgaaccaaacggagagagggg

SEQ ID NO: 81743 - DNA, 2152 bp, Zea Mays
ctgaatctgccaccgacaagtgggttcgtccaccgcaccttctcccttcttcgtctccgtctctcccagccccatatcaacgggggacggctctctcgccattctccatccgaaaaacccatagaaacttccctcgtttctctctcctcggccccgcgggagcgaaccattatcagtcgctctcgttggtccggagcagcgatgcgcaccgcctgcctccgccccaccattcgaataaaaccctcccctccgcctccctccttccgccactcctaggcccattcccacccgcgccagcctcggccgccgcggccgcaccacccacggtcccgcctcgccgtggcatgagaagatggccgcgtgctccaggggcctcgcgtggccgccgttcgatctgaccacggcgaggggggcggcgtcctggccgcgccgccgcgccacgatccggtgctgctgcgccgggacggacccagagccgcggaggcgactctcgagggcggccgcggccgcgcccgagcgtgccgaggagtggcgcgtcgatgggaacaagccgtctgccgcggcaccggcccggcggcgcgctagtctcaccgccatgcccccgctccccttcccggcacctcgttctagaagacagttcaagcaacaggacttctacccacggtgcacgccgaggggcccggctcctcaatcctgtgattccccacccaagagagacactggtattgctagtgagaaggaatggggaatcaacttgctggacgaagccgtcaaggagtctggaataaatgaagatggaagcacttggtatagggagagtggagaagatactggcgagaatgggtaccgctgccgctgggcaagaatgggaggacagaaccatgatggttccaccgaatggaaagagacttggtgggagaaaagtgactggactggatataaggaattaggtgcagagaaatctgggaagaatgctgaaggtgattcttggtgggagaagtggaaagaagtactgtaccaagatgaatggagagttgtatacagactttcttctagccttgctttttttaaggctactttgaaacaatggtgattccgtagctctgctgagaatgactccaacacaatctgcaaacaaatgatcagctatatcattgttcttgatacctatttggagatccagtccatccattggtgtatctgtcacaatcttgcaagaatagagaagagtgctgaaaaacaagcaaaatcaggtgcagaaaatgctgggtggtatgagaaatggtgggagaaatatgatgccaaaggctggacagaaaaaggtgctcacaaatatggaaggttgaatgagcagtcgtggtgggagagatggggtgaacattatgatggccgtggatttgttttgaaatggacagataagtgggcagagacagacttaggcaccaaatggggggacaagtgggaggagaaattctttgcaggaattggttctcgacaaggggagacatggcatgtatctcctggcagagaacgttggtcaagaacttggggagaagaacactttggtaacggtaaagtccacaagtatggaaagagcacaactggcgagagctgggatttggtagtcgacgaggagacatactatgaggcggagccccactacggatgggccgatgtcgtgggggactcgacacagctgctgtccatacaacccgtggagaggccaccgggagtgttcccggccatcgacttcagctcggcgcccccgccaaaggacgctccgccgggcatgcctccttcccctctggatggagggaactagagctgccagcacaagcgaattttttctttctagaggctccaaattttgcctgtaagggaacagcattctttgtaggaagttaatggacccaatttcctgcgttcattggttggttcactctctgctacgctttcctttcctcccaaacatgccgttgcgttcctctggttggcgaccgggtgaatgcaataatcaaacggcccacccgtggtttgtattgctcgctgaggataaagcctttgttctgccttcaaggcagtgttggaaactcggccattttcctcgcgtaagggacagagattttcactccgaaccaaacggagagagggg

SEQ ID NO: 81744 - DNA, 2574 bp, Zea Mays
ctgaatctgccaccgacaagtgggttcgtccaccgcaccttctcccttcttcgtctccgtctctcccagccccatatcaacgggggacggctctctcgccattctccatccgaaaaacccatagaaacttccctcgtttctctctcctcggccccgcgggagcgaaccattatcagtcgctctcgttggtccggagcagcgatgcgcaccgcctgcctccgccccaccattcgaataaaaccctcccctccgcctccctccttccgccactcctaggcccattcccacccgcgccagcctcggccgccgcggccgcaccacccacggtcccgcctcgccgtggcatgagaagatggccgcgtgctccaggggcctcgcgtggccgccgttcgatctgaccacggcgaggggggcggcgtcctggccgcgccgccgcgccacgatccggtgctgctgcgccgggacggacccagagccgcggaggcgactctcgagggcggccgcggccgcgcccgagcgtgccgaggagtggcgcgtcgatgggaacaagccgtctgccgcggcaccggcccggcggcgcgctagtctcaccgccatgcccccgctccccttcccggcacctcgtatagttctagaagacagttcaagcaacaggacttctacccacggtgcacgccgaggggcccggctcctcaatcctgtgattccccacccaagagagatctctgatttgctaaggaaatgcatgtgtttgtttggcacctgccttatagacactggtattgctagtgagaaggaatggggaatcaacttgctggacgaagccgtcaaggagtctggaataaatgaagatggaagcacttggtatagggagagtggagaagatactggcgagaatgggtaccgctgccgctgggcaagaatgggaggacagaaccatgatggttccaccgaatggaaagagacttggtgggagaaaagtgactggactggatataaggaattaggtgcagagaaatctgggaagaatgctgaaggtgattcttggtgggagaagtggaaagaagtactgtaccaagatgaatggagagttgtatacagactttcttctagccttgctttttttaaggctactttgaaacaatggtgattccgtagctctgctgagaatgactccaacacaatctgcaaacaaatgatcagctatatcattgttcttgatacctatttggagatccagtccatccattggtgtatctgtcagtatgtgtcggactctagcccaacctttgcttaagccttacctgccatatgtcaatcttgcaagaatagagaagagtgctgaaaaacaagcaaaatcaggtgcagaaaatgctgggtggtatgagaaatggtgggagaaatatgatgccaaaggctggacagaaaaaggtgctcacaaatatggaaggttgaatgagcagtcgtggtgggagagatggggtgaacattatgatggccgtggatttgttttgaaatggacagataagtgggcagagacagacttaggcaccaaatggggggacaagtgggaggagaaattctttgcaggaattggttctcgacaaggggagacatggcatgtatctcctggcagagaacgttggtcaagaacttggggagaagaacactttggtaacgggtacgtgacataatactgttttggtctagcatttgtacatactccctccgtttatttttagttgtcgctgcatagttcaattttgcactattcagcgacaactaaaacgaaacggagtgagtacttatttggctgaaatttgggccgcagacttttcaaacatcttattggtatatttttatagttcccagcatcagcatgcaaatgattttatcttacgtatcggtactagcagtaaatcgttttgaagccgactattctgttgctaattcgctacttcacaactaaaccacatatttgtcttggatttcagtaaagtccacaagtatggaaagagcacaactggcgagagctgggatttggtagtcgacgaggagacatactatgaggcggagccccactacggatgggccgatgtcgtgggggactcgacacagctgctgtccatacaacccgtggagaggccaccgggagtgttcccggccatcgacttcagctcggcgcccccgccaaaggacgctccgccgggcatgcctccttcccctctggatggagggaactagagctgccagcacaagcgaattttttctttctagaggctccaaattttgcctgtaagggaacagcattctttgtaggaagttaatggacccaatttcctgcgttcattggttggttcactctctgctacgctttcctttcctcccaaacatgccgttgcgttcctctggttggcgaccgggtgaatgcaataatcaaacggcccacccgtggtttgtattgctcgctgaggataaagcctttgttctgccttcaaggcagtgttggaaactcggccattttcctcgcgtaagggacagagattttcactccgaaccaaacggagagagggg

SEQ ID NO: 81745 - DNA, 2522 bp, Zea Mays
ctgaatctgccaccgacaagtgggttcgtccaccgcaccttctcccttcttcgtctccgtctctcccagccccatatcaacgggggacggctctctcgccattctccatccgaaaaacccatagaaacttccctcgtttctctctcctcggccccgcgggagcgaaccattatcagtcgctctcgttggtccggagcagcgatgcgcaccgcctgcctccgccccaccattcgaataaaaccctcccctccgcctccctccttccgccactcctaggcccattcccacccgcgccagcctcggccgccgcggccgcaccacccacggtcccgcctcgccgtggcatgagaagatggccgcgtgctccaggggcctcgcgtggccgccgttcgatctgaccacggcgaggggggcggcgtcctggccgcgccgccgcgccacgatccggtgctgctgcgccgggacggacccagagccgcggaggcgactctcgagggcggccgcggccgcgcccgagcgtgccgaggagtggcgcgtcgatgggaacaagccgtctgccgcggcaccggcccggcggcgcgctagtctcaccgccatgcccccgctccccttcccggcacctcgtatagttctagaagacagttcaagcaacaggacttctacccacggtgcacgccgaggggcccggctcctcaatcctgtgattccccacccaagagagatctctgatttgctaaggaaatgcatgtgtttgtttggcacctgccttatagacactggtattgctagtgagaaggaatggggaatcaacttgctggacgaagccgtcaaggagtctggaataaatgaagatggaagcacttggtatagggagagtggagaagatactggcgagaatgggtaccgctgccgctgggcaagaatgggaggacagaaccatgatggttccaccgaatggaaagagacttggtgggagaaaagtgactggactggatataaggaattaggtgcagagaaatctgggaagaatgctgaaggtgattcttggtgggagaagtggaaagaagtactgtaccaagatgaatggagagttgtatacagactttcttctagccttgctttttttaaggctactttgaaacaatggtgattccgtagctctgctgagaatgactccaacacaatctgcaaacaaatgatcagctatatcattgttcttgatacctatttggagatccagtccatccattggtgtatctgtcacaatcttgcaagaatagagaagagtgctgaaaaacaagcaaaatcaggtgcagaaaatgctgggtggtatgagaaatggtgggagaaatatgatgccaaaggctggacagaaaaaggtgctcacaaatatggaaggttgaatgagcagtcgtggtgggagagatggggtgaacattatgatggccgtggatttgttttgaaatggacagataagtgggcagagacagacttaggcaccaaatggggggacaagtgggaggagaaattctttgcaggaattggttctcgacaaggggagacatggcatgtatctcctggcagagaacgttggtcaagaacttggggagaagaacactttggtaacgggtacgtgacataatactgttttggtctagcatttgtacatactccctccgtttatttttagttgtcgctgcatagttcaattttgcactattcagcgacaactaaaacgaaacggagtgagtacttatttggctgaaatttgggccgcagacttttcaaacatcttattggtatatttttatagttcccagcatcagcatgcaaatgattttatcttacgtatcggtactagcagtaaatcgttttgaagccgactattctgttgctaattcgctacttcacaactaaaccacatatttgtcttggatttcagtaaagtccacaagtatggaaagagcacaactggcgagagctgggatttggtagtcgacgaggagacatactatgaggcggagccccactacggatgggccgatgtcgtgggggactcgacacagctgctgtccatacaacccgtggagaggccaccgggagtgttcccggccatcgacttcagctcggcgcccccgccaaaggacgctccgccgggcatgcctccttcccctctggatggagggaactagagctgccagcacaagcgaattttttctttctagaggctccaaattttgcctgtaagggaacagcattctttgtaggaagttaatggacccaatttcctgcgttcattggttggttcactctctgctacgctttcctttcctcccaaacatgccgttgcgttcctctggttggcgaccgggtgaatgcaataatcaaacggcccacccgtggtttgtattgctcgctgaggataaagcctttgttctgccttcaaggcagtgttggaaactcggccattttcctcgcgtaagggacagagattttcactccgaaccaaacggagagagggg

SEQ ID NO: 81746 - DNA, 1967 bp, Zea Mays
ctgaatctgccaccgacaagtgggttcgtccaccgcaccttctcccttcttcgtctccgtctctcccagccccatatcaacgggggacggctctctcgccattctccatccgaaaaacccatagaaacttccctcgtttctctctcctcggccccgcgggagcgaaccattatcagtcgctctcgttggtccggagcagcgatgcgcaccgcctgcctccgccccaccattcgaataaaaccctcccctccgcctccctccttccgccactcctaggcccattcccacccgcgccagcctcggccgccgcggccgcaccacccacggtcccgcctcgccgtggcatgagaagatggccgcgtgctccaggggcctcgcgtggccgccgttcgatctgaccacggcgaggggggcggcgtcctggccgcgccgccgcgccacgatccggtgctgctgcgccgggacggacccagagccgcggaggcgactctcgagggcggccgcggccgcgcccgagcgtgccgaggagtggcgcgtcgatgggaacaagccgtctgccgcggcaccggcccggcggcgcgctagtctcaccgccatgcccccgctccccttcccggcacctcgtatagttctagaagacagttcaagcaacaggacttctacccacggtgcacgccgaggggcccggctcctcaatcctgtgattccccacccaagagagtgagaaggaatggggaatcaacttgctggacgaagccgtcaaggagtctggaataaatgaagatggaagcacttggtatagggagagtggagaagatactggcgagaatgggtaccgctgccgctgggcaagaatgggaggacagaaccatgatggttccaccgaatggaaagagacttggtgggagaaaagtgactggactggatataaggaattaggtgcagagaaatctgggaagaatgctgaaggtgattcttggtgggagaagtggaaagaagtactgtaccaagatgaatggagcaatcttgcaagaatagagaagagtgctgaaaaacaagcaaaatcaggtgcagaaaatgctgggtggtatgagaaatggtgggagaaatatgatgccaaaggctggacagaaaaaggtgctcacaaatatggaaggttgaatgagcagtcgtggtgggagagatggggtgaacattatgatggccgtggatttgttttgaaatggacagataagtgggcagagacagacttaggcaccaaatggggggacaagtgggaggagaaattctttgcaggaattggttctcgacaaggggagacatggcatgtatctcctggcagagaacgttggtcaagaacttggggagaagaacactttggtaacggtaaagtccacaagtatggaaagagcacaactggcgagagctgggatttggtagtcgacgaggagacatactatgaggcggagccccactacggatgggccgatgtcgtgggggactcgacacagctgctgtccatacaacccgtggagaggccaccgggagtgttcccggccatcgacttcagctcggcgcccccgccaaaggacgctccgccgggcatgcctccttcccctctggatggagggaactagagctgccagcacaagcgaattttttctttctagaggctccaaattttgcctgtaagggaacagcattctttgtaggaagttaatggacccaatttcctgcgttcattggttggttcactctctgctacgctttcctttcctcccaaacatgccgttgcgttcctctggttggcgaccgggtgaatgcaataatcaaacggcccacccgtggtttgtattgctcgctgaggataaagcctttgttctgccttcaaggcagtgttggaaactcggccattttcctcgcgtaagggacagagattttcactccgaaccaaacggagagagggg

SEQ ID NO: 81747 - DNA, 2030 bp, Zea Mays
ctgaatctgccaccgacaagtgggttcgtccaccgcaccttctcccttcttcgtctccgtctctcccagccccatatcaacgggggacggctctctcgccattctccatccgaaaaacccatagaaacttccctcgtttctctctcctcggccccgcgggagcgaaccattatcagtcgctctcgttggtccggagcagcgatgcgcaccgcctgcctccgccccaccattcgaataaaaccctcccctccgcctccctccttccgccactcctaggcccattcccacccgcgccagcctcggccgccgcggccgcaccacccacggtcccgcctcgccgtggcatgagaagatggccgcgtgctccaggggcctcgcgtggccgccgttcgatctgaccacggcgaggggggcggcgtcctggccgcgccgccgcgccacgatccggtgctgctgcgccgggacggacccagagccgcggaggcgactctcgagggcggccgcggccgcgcccgagcgtgccgaggagtggcgcgtcgatgggaacaagccgtctgccgcggcaccggcccggcggcgcgctagtctcaccgccatgcccccgctccccttcccggcacctcgttctagaagacagttcaagcaacaggacttctacccacggtgcacgccgaggggcccggctcctcaatcctgtgattccccacccaagagagatctctgatttgctaaggaaatgcatgtgtttgtttggcacctgccttatagacactggtattgctagtgagaaggaatggggaatcaacttgctggacgaagccgtcaaggagtctggaataaatgaagatggaagcacttggtatagggagagtggagaagatactggcgagaatgggtaccgctgccgctgggcaagaatgggaggacagaaccatgatggttccaccgaatggaaagagacttggtgggagaaaagtgactggactggatataaggaattaggtgcagagaaatctgggaagaatgctgaaggtgattcttggtgggagaagtggaaagaagtactgtaccaagatgaatggagcaatcttgcaagaatagagaagagtgctgaaaaacaagcaaaatcaggtgcagaaaatgctgggtggtatgagaaatggtgggagaaatatgatgccaaaggctggacagaaaaaggtgctcacaaatatggaaggttgaatgagcagtcgtggtgggagagatggggtgaacattatgatggccgtggatttgttttgaaatggacagataagtgggcagagacagacttaggcaccaaatggggggacaagtgggaggagaaattctttgcaggaattggttctcgacaaggggagacatggcatgtatctcctggcagagaacgttggtcaagaacttggggagaagaacactttggtaacggtaaagtccacaagtatggaaagagcacaactggcgagagctgggatttggtagtcgacgaggagacatactatgaggcggagccccactacggatgggccgatgtcgtgggggactcgacacagctgctgtccatacaacccgtggagaggccaccgggagtgttcccggccatcgacttcagctcggcgcccccgccaaaggacgctccgccgggcatgcctccttcccctctggatggagggaactagagctgccagcacaagcgaattttttctttctagaggctccaaattttgcctgtaagggaacagcattctttgtaggaagttaatggacccaatttcctgcgttcattggttggttcactctctgctacgctttcctttcctcccaaacatgccgttgcgttcctctggttggcgaccgggtgaatgcaataatcaaacggcccacccgtggtttgtattgctcgctgaggataaagcctttgttctgccttcaaggcagtgttggaaactcggccattttcctcgcgtaagggacagagattttcactccgaaccaaacggagagagggg

SEQ ID NO: 81748 - DNA, 2070 bp, Zea Mays
ctgaatctgccaccgacaagtgggttcgtccaccgcaccttctcccttcttcgtctccgtctctcccagccccatatcaacgggggacggctctctcgccattctccatccgaaaaacccatagaaacttccctcgtttctctctcctcggccccgcgggagcgaaccattatcagtcgctctcgttggtccggagcagcgatgcgcaccgcctgcctccgccccaccattcgaataaaaccctcccctccgcctccctccttccgccactcctaggcccattcccacccgcgccagcctcggccgccgcggccgcaccacccacggtcccgcctcgccgtggcatgagaagatggccgcgtgctccaggggcctcgcgtggccgccgttcgatctgaccacggcgaggggggcggcgtcctggccgcgccgccgcgccacgatccggtgctgctgcgccgggacggacccagagccgcggaggcgactctcgagggcggccgcggccgcgcccgagcgtgccgaggagtggcgcgtcgatgggaacaagccgtctgccgcggcaccggcccggcggcgcgctagtctcaccgccatgcccccgctccccttcccggcacctcgttctagaagacagttcaagcaacaggacttctacccacggtgcacgccgaggggcccggctcctcaatcctgtgattccccacccaagagagacactggtattgctagtgagaaggaatggggaatcaacttgctggacgaagccgtcaaggagtctggaataaatgaagatggaagcacttggtatagggagagtggagaagatactggcgagaatgggtaccgctgccgctgggcaagaatgggaggacagaaccatgatggttccaccgaatggaaagagacttggtgggagaaaagtgactggactggatataaggaattaggtgcagagaaatctgggaagaatgctgaaggtgattcttggtgggagaagtggaaagaagtactgtaccaagatgaatggaggactccaacacaatctgcaaacaaatgatcagctatatcattgttcttgatacctatttggagatccagtccatccattggtgtatctgtcacaatcttgcaagaatagagaagagtgctgaaaaacaagcaaaatcaggtgcagaaaatgctgggtggtatgagaaatggtgggagaaatatgatgccaaaggctggacagaaaaaggtgctcacaaatatggaaggttgaatgagcagtcgtggtgggagagatggggtgaacattatgatggccgtggatttgttttgaaatggacagataagtgggcagagacagacttaggcaccaaatggggggacaagtgggaggagaaattctttgcaggaattggttctcgacaaggggagacatggcatgtatctcctggcagagaacgttggtcaagaacttggggagaagaacactttggtaacggtaaagtccacaagtatggaaagagcacaactggcgagagctgggatttggtagtcgacgaggagacatactatgaggcggagccccactacggatgggccgatgtcgtgggggactcgacacagctgctgtccatacaacccgtggagaggccaccgggagtgttcccggccatcgacttcagctcggcgcccccgccaaaggacgctccgccgggcatgcctccttcccctctggatggagggaactagagctgccagcacaagcgaattttttctttctagaggctccaaattttgcctgtaagggaacagcattctttgtaggaagttaatggacccaatttcctgcgttcattggttggttcactctctgctacgctttcctttcctcccaaacatgccgttgcgttcctctggttggcgaccgggtgaatgcaataatcaaacggcccacccgtggtttgtattgctcgctgaggataaagcctttgttctgccttcaaggcagtgttggaaactcggccattttcctcgcgtaagggacagagattttcactccgaaccaaacggagagagggg

SEQ ID NO: 81749 - DNA, 1983 bp, Zea Mays
ctgaatctgccaccgacaagtgggttcgtccaccgcaccttctcccttcttcgtctccgtctctcccagccccatatcaacgggggacggctctctcgccattctccatccgaaaaacccatagaaacttccctcgtttctctctcctcggccccgcgggagcgaaccattatcagtcgctctcgttggtccggagcagcgatgcgcaccgcctgcctccgccccaccattcgaataaaaccctcccctccgcctccctccttccgccactcctaggcccattcccacccgcgccagcctcggccgccgcggccgcaccacccacggtcccgcctcgccgtggcatgagaagatggccgcgtgctccaggggcctcgcgtggccgccgttcgatctgaccacggcgaggggggcggcgtcctggccgcgccgccgcgccacgatccggtgctgctgcgccgggacggacccagagccgcggaggcgactctcgagggcggccgcggccgcgcccgagcgtgccgaggagtggcgcgtcgatgggaacaagccgtctgccgcggcaccggcccggcggcgcgctagtctcaccgccatgcccccgctccccttcccggcacctcgtatagttctagaagacagttcaagcaacaggacttctacccacggtgcacgccgaggggcccggctcctcaatcctgtgattccccacccaagagagacactggtattgctagtgagaaggaatggggaatcaacttgctggacgaagccgtcaaggagtctggaataaatgaagatggaagcacttggtatagggagagtggagaagatactggcgagaatgggtaccgctgccgctgggcaagaatgggaggacagaaccatgatggttccaccgaatggaaagagacttggtgggagaaaagtgactggactggatataaggaattaggtgcagagaaatctgggaagaatgctgaaggtgattcttggtgggagaagtggaaagaagtactgtaccaagatgaatggagcaatcttgcaagaatagagaagagtgctgaaaaacaagcaaaatcaggtgcagaaaatgctgggtggtatgagaaatggtgggagaaatatgatgccaaaggctggacagaaaaaggtgctcacaaatatggaaggttgaatgagcagtcgtggtgggagagatggggtgaacattatgatggccgtggatttgttttgaaatggacagataagtgggcagagacagacttaggcaccaaatggggggacaagtgggaggagaaattctttgcaggaattggttctcgacaaggggagacatggcatgtatctcctggcagagaacgttggtcaagaacttggggagaagaacactttggtaacggtaaagtccacaagtatggaaagagcacaactggcgagagctgggatttggtagtcgacgaggagacatactatgaggcggagccccactacggatgggccgatgtcgtgggggactcgacacagctgctgtccatacaacccgtggagaggccaccgggagtgttcccggccatcgacttcagctcggcgcccccgccaaaggacgctccgccgggcatgcctccttcccctctggatggagggaactagagctgccagcacaagcgaattttttctttctagaggctccaaattttgcctgtaagggaacagcattctttgtaggaagttaatggacccaatttcctgcgttcattggttggttcactctctgctacgctttcctttcctcccaaacatgccgttgcgttcctctggttggcgaccgggtgaatgcaataatcaaacggcccacccgtggtttgtattgctcgctgaggataaagcctttgttctgccttcaaggcagtgttggaaactcggccattttcctcgcgtaagggacagagattttcactccgaaccaaacggagagagggg

SEQ ID NO: 81750 - DNA, 1973 bp, Zea Mays
ctgaatctgccaccgacaagtgggttcgtccaccgcaccttctcccttcttcgtctccgtctctcccagccccatatcaacgggggacggctctctcgccattctccatccgaaaaacccatagaaacttccctcgtttctctctcctcggccccgcgggagcgaaccattatcagtcgctctcgttggtccggagcagcgatgcgcaccgcctgcctccgccccaccattcgaataaaaccctcccctccgcctccctccttccgccactcctaggcccattcccacccgcgccagcctcggccgccgcggccgcaccacccacggtcccgcctcgccgtggcatgagaagatggccgcgtgctccaggggcctcgcgtggccgccgttcgatctgaccacggcgaggggggcggcgtcctggccgcgccgccgcgccacgatccggtgctgctgcgccgggacggacccagagccgcggaggcgactctcgagggcggccgcggccgcgcccgagcgtgccgaggagtggcgcgtcgatgggaacaagccgtctgccgcggcaccggcccggcggcgcgctagtctcaccgccatgcccccgctccccttcccggcacctcgttctagaagacagttcaagcaacaggacttctacccacggtgcacgccgaggggcccggctcctcaatcctgtgattccccacccaagagagacactggtattgctagtgagaaggaatggggaatcaacttgctggacgaagccgtcaaggagtctggaataaatgaagatggaagcacttggtatagggagagtggagaagatactggcgagaatgggtaccgctgccgctgggcaagaatgggaggacagaaccatgatggttccaccgaatggaaagagacttggtgggagaaaagtgactggactggatataaggaattaggtgcagagaaatctgggaagaatgctgaaggtgattcttggtgggagaagtggaaagaagtactgtaccaagatgaatggagcaatcttgcaagaatagagaagagtgctgaaaaacaagcaaaatcaggtgcagaaaatgctgggtggtatgagaaatggtgggagaaatatgatgccaaaggctggacagaaaaaggtgctcacaaatatggaaggttgaatgagcagtcgtggtgggagagatggggtgaacattatgatggccgtggatttgttttgaaatggacagataagtgggcagagacagacttaggcaccaaatggggggacaagtgggaggagaaattctttgcaggaattggttctcgacaaggggagacatggcatgtatctcctggcagagaacgttggtcaagaacttggggagaagaacactttggtaacggtccacaagtatggaaagagcacaactggcgagagctgggatttggtagtcgacgaggagacatactatgaggcggagccccactacggatgggccgatgtcgtgggggactcgacacagctgctgtccatacaacccgtggagaggccaccgggagtgttcccggccatcgacttcagctcggcgcccccgccaaaggacgctccgccgggcatgcctccttcccctctggatggagggaactagagctgccagcacaagcgaattttttctttctagaggctccaaattttgcctgtaagggaacagcattctttgtaggaagttaatggacccaatttcctgcgttcattggttggttcactctctgctacgctttcctttcctcccaaacatgccgttgcgttcctctggttggcgaccgggtgaatgcaataatcaaacggcccacccgtggtttgtattgctcgctgaggataaagcctttgttctgccttcaaggcagtgttggaaactcggccattttcctcgcgtaagggacagagattttcactccgaaccaaacggagagagggg

SEQ ID NO: 81751 - DNA, 986 bp, Zea Mays
ctctagcccaacctttgcttaagccttacctgccatatgtcaatcttgcaagaatagagaagagtgctgaaaaacaagcaaaatcaggtgcagaaaatgctgggtggtatgagaaatggtgggagaaatatgatgccaaaggctggacagaaaaaggtgctcacaaatatggaaggttgaatgagcagtcgtggtgggagagatggggtgaacattatgatggccgtggatttgttttgaaatggacagataagtgggcagagacagacttaggcaccaaatggggggacaagtgggaggagaaattctttgcaggaattggttctcgacaaggggagacatggcatgtatctcctggcagagaacgttggtcaagaacttggggagaagaacactttggtaacggtaaagtccacaagtatggaaagagcacaactggcgagagctgggatttggtagtcgacgaggagacatactatgaggcggagccccactacggatgggccgatgtcgtgggggactcgacacagctgctgtccatacaacccgtggagaggccaccgggagtgttcccggccatcgacttcagctcggcgcccccgccaaaggacgctccgccgggcatgcctccttcccctctggatggagggaactagagctgccagcacaagcgaattttttctttctagaggctccaaattttgcctgtaagggaacagcattctttgtaggaagttaatggacccaatttcctgcgttcattggttggttcactctctgctacgctttcctttcctcccaaacatgccgttgcgttcctctggttggcgaccgggtgaatgcaataatcaaacggcccacccgtggtttgtattgctcgctgaggataaagcctttgttctgccttcaaggcagtgttggaaactcggccattttcctcgcgtaagggacagagattttcactccgaaccaaacggagagagggg

SEQ ID NO: 81752 - DNA, 817 bp, Zea Mays
gccaggtgttaatccatccgaagggctcaatcagctattcggaattcagacgacagatcgagcaaaagtgaggacccctccattttatgagaacagtatttgtaaccatgggactgaatttaaattacaggagaaagcagagacatacgaacacccatctgaaataattttgccaagtatgagtagaaatatcaatatgttaaaatcataaaacagcacactagctttatgcttggaatggccagcacgactcctcaatgtgtcaatgtcacgtgagaactggaccagaacaaaaatctgaatcaaacatacataacgtcaggttgccatatgcacacagaatggctgcccaaggaatgatacatatatattgagaatatcttcactactagtacaacagatcatcgcatagctaattcgagcttggtgacatcgtatttggtcaagcaactatggcaggaacatgacaccagcttaccaaacagtttcctcattcttccatgatggtgtcatcatctgaaaccggttcaccttccaagagccactgttcaagctcgtcgagatcgtcgtcattatgccgataccagtcagaggaggtgtcccagagcatagtccctaattcttcaccacggcaagccatatgtaagaatggccggcttcgagacagtgcatccaccataaccctattcaagctacctgtaattcccagccaccgcaatctagggaagtaaggtttcttaaaccaacgtgctgcaaggggtgtaatcccaccacagtcaaaaagatccagcagctgcaaggtactaccgtaggttcc

SEQ ID NO: 81753 - DNA, 1594 bp, Zea Mays
ggcacggccaaaaatcacggcacttcctcccataaaaaacttggctggccgctgcccctgacgcatcggcatctgtctcggcacggccgtccgatcaaatcgggctagcacagcacagccagcacgcgccgcgctcagcgctgtacttgcacaaaatatcgccttgctcacgcgctgtctagcctgtctggactctggattagtatatccttgagcgcagacaaatcacccccttcctcctgttcatttcctcctgctcccctctcctcccttccccccctcctcgccgctcgccgttgaagaggtaggcccacgggccggcgagaatggaggcggcgacgatggtgtgaaccgcgcccgcgcgcacaaccgcaaggccggcctcgactccccgcgctgcgaggtcgtctgcggcaacttcctctccatgccgttcccggacgcctccttcgacggcgcctactccatcgaggccacctgccacgcgcccaggctgcaggacgtgtacggcgaggtctaccgcgtgctcaagccggggggactctacgtctcctacgagtgggtcaccaccccgctgtaccgcgccgaggacccggaccacgtcgagtgcatccacggcatcgagcgcggcgacgcgctcccggggctccgccgccaggacgagatcgcgtccatcgccaaggaggtcggcttcgaggtgctcaaggagcaggaccttgcgctgccccccgcgctgccctggtggacgcgcctcaagatgggccgcatcgcctactggcgcaactccctcgtcgtccgcgtgctcaccatgctccgggtcgcgcccaagggcgtctccgaggtgcacgagatgctctacgagaccgcgcagcacctcacccgcggcggcgagaccggcatcttcacgcccatgcacatggtgctcctccgcaagcccgccgccgccgcctccaccgaggaggccaactagtgtaagactacacaccgccaccaatcagttactactcgcccaccgcaagggggagaaaatggggagggaggaaaaagatgcaagcagcagcagcaccagaggtaagaagagcaggctaatcggcgacttgaagaagttacaaattgatctattagagaagaagatactactaggaacgatgcttctctccgtttactcttttccctgttcgtagctttgagttttaatttttgttttttggtggacggattgttccggggaggtcgaggttgggatctaaatttattttcaatcggtggagatccatctatcagcagcagcagcagcagccatgttttctctccaacaatacactggaattgaattcctaacgggcagatcggatccttgaaattgaatttaattctaataatatgaatttagataaagatcttttaaactaacatagttttatctaaaatatatttatgtactattgttatcggagatatttatgtgatacatttttatttttattatagagatatagagaaataggctgaataacatcttttaaggtttatagcatcttttaagttgcaagtttatagtataaacatatttcgttgatacataatattattt

SEQ ID NO: 81754 - DNA, 2313 bp, Zea Mays
acacaccaccaccacccacacaaattagaggattggtgccttgctccctcccccttcttgtcgttgctccaccctctcttcttttattattgggttctttttttctctctctccccttggatttgcgcttgtgctcgtctggccgcatactagtatccgcaccagagaggagacacctccgactccgacctgctcttgcatatagattgggcagagagtgagagagcgcgcgcgcgctcaaggggtgccaaaaggagattttttttttaatccagcttcttagcctcactgtctttgatcccggagagcagccgccagcccaactaatccttgctgctggcgcgccggggctccgattgcgctccagatctgaggcacctgctcggtggattccaggaatccgagcaccaactcgacaggggagttctcagggtaaaggacgacgcttgatgcacacgggacaacgagttggccgcaagttttgtttgcacacgcacacgacccaccagttcacgcgtttttttttttttgcttcttaactcgctttgattgcatctgttgtttcggaaggaagaggctgagagcgcgttggagatttggactataagagcgagcgagcgagctgggtgccttgctgccttgaggacgccgtcaagaaaccgcgtggaggggagggcgatgagatgagggatgctggccgcggtgatggactacttcagcacctgctggggcccgcggtctcgtgcggggcaccggggcaagggctccgacgccgccggccggcaggacggcctcctctggtacaaggacgccgggcagctcgtcaccggggggttctccatggccgtggtgcaggccaaccagctgcttgaggaccagagccaggtggagtccggatcgctctccctggctgactacggcccgcagggcaccttcgtcggcgtctatgatggccatggcggcccggagacgtcccggttcatcaatgaccacctcttcaaccatctcaggagatttgcaactgagcacaagtccatgtcagcagacgtgatccggaaagctttccaagaaactgaggagggctttctttctctagtcatcaaggaatggtctttcaagcctcagattgcatcagttggctcctgttgccttgttggtgtaatctgtgctgggactctctatgttgcaaacctgggcgactcgcgtgcagttcttggaaggcttgtgaaagcaactggagaggttctggccactcagttgtcagcggagcacaatgcatgctatgaagaagttagacaagagctgcagtcatcacatcctgatgatccacgtattgtggttctcaaacataacgtttggcgagtgaagggtctcatccagatctcaagatctatcggagatgtatatctaaagaaaccggagtataacagagaacctcttcacagcaagtttcggcttcgagaaaccttccagaagccgattcttagttctgaacctcaaattactgaacaccgaatacagccaaacgatcagtttgttatatttgcttccgatggtctatgggagcacctcagcaatcaggaagctgttgaccttgtccaaagtagtccccgtaatggaatcgctcggagactagtgaaagccgcgatgcaagaagctgccaagaagagggagatgagatactcagacctcaagaagatcgaccgtggcgtgaggaggcatttccacgacgatataaccgtcgtcgtggtgttcctcgactcggatgccatgagcaaagctagctggagcaagagcccctcggtttctctccgagggggcggcgtcacccttcccgccaagtccctcgcacccttctcggctccggcacagttgaacggcacccactgaagctgctactgctcttgaaaagaagggcacagtgcagatctgctagagatgatgagagaagcagcaatcaagtgtagctgttgctcgtacacctgctgtgctgttgctgtttgcaaagctgccgtcttgactccgcctggtaattagtgtactgatagcgaggtatagaaattaggttatttgttagcgacgcaaatcctttctttttttttcttctccctctgttcttatctcttttctcttcatcatggaggaaacaggtggctgtaaatttgtccagaacatgttttccctaatagcccatcatatcccgctctttttcttgttgatatgaccaaggctggcagcatcgctgctcaagataatgtttggggcgcatgatttgaccagtccgaatcattacttttgatgatgtgttgtagc

SEQ ID NO: 81755 - DNA, 1871 bp, Zea Mays
ctcatccgtccaccgttgccaagactctgtccgtccgccgctggactggagtagtcgtgctcgtgctcgcgctcgcgcctgcgcctgtcttaagctccgattgctaatcttcggatgtttgcctctcggaagaggctgagagcgcgttggagatttggactataagagcgagcgagcgagctgggtgccttgctgccttgaggacgccgtcaagaaaccgcgtggaggggagggcgatgagatgagggatgctggccgcggtgatggactacttcagcacctgctggggcccgcggtctcgtgcggggcaccggggcaagggctccgacgccgccggccggcaggacggcctcctctggtacaaggacgccgggcagctcgtcaccggggggttctccatggccgtggtgcaggccaaccagctgcttgaggaccagagccaggtggagtccggatcgctctccctggctgactacggcccgcagggcaccttcgtcggcgtctatgatggccatggcggcccggagacgtcccggttcatcaatgaccacctcttcaaccatctcaggagatttgcaactgagcacaagtccatgtcagcagacgtgatccggaaagctttccaagaaactgaggagggctttctttctctagtcatcaaggaatggtctttcaagcctcagattgcatcagttggctcctgttgccttgttggtgtaatctgtgctgggactctctatgttgcaaacctgggcgactcgcgtgcagttcttggaaggcttgtgaaagcaactggagaggttctggccactcagttgtcagcggagcacaatgcatgctatgaagaagttagacaagagctgcagtcatcacatcctgatgatccacgtattgtggttctcaaacataacgtttggcgagtgaagggtctcatccagatctcaagatctatcggagatgtatatctaaagaaaccggagtataacagagaacctcttcacagcaagtttcggcttcgagaaaccttccagaagccgattcttagttctgaacctcaaattactgaacaccgaatacagccaaacgatcagtttgttatatttgcttccgatggtctatgggagcacctcagcaatcaggaagctgttgaccttgtccaaagtagtccccgtaatggaatcgctcggagactagtgaaagccgcgatgcaagaagctgccaagaagagggagatgagatactcagacctcaagaagatcgaccgtggcgtgaggaggcatttccacgacgatataaccgtcgtcgtggtgttcctcgactcggatgccatgagcaaagctagctggagcaagagcccctcggtttctctccgagggggcggcgtcacccttcccgccaagtccctcgcacccttctcggctccggcacagttgaacggcacccactgaagctgctactgctcttgaaaagaagggcacagtgcagatctgctagagatgatgagagaagcagcaatcaagtgtagctgttgctcgtacacctgctgtgctgttgctgtttgcaaagctgccgtcttgactccgcctggtaattagtgtactgatagcgaggtatagaaattaggttatttgttagcgacgcaaatcctttctttttttttcttctccctctgttcttatctcttttctcttcatcatggaggaaacaggtggctgtaaatttgtccagaacatgttttccctaatagcccatcatatcccgctctttttcttgttgatatgaccaaggctggcagcatcgctgctcaagataatgtttggggcgcatgatttgaccagtccgaatcattacttttgatgatgtgttgtagc

SEQ ID NO: 81756 - DNA, 1390 bp, Zea Mays
cttctcgtctccttcctctatgcaaactgcaaagctgatttaagctatttggctatctgtatgtatccgggtcggatctgagcaaagtgtatacacattggtcactggaggattgctgccgttggtaaggatgagcaaaggcccagttccgtttgccaacatcgggaagagagcaaaagatcttctgtacaaggactacaactttgaccaaaagttttctttgtcgacgtctagcggctctggtttgaatctcacagccactggtgtaaagatcaacgaagacttcattggtgatatacggacacaacataaaagcagtagaactactattgatgtcaccgttgatagtgattctaaagtgtcaaccacagtcactgttgatgaagcactaactggtttgaagacttcattcgccttcaaggttcccgatcacaagtctgggaagcttgatctgcaatatgcgcacaatcgtttttcattgaactcgaccattggtttgacatcagcacctttggttgaactggctgcaactgtcggcacaagtgaacttagcattggtgctgaggttgggtttgacagtacttcagctgctgttactaagtacaactcaggaattggatacaacaagtccgatttctcagcttccttactactggctgataaaggggagactttgaaggcatcttacgttcatttgttcaatccgaccaatggagctacagttgcagccgaggtaacacacaagctgaagaccagagagaactatttcacagttgggagctcccatgcccttgatccttcaacattgctaaagatgagattcagcaactccgggaaggtcggtcttctctgtcagcatgagtggaggccgaaatctcttgttactctttcagctgagtatgatctgaaggtggtaagtgcgccttcaagaatcggcatggccatatccctcaagccttgagctgggttaagtcaccttctataaaacagtacaagcataccgtctcccaagaacacaagctttggagcgatacctagaacaaccctccattttagccttttttattttgtaagagtcttttgcaaaggagtattgtcacttgtcagggagttagacttgttttgtggaacgtttccattagagccaactccacacgaaggattgaaaatacagaggtttgcattagaacagaagctccactgcgatattttcccatgttttgctagtcgacgcaaaaaatgattttttggaggtgatttgaacacctaacatcttgagtcgatggtggttttaacagctctggaaatcaacaagggccatttgtacccagcaacagcagaattagttctggaaattggttattttgatgagttttgtttgtgagttggg

SEQ ID NO: 81757 - DNA, 1072 bp, Zea Mays
ctaaggtttgcggacctaaagaacacgtggattttggaatgtgtcaaccacagtcactgttgatgaagcactaactggtttgaagacttcattcgccttcaaggttcccgatcacaagtctgggaagcttgatctgcaatatgcgcacaatcgtttttcattgaactcgaccattggtttgacatcagcacctttggttgaactggctgcaactgtcggcacaagtgaacttagcattggtgctgaggttgggtttgacagtacttcagctgctgttactaagtacaactcaggaattggatacaacaagtccgatttctcagcttccttactactggctgataaaggggagactttgaaggcatcttacgttcatttgttcaatccgaccaatggagctacagttgcagccgaggtaacacacaagctgaagaccagagagaactatttcacagttgggagctcccatgcccttgatccttcaacattgctaaagatgagattcagcaactccgggaaggtcggtcttctctgtcagcatgagtggaggccgaaatctcttgttactctttcagctgagtatgatctgaaggtggtaagtgcgccttcaagaatcggcatggccatatccctcaagccttgagctgggttaagtcaccttctataaaacagtacaagcataccgtctcccaagaacacaagctttggagcgatacctagaacaaccctccattttagccttttttattttgtaagagtcttttgcaaaggagtattgtcacttgtcagggagttagacttgttttgtggaacgtttccattagagccaactccacacgaaggattgaaaatacagaggtttgcattagaacagaagctccactgcgatattttcccatgttttgctagtcgacgcaaaaaatgattttttggaggtgatttgaacacctaacatcttgagtcgatggtggttttaacagctctggaaatcaacaagggccatttgtacccagcaacagcagaattagttctggaaattggttattttgatgagttttgtttgtgagttggg

SEQ ID NO: 81758 - DNA, 682 bp, Zea Mays
tgcggccgacaagtccactctttggctggaattcaacaacgcggagtaccagagagacaacaccgtgtagtttgatcaggaacccagagatgataagcaccccaggatccacaactaaaagtaaaaccagcaactcgacgacttcccgtcgcaggatggaaacctcagtctgccgtttcataccgagttcgctcgagatggaagagttcttctcggccgctgaacaacaggagcagcataacttcagggagaagtataacttctgtcctgtgaacgactgccctctcccgggtcgatatgagtgggcgaggctagactgttagattcctccaagcacaagagcaccatttatctgatgtgtctaccacatgactagcgccgccgccgccgaggaggcgtaatcaactggatcgcattagctttcttgcctgttgtaaaaattagagtagttagcctgtagttgaatggtcctgtgtaacgaaacaggcgtggttctgagttacaccccgatccccaacctcactgtaaccgtttgactgctcgctcaagctgtagccgaaccatccatctcaagtagcgtaggcctagcgtattcatctgttcctagttctagttcttgaatggattaatcgaatgagatcattgttagaatctgcatgacaacttgcttggtgttttcagc

SEQ ID NO: 81759 - DNA, 937 bp, Zea Mays
aggagtacaacgacgttaatagttaataccgtgccgttgctcatttcttgcgttcaagctcagtttctcatgcgtccaaaaatcacctgtacttgccccccaaaaaatgaatattcgtttagcgaagttcttgtcgagtagctagctaatattccgaagtcttgttcatcgtagctgtgccatttgattcacttaacctgttcgttctagtgattggacaagtaatcctctacgtataacctaagagaatcccagtttagacacctaacagctgcactttttttgctcaaagaaacaggagtaccagagagacaacaccgtgtagtttgatcaggaacccagagatgataagcaccccaggatccacaactaaaagtaaaaccagcaactcgacgacttcccgtcgcaggatggaaacctcagtctgccgtttcataccgagttcgctcgagatggaagagttcttctcggccgctgaacaacaggagcagcataacttcagggagaagtataacttctgtcctgtgaacgactgccctctcccgggtcgatatgagtgggcgaggctagactgttagattcctccaagcacaagagcaccatttatctgatgtgtctaccacatgactagcgccgccgccgccgaggaggcgtaatcaactggatcgcattagctttcttgcctgttgtaaaaattagagtagttagcctgtagttgaatggtcctgtgtaacgaaacaggcgtggttctgagttacaccccgatccccaacctcactgtaaccgtttgactgctcgctcaagctgtagccgaaccatccatctcaagtagcgtaggcctagcgtattcatctgttcctagttctagttcttgaatggattaatcgaatgagatcattgttagaatctgcatgacaacttgcttggtgttttcagc

SEQ ID NO: 81760 - DNA, 862 bp, Zea Mays
catatcttaggccttactcatcttatcttctattttaaactttactctatgaacagtgttttgcactcggtggaatctcgtctggtggccgtttcctagtcgttacccatagccagaaagttgcctcctttcccattgttctccatctccccctggcccctgccctacaggagcagtgcttcgtccgcttgcatttgcccttgtgctgtatagttgcctctcggagtaccagagagacaacaccgtgtagtttgatcaggaacccagagatgataagcaccccaggatccacaactaaaagtaaaaccagcaactcgacgacttcccgtcgcaggatggaaacctcagtctgccgtttcataccgagttcgctcgagatggaagagttcttctcggccgctgaacaacaggagcagcataacttcagggagaagtataacttctgtcctgtgaacgactgccctctcccgggtcgatatgagtgggcgaggctagactgttagattcctccaagcacaagagcaccatttatctgatgtgtctaccacatgactagcgccgccgccgccgaggaggcgtaatcaactggatcgcattagctttcttgcctgttgtaaaaattagagtagttagcctgtagttgaatggtcctgtgtaacgaaacaggcgtggttctgagttacaccccgatccccaacctcactgtaaccgtttgactgctcgctcaagctgtagccgaaccatccatctcaagtagcgtaggcctagcgtattcatctgttcctagttctagttcttgaatggattaatcgaatgagatcattgttagaatctgcatgacaacttgcttggtgttttcagc

SEQ ID NO: 81761 - DNA, 813 bp, Zea Mays
attttgttggcccgttagcacttctacgcgcagtagtgttctagcacagaatcgatggatagtctggtttatgatgaatattgtgtctgatgctttggccttccttgatgtctgcttctgggcctgacctgacccattggatttgaacttaaagtttatgagttaaaaaaaattgagtaccagagagacaacaccgtgtagtttgatcaggaacccagagatgataagcaccccaggatccacaactaaaagtaaaaccagcaactcgacgacttcccgtcgcaggatggaaacctcagtctgccgtttcataccgagttcgctcgagatggaagagttcttctcggccgctgaacaacaggagcagcataacttcagggagaagtataacttctgtcctgtgaacgactgccctctcccgggtcgatatgagtgggcgaggctagactgttagattcctccaagcacaagagcaccatttatctgatgtgtctaccacatgactagcgccgccgccgccgaggaggcgtaatcaactggatcgcattagctttcttgcctgttgtaaaaattagagtagttagcctgtagttgaatggtcctgtgtaacgaaacaggcgtggttctgagttacaccccgatccccaacctcactgtaaccgtttgactgctcgctcaagctgtagccgaaccatccatctcaagtagcgtaggcctagcgtattcatctgttcctagttctagttcttgaatggattaatcgaatgagatcattgttagaatctgcatgacaacttgcttggtgttttcagc

SEQ ID NO: 81762 - DNA, 1609 bp, Zea Mays
caatggtggatttatacttgtagttgtagggatttaatccatttagttgcgcaagaatgtcagatgtgtccagcatgtcctcttctttcatatggtcctgaaaaaaaggtaagagatcttgttaactatgcatagaagtattccaggttcttgtttaaaaacaatgagaatgcataagaagaatcatgtttttttttattccaggttctcgtttgataagactgtgtatagttcaattgaaaacttacagtttgttcataatgttcatgactctgggagcctgattgcgctgcttcacagagttcatcattcttggcaaaccttccacggacacggggcctgctatccgccaaggtttttctacatgcgtactgcatttcgttgtatgtcaggctgtcagcacagctgaatacgtaagatgtccatgcggaggcgacaagcggacgaccttaaacgtggagtcttccagtactgatagttccgtcggaggtaacgttgctgggttcccgttgcatccgtttatcaggcaagcacctgttgtcctaggaaacgtaacggatcggacttgttgccattttaattacaactccacatgggcatcggcatgcgttgatgcatatataggcacgatgcaagaaacgcggcagcaaaaggatgtcgagaaggaaacgaatgaaatcgctcggttgggtttcataaaaacatcatcatcccagaaagtaggaagaggcgagcaaaaaaccgtgttgggtcagagaagcaaaattacagcgacgatgtggcagcaatcatcgggaagcatggcgggcaccaacgatcttcagcgcatggagatgatcagattggcgcgcggcgcagcttctcggagagggggggcatgtgtgcgagcaaggtgggccgaaaataagcctgttttggccatgcagatgcacatgcatgacttcctctctctgtttttttttttggccaagatgacaacaccgaggagcaaggaagctagtcagctcccagaagtttctctgctacaattgcggtcgggagagagactgcttattccggcctgggaagaagtcctgaaagaattcggtcactcctcggaccccgatgaacggggacgtcttagctggctgtatggcagggttggacacattatcaagctagggcgggagggagacgacttacaatgcacaaggcatctgggatggccatggcggctgcgtcctcctcgaacaacatcatcattatttgtatacgatggtaccagagccgctcgatcaataatggaggctgggggagagtggagggttgatggtgtcccccatggagaacgcatgagctcgatacttatatatgcggaagggagaacaagaacaactgcacgggcatctttttttttatttttatgtttttctctccctaaccttttgctataattgggtggtgccgttggtgagacgaaccgagccgacaaacaacagcctagcctggtggcgctcgatggagtttttggcgtttactactcatatatggtgcatatattcatgcgtgagagtacgcaagtagctaggtagatgtgactgttggattagtgcagctgattactgtcgta

SEQ ID NO: 81763 - DNA, 2075 bp, Zea Mays
gtggatttatacttgtagttgtagggatttaatccatttagttgcgcaagaatgtcagatgtgtccagcatgtcctcttctttcatatggtcctgaaaaaaaggtaagagatcttgttaactatgcatagaagtattccaggttcttgtttaaaaacaatgagaatgcataagaagaatcatgtttttttttattccaggttctcgtttgataagactgtgtatagttcaattgaaaacttacagtttgttcataatgttcatgactctgggagcctgattgcgctgcttcacagagttcatcattcttggcaaaccttccacggacacggggcctgctatccgccaaggtttttctacatgcgtactgcatttcgttgtatgtcaggctgtcagcacagctgaatacgtaagatgtccatgcggaggcgacaagcggacgaccttaaacgtggagtcttccagtactgatagttccgtcggaggtaacgttgctgggttcccgttgcatccgtttatcagcctggaagaactgctccagtttgctgatacatggctccatccagacccatgaaccctccagctgctacggctgccatgaagcactcatcatagtctgtagcgagcggcatcaaggcagatgcactgctgctcatctgcactggaggaggcacctgctcgtctaaggtctctggaagtcccatctggtcgaactgccctatgctggcctcatcggtggcagttggatagtatgctgctacctctgataggccatcgatctgcgggaggaacccggcgtcaaggccatggtgctgctcttcctccaggagggctgtgagagtggtgtcgaaggatgtcaacggggtgtaggctgtggctccaccagcagctgcggtgtcttcactgtagccgcagataggaggggtggtagcggtagacgaagaaacatcatcgtcagtggcagggaatgggccagaggtggcagtcaccgcggcaaagaggtcatcgcccaggccgtcgccgtagtagaagtcgagtatatgtgcagctatggggcttgaaatttcctcctgcaaatttcagagcgggacaagacatgcaagcacctgttgtcctaggaaacgtaacggatcggacttgttgccattttaattacaactccacatgggcatcggcatgcgttgatgcatatataggcacgatgcaagaaacgcggcagcaaaaggatgtcgagaaggaaacgaatgaaatcgctcggttgggtttcataaaaacatcatcatcccagaaagtaggaagaggcgagcaaaaaaccgtgttgggtcagagaagcaaaattacagcgacgatgtggcagcaatcatcgggaagcatggcgggcaccaacgatcttcagcgcatggagatgatcagattggcgcgcggcgcagcttctcggatgacaacaccgaggagcaaggaagctagtcagctcccagaagtttctctgctacaattgcggtcgggagagagactgcttattccggcctgggaagaagtcctgaaagaattcggtcactcctcggaccccgatgaacggggacgtcttagctggctgtatggcagggttggacacattatcaagctagggcgggagggagacgacttacaatgcacaaggcatctgggatggccatggcggctgcgtcctcctcgaacaacatcatcattatttgtatacgatggtaccagagccgctcgatcaataatggaggctgggggagagtggagggttgatggtgtcccccatggagaacgcatgagctcgatacttatatatgcggaagggagaacaagaacaactgcacgggcatctttttttttatttttatgtttttctctccctaaccttttgctataattgggtggtgccgttggtgagacgaaccgagccgacaaacaacagcctagcctggtggcgctcgatggagtttttggcgtttactactcatatatggtgcatatattcatgcgtgagagtacgcaagtagctaggtagatgtgactgttggattagtgcagctgattactgtcgta

SEQ ID NO: 81764 - DNA, 2038 bp, Zea Mays
gtggatttatacttgtagttgtagggatttaatccatttagttgcgcaagaatgtcagatgtgtccagcatgtcctcttctttcatatggtcctgaaaaaaaggtaagagatcttgttaactatgcatagaagtattccaggttcttgtttaaaaacaatgagaatgcataagaagaatcatgtttttttttattccaggttctcgtttgataagactgtgtatagttcaattgaaaacttacagtttgttcataatgttcatgactctgggagcctgattgcgctgcttcacagagttcatcattcttggcaaaccttccacggacacggggcctgctatccgccaaggtttttctacatgcgtactgcatttcgttgtatgtcaggctgtcagcacagctgaatacgtaagatgtccatgcggaggcgacaagcggacgaccttaaacgtggagtcttccagtactgatagttccgtcggagcctggaagaactgctccagtttgctgatacatggctccatccagacccatgaaccctccagctgctacggctgccatgaagcactcatcatagtctgtagcgagcggcatcaaggcagatgcactgctgctcatctgcactggaggaggcacctgctcgtctaaggtctctggaagtcccatctggtcgaactgccctatgctggcctcatcggtggcagttggatagtatgctgctacctctgataggccatcgatctgcgggaggaacccggcgtcaaggccatggtgctgctcttcctccaggagggctgtgagagtggtgtcgaaggatgtcaacggggtgtaggctgtggctccaccagcagctgcggtgtcttcactgtagccgcagataggaggggtggtagcggtagacgaagaaacatcatcgtcagtggcagggaatgggccagaggtggcagtcaccgcggcaaagaggtcatcgcccaggccgtcgccgtagtagaagtcgagtatatgtgcagctatggggcttgaaatttcctcctgcaaatttcagagcgggacaagacatgcaagcacctgttgtcctaggaaacgtaacggatcggacttgttgccattttaattacaactccacatgggcatcggcatgcgttgatgcatatataggcacgatgcaagaaacgcggcagcaaaaggatgtcgagaaggaaacgaatgaaatcgctcggttgggtttcataaaaacatcatcatcccagaaagtaggaagaggcgagcaaaaaaccgtgttgggtcagagaagcaaaattacagcgacgatgtggcagcaatcatcgggaagcatggcgggcaccaacgatcttcagcgcatggagatgatcagattggcgcgcggcgcagcttctcggatgacaacaccgaggagcaaggaagctagtcagctcccagaagtttctctgctacaattgcggtcgggagagagactgcttattccggcctgggaagaagtcctgaaagaattcggtcactcctcggaccccgatgaacggggacgtcttagctggctgtatggcagggttggacacattatcaagctagggcgggagggagacgacttacaatgcacaaggcatctgggatggccatggcggctgcgtcctcctcgaacaacatcatcattatttgtatacgatggtaccagagccgctcgatcaataatggaggctgggggagagtggagggttgatggtgtcccccatggagaacgcatgagctcgatacttatatatgcggaagggagaacaagaacaactgcacgggcatctttttttttatttttatgtttttctctccctaaccttttgctataattgggtggtgccgttggtgagacgaaccgagccgacaaacaacagcctagcctggtggcgctcgatggagtttttggcgtttactactcatatatggtgcatatattcatgcgtgagagtacgcaagtagctaggtagatgtgactgttggattagtgcagctgattactgtcgta

SEQ ID NO: 81765 - DNA, 1560 bp, Zea Mays
tatacttgtagttgtagggatttaatccatttagttgcgcaagaatgtcagatgtgtccagcatgtcctcttctttcatatggtcctgaaaaaaaggtaagagatcttgttaactatgcatagaagtattccaggttcttgtttaaaaacaatgagaatgcataagaagaatcatgtttttttttattccaggttctcgtttgataagactgtgtatagttcaattgaaaacttacagtttgttcataatgttcatgactctgggagcctgattgcgctgcttcacagagttcatcattcttggcaaaccttccacggacacggggcctgctatccgccaaggtttttctacatgcgtactgcatttcgttgtatgtcaggctgtcagcacagctgaatacgtaagatgtccatgcggaggcgacaagcggacgaccttaaacgtggagtcttccagtactgatagttccgtcggaggcaagcacctgttgtcctaggaaacgtaacggatcggacttgttgccattttaattacaactccacatgggcatcggcatgcgttgatgcatatataggcacgatgcaagaaacgcggcagcaaaaggatgtcgagaaggaaacgaatgaaatcgctcggttgggtttcataaaaacatcatcatcccagaaagtaggaagaggcgagcaaaaaaccgtgttgggtcagagaagcaaaattacagcgacgatgtggcagcaatcatcgggaagcatggcgggcaccaacgatcttcagcgcatggagatgatcagattggcgcgcggcgcagcttctcggagagggggggcatgtgtgcgagcaaggtgggccgaaaataagcctgttttggccatgcagatgcacatgcatgacttcctctctctgtttttttttttggccaagatgacaacaccgaggagcaaggaagctagtcagctcccagaagtttctctgctacaattgcggtcgggagagagactgcttattccggcctgggaagaagtcctgaaagaattcggtcactcctcggaccccgatgaacggggacgtcttagctggctgtatggcagggttggacacattatcaagctagggcgggagggagacgacttacaatgcacaaggcatctgggatggccatggcggctgcgtcctcctcgaacaacatcatcattatttgtatacgatggtaccagagccgctcgatcaataatggaggctgggggagagtggagggttgatggtgtcccccatggagaacgcatgagctcgatacttatatatgcggaagggagaacaagaacaactgcacgggcatctttttttttatttttatgtttttctctccctaaccttttgctataattgggtggtgccgttggtgagacgaaccgagccgacaaacaacagcctagcctggtggcgctcgatggagtttttggcgtttactactcatatatggtgcatatattcatgcgtgagagtacgcaagtagctaggtagatgtgactgttggattagtgcagctgattactgtcgta

SEQ ID NO: 81766 - DNA, 2112 bp, Zea Mays
atccatttagttgcgcaagaatgtcagatgtgtccagcatgtcctcttctttcatatggtcctgaaaaaaaggtaagagatcttgttaactatgcatagaagtattccaggttcttgtttaaaaacaatgagaatgcataagaagaatcatgtttttttttattccaggttctcgtttgataagactgtgtatagttcaattgaaaacttacagtttgttcataatgttcatgactctgggagcctgattgcgctgcttcacagagttcatcattcttggcaaaccttccacggacacggggcctgctatccgccaaggtttttctacatgcgtactgcatttcgttgtatgtcaggctgtcagcacagctgaatacgtaagatgtccatgcggaggcgacaagcggacgaccttaaacgtggagtcttccagtactgatagttccgtcggagcctggaagaactgctccagtttgctgatacatggctccatccagacccatgaaccctccagctgctacggctgccatgaagcactcatcatagtctgtagcgagcggcatcaaggcagatgcactgctgctcatctgcactggaggaggcacctgctcgtctaaggtctctggaagtcccatctggtcgaactgccctatgctggcctcatcggtggcagttggatagtatgctgctacctctgataggccatcgatctgcgggaggaacccggcgtcaaggccatggtgctgctcttcctccaggagggctgtgagagtggtgtcgaaggatgtcaacggggtgtaggctgtggctccaccagcagctgcggtgtcttcactgtagccgcagataggaggggtggtagcggtagacgaagaaacatcatcgtcagtggcagggaatgggccagaggtggcagtcaccgcggcaaagaggtcatcgcccaggccgtcgccgtagtagaagtcgagtatatgtgcagctatggggcttgaaatttcctcctgcaaatttcagagcgggacaagacatgcaagcacctgttgtcctaggaaacgtaacggatcggacttgttgccattttaattacaactccacatgggcatcggcatgcgttgatgcatatataggcacgatgcaagaaacgcggcagcaaaaggatgtcgagaaggaaacgaatgaaatcgctcggttgggtttcataaaaacatcatcatcccagaaagtaggaagaggcgagcaaaaaaccgtgttgggtcagagaagcaaaattacagcgacgatgtggcagcaatcatcgggaagcatggcgggcaccaacgatcttcagcgcatggagatgatcagattggcgcgcggcgcagcttctcggagagggggggcatgtgtgcgagcaaggtgggccgaaaataagcctgttttggccatgcagatgcacatgcatgacttcctctctctgtttttttttttggccaagatgacaacaccgaggagcaaggaagctagtcagctcccagaagtttctctgctacaattgcggtcgggagagagactgcttattccggcctgggaagaagtcctgaaagaattcggtcactcctcggaccccgatgaacggggacgtcttagctggctgtatggcagggttggacacattatcaagctagggcgggagggagacgacttacaatgcacaaggcatctgggatggccatggcggctgcgtcctcctcgaacaacatcatcattatttgtatacgatggtaccagagccgctcgatcaataatggaggctgggggagagtggagggttgatggtgtcccccatggagaacgcatgagctcgatacttatatatgcggaagggagaacaagaacaactgcacgggcatctttttttttatttttatgtttttctctccctaaccttttgctataattgggtggtgccgttggtgagacgaaccgagccgacaaacaacagcctagcctggtggcgctcgatggagtttttggcgtttactactcatatatggtgcatatattcatgcgtgagagtacgcaagtagctaggtagatgtgactgttggattagtgcagctgattactgtcgta

SEQ ID NO: 81767 - DNA, 1460 bp, Zea Mays
caagaatgtcagatgtgtccagcatgtcctcttctttcatatggtcctgaaaaaaaggtaagagatcttgttaactatgcatagaagtattccaggttcttgtttaaaaacaatgagaatgcataagaagaatcatgtttttttttattccaggttctcgtttgataagactgtgtatagttcaattgaaaacttacagtttgttcataatgttcatgactctgggagcctgattgcgctgcttcacagagttcatcattcttggcaaaccttccacggacacggggcctgctatccgccaaggtttttctacatgcgtactgcatttcgttgtatgtcaggctgtcagcacagctgaatacgtaagatgtccatgcggaggcgacaagcggacgaccttaaacgtggagtcttccagtactgatagttccgtcggaggtaacgttgctgggttcccgttgcatccgtttatcaggcacgatgcaagaaacgcggcagcaaaaggatgtcgagaaggaaacgaatgaaatcgctcggttgggtttcataaaaacatcatcatcccagaaagtaggaagaggcgagcaaaaaaccgtgttgggtcagagaagcaaaattacagcgacgatgtggcagcaatcatcgggaagcatggcgggcaccaacgatcttcagcgcatggagatgatcagattggcgcgcggcgcagcttctcggagagggggggcatgtgtgcgagcaaggtgggccgaaaataagcctgttttggccatgcagatgcacatgcatgacttcctctctctgtttttttttttggccaagatgacaacaccgaggagcaaggaagctagtcagctcccagaagtttctctgctacaattgcggtcgggagagagactgcttattccggcctgggaagaagtcctgaaagaattcggtcactcctcggaccccgatgaacggggacgtcttagctggctgtatggcagggttggacacattatcaagctagggcgggagggagacgacttacaatgcacaaggcatctgggatggccatggcggctgcgtcctcctcgaacaacatcatcattatttgtatacgatggtaccagagccgctcgatcaataatggaggctgggggagagtggagggttgatggtgtcccccatggagaacgcatgagctcgatacttatatatgcggaagggagaacaagaacaactgcacgggcatctttttttttatttttatgtttttctctccctaaccttttgctataattgggtggtgccgttggtgagacgaaccgagccgacaaacaacagcctagcctggtggcgctcgatggagtttttggcgtttactactcatatatggtgcatatattcatgcgtgagagtacgcaagtagctaggtagatgtgactgttggattagtgcagctgattactgtcgta

SEQ ID NO: 81768 - DNA, 1451 bp, Zea Mays
agaatgtcagatgtgtccagcatgtcctcttctttcatatggtcctgaaaaaaaggtaagagatcttgttaactatgcatagaagtattccaggttcttgtttaaaaacaatgagaatgcataagaagaatcatgtttttttttattccaggttctcgtttgataagactgtgtatagttcaattgaaaacttacagtttgttcataatgttcatgactctgggagcctgattgcgctgcttcacagagttcatcattcttggcaaaccttccacggacacggggcctgctatccgccaaggtttttctacatgcgtactgcatttcgttgtatgtcaggctgtcagcacagctgaatacgtaagatgtccatgcggaggcgacaagcggacgaccttaaacgtggagtcttccagtactgatagttccgtcggaggtaacgttgctgggttcccgttgcatccgtttatcaggcaagcacctgttgtcctaggaaacgtaacggatcggacttgttgccattttaattacaactccacatgggcatcggcatgcgttgatgcatatataggcacgatgcaagaaacgcggcagcaaaaggatgtcgagaaggaaacgaatgaaatcgctcggttgggtttcataaaaacatcatcatcccagaaagtaggaagaggcgagcaaaaaaccgtgttgggtcagagaagcaaaattacagcgacgatgtggcagcaatcatcgggaagcatggcgggcaccaacgatcttcagcgcatggagatgatcagattggcgcgcggcgcagcttctcggatgacaacaccgaggagcaaggaagctagtcagctcccagaagtttctctgctacaattgcggtcgggagagagactgcttattccggcctgggaagaagtcctgaaagaattcggtcactcctcggaccccgatgaacggggacgtcttagctggctgtatggcagggttggacacattatcaagctagggcgggagggagacgacttacaatgcacaaggcatctgggatggccatggcggctgcgtcctcctcgaacaacatcatcattatttgtatacgatggtaccagagccgctcgatcaataatggaggctgggggagagtggagggttgatggtgtcccccatggagaacgcatgagctcgatacttatatatgcggaagggagaacaagaacaactgcacgggcatctttttttttatttttatgtttttctctccctaaccttttgctataattgggtggtgccgttggtgagacgaaccgagccgacaaacaacagcctagcctggtggcgctcgatggagtttttggcgtttactactcatatatggtgcatatattcatgcgtgagagtacgcaagtagctaggtagatgtgactgttggattagtgcagctgattactgtcgta

SEQ ID NO: 81769 - DNA, 1256 bp, Zea Mays
ggcagtcaccgcggcaaagaggtcatcgcccaggccgtcgccgtagtagaagtcgagtatatgtgcagctatggggcttgaaatttcctcctgcaaatttcagagcgggacaagacatgcaagcacctgttgtcctaggaaacgtaacggatcggacttgttgccattttaattacaactccacatgggcatcggcatgcgttgatgcatatataggcacgatgcaagaaacgcggcagcaaaaggatgtcgagaaggaaacgaatgaaatcgctcggttgggtttcataaaaacatcatcatcccagaaagtaggaagaggcgagcaaaaaaccgtgttgggtcagagaagcaaaattacagcgacgatgtggcagcaatcatcgggaagcatggcgggcaccaacgatcttcagcgcatggagatgatcagattggcgcgcggcgcagcttctcggagagggggggcatgtgtgcgagcaaggtgggccgaaaataagcctgttttggccatgcagatgcacatgcatgacttcctctctctgtttttttttttggccaagatgacaacaccgaggagcaaggaagctagtcagctcccagaagtttctctgctacaattgcggtcgggagagagactgcttattccggcctgggaagaagtcctgaaagaattcggtcactcctcggaccccgatgaacggggacgtcttagctggctgcccttgctactgtagaagatctcttaatttgctgataagctggaaaaaatatagttatggcagggttggacacattatcaagctagggcgggagggagacgacttacaatgcacaaggcatctgggatggccatggcggctgcgtcctcctcgaacaacatcatcattatttgtatacgatggtaccagagccgctcgatcaataatggaggctgggggagagtggagggttgatggtgtcccccatggagaacgcatgagctcgatacttatatatgcggaagggagaacaagaacaactgcacgggcatctttttttttatttttatgtttttctctccctaaccttttgctataattgggtggtgccgttggtgagacgaaccgagccgacaaacaacagcctagcctggtggcgctcgatggagtttttggcgtttactactcatatatggtgcatatattcatgcgtgagagtacgcaagtagctaggtagatgtgactgttggattagtgcagctgattactgtcgta

SEQ ID NO: 81770 - DNA, 1009 bp, Zea Mays
aaagaggtcatcgcccaggccgtcgccgtagtagaagtcgagtatatgtgcagctatggggcttgaaatttcctcctgcaaatttcagagcgggacaagacatgcaagcacctgttgtcctaggaaacgtaacggatcggacttgttgccattttaattacaactccacatgggcatcggcatgcgttgatgcatatataggcacgatgcaagaaacgcggcagcaaaaggatgtcgagaaggaaacgaatgaaatcgctcggttgggtttcataaaaacatcatcatcccagaaagtaggaagaggcgagcaaaaaaccgtgttgggtcagagaagcaaaattacagcgacgatgtggcagcaatcatcgggaagcatggcgggcaccaacgatcttcagcgcatggagatgatcagattggcgcgcggcgcagcttctcggagactgcttattccggcctgggaagaagtcctgaaagaattcggtcactcctcggaccccgatgaacggggacgtcttagctggctgtatggcagggttggacacattatcaagctagggcgggagggagacgacttacaatgcacaaggcatctgggatggccatggcggctgcgtcctcctcgaacaacatcatcattatttgtatacgatggtaccagagccgctcgatcaataatggaggctgggggagagtggagggttgatggtgtcccccatggagaacgcatgagctcgatacttatatatgcggaagggagaacaagaacaactgcacgggcatctttttttttatttttatgtttttctctccctaaccttttgctataattgggtggtgccgttggtgagacgaaccgagccgacaaacaacagcctagcctggtggcgctcgatggagtttttggcgtttactactcatatatggtgcatatattcatgcgtgagagtacgcaagtagctaggtagatgtgactgttggattagtgcagctgattactgtcgta

SEQ ID NO: 81771 - DNA, 1396 bp, Zea Mays
ttgtgggcctccaagcggtcgaaacgggcccgaaagaatgggccatgtggcgcctcgggcttatctgcagaaaggggatctccgattcgcacctccaccacctgccgcgccggccggcgagcctcttcctcttcctccggtcgctccccttcccatctccatcttgatttcgattctctggtggctgggaaagcctgcgagagcgcgataaccggaaagatctgagctgctgcaaccgatctccggcgccatggggttcctcgaggacttccaagccagtgttgaagcattgccatctatgctgcatcggaactattcattaatgcgagagttggataaaagtttgcatggtgtgcaactagaaaatgagcagcgctgtcaacaagaaatagaggacattaagcatggacttgaatctggaagtattacatatgacccagcaaaattgaaattttccgaagaagcaatggaggagcagaaacattgtgttagaattgctgacgagaaggtggctttagccactcagacttatgacttagttctgctgcataatcatggctcatgacgcctctgcactgttgctaaattgtgaatgtgcgggattttgattatgctgatctataggttgatgctcacatccaacagctagatcagtttatgaggaagcttgaagaaatccggcaaggaaaagaggcagctgctgctgttactgcagggactgctgttgctactactgccactccaaccgtgaatgctggagcgacaactgctgatgctaatccgaagagtggacgatctggcgaaagaggcagagggggtcggaagaaggccaaggtacccacggagcagtcagtgccagtgccagtgccactgccacctattgacttagagttgcctgtggatcctaacgaaccgacatactgcctctgcaaccaagtcagctatgtgcaaaatcgagtggtatcactatggctgtgtgggcgtcaaggagcaacccaagggaaagtggtattgcccaaactgcatcggattccagaagaagcgaaaaggcaagtgatatgcagtccacaggctgctgtgctagtgtgtccttgcttgttaattgtgttgctgatgttgggtaacaaatgtagtagtagttgctgcctgtgacagtgcataccgttgtagatccagtgttctgtacatgttactcctccttcggtgctcgtagtttagggccatcaaccatttgttaacttcatggcctttttggcgattcatgccccttgtatgggtttcgcaatatcatgtctccttttcctggtatcacaatattatgcaatacagccggtttgtaacttttccctctttgaaaaaagaatatctaattagaattcctaaaatttgattgtct

SEQ ID NO: 81772 - DNA, 1397 bp, Zea Mays
cgaaacgggcccgaaagaatgggccatgtggcgcctcgggcttatctgcagaaaggggatctccgattcgcacctccaccacctgccgcgccggccggcgagcctcttcctcttcctccggtcgctccccttcccatctccatcttgatttcgattctctggtggctgggaaagcctgcgagagcgcgataaccggaaagatctgagctgctgcaaccgatctccggcgccatggggttcctcgaggacttccaagccacattgccatctatgctgcatcggaactattcattaatgcgagagttggataaaagtttgcatggtgtgcaactagaaaatgagcagcgctgtcaacaagaaatagaggacattaagcatggacttgaatctggaagtattacatatgacccagcaaaattgaaattttccgaagaagcaatggaggagcagaaacattgtgttagaattgctgacgagaaggtggctttagccactcagacttatgacttagttctgctgcataatcatggctcatgacgcctctgcactgttgctaaattgtgaatgtgcgggattttgattatgctgatctataggttgatgctcacatccaacagctagatcagtttatgaggaagcttgaagaaatccggcaaggaaaagaggcagctgctgctgttactgcagggactgctgttgctactactgccactccaaccgtgaatgctggagcgacaactgctgatgctaatccgaagagtggacgatctggcgaaagaggcagagggggtcggaagaaggccaaggtacccacggagcagtcagtgccagtgccagtgccactgccacctattgacttagagttgcctgtggatcctaacgaaccgacatactgcctctgcaaccaagtcagctatggtgagatggtggcatgcgacaatcctaattgcaaaatcgagtggtatcactatggctgtgtgggcgtcaaggagcaacccaagggaaagtggtattgcccaaactgcatcggattccagaagaagcgaaaaggcaagtgatatgcagtccacaggctgctgtgctagtgtgtccttgcttgttaattgtgttgctgatgttgggtaacaaatgtagtagtagttgctgcctgtgacagtgcataccgttgtagatccagtgttctgtacatgttactcctccttcggtgctcgtagtttagggccatcaaccatttgttaacttcatggcctttttggcgattcatgccccttgtatgggtttcgcaatatcatgtctccttttcctggtatcacaatattatgcaatacagccggtttgtaacttttccctctttgaaaaaagaatatctaattagaattcctaaaatttgattgtct

SEQ ID NO: 81773 - DNA, 185 bp, Zea Mays
catatataataacagagtatatagagataaatgtcacaatagtcagagtatttattacatagcggaagacttacaaaaataaaagataaatataacacgaactaaggatcgttggcgccaatgtcaactgagaaacgccacctagatcagatcaaactcctcgccttgtggctcctcctgaacca

SEQ ID NO: 81774 - DNA, 1269 bp, Zea Mays
cgaggctgcgcggcactccgctgatccgctccgctccgctccaacacccctacgcggacacgcgtgttgtcatcaaaaatgaaaaaacaaaaccacgcgcgccacgtggccgtggctggcggcccctcgccgcagcccggcacgccgcccgcccgcgctagccggccatcaaccgcatctgaaaggaggagtccacctgacgccgcccgcctcctcgtcaccccgtttcgcttcgccttccttcccctctctccctttattcctatcggcgctcggccaccttcccgcaccaacccactcgcccccgcattcccgggtgcctcgcttcgctttgcgcgcgattcgatccaggcttctttggttggaggcatggcctcgtcgcccgcgagcagctacgactgctccttcaaggtcctgcttatcggggattcggccgtcggcaagagcagcctcctcgtcagcttcgtctccgccgctcacatcgacgacgacatcgcgccaaccataggggtggattttaaaatcaattttctcagtgtgggtgggaagaaactaaaactgacaatatgggacactgccggtcaagagaggttcaggacaattaccagctcttactacaggggtgctcatgggattattttagtttatgacgttacaaagagggagagtttcacaaatttggctgatgtgtggaccaaggaaatagagttacactcaacaaataaggaatgcatcaaaatgcttgttggaaataaagtggacaaggatgaggacagaatggtgacaaaagaagaaggtcttgcatttgcacaagaacgtggatgtctctttgtcgagagtagtgctaaaacaagagaaaacgtggaaaaatgttttgaagagcttgcattaaagattctccaggttcccagtctattggaggaaggttcttcggttgttaagaggaacactctgactctgaaacaaaagcaggagaatgcaaaccgaagtggaggatgctgtcagtaggtcggccagttcttgttgcaagccactcgagaagaaaaaccttctcttgtttttcctgtttcttgatgtggtaatttgcgcaagtgatgggagaactaaccacttgaggttttggtgtgaattgatctctacagaagaaaaatcttctctctttttttctgtttcttgatgtggtaatttggtttgttgcttgtaacggatcctgtcagctgatcacttcattgattgtatatgtggaagtgtggtacatagttcatggct

SEQ ID NO: 81775 - DNA, 2492 bp, Zea Mays
cgaggctgcgcggcactccgctgatccgctccgctccgctccaacacccctacgcggacacgcgtgttgtcatcaaaaatgaaaaaacaaaaccacgcgcgccacgtggccgtggctggcggcccctcgccgcagcccggcacgccgcccgcccgcgctagccggccatcaaccgcatctgaaaggaggagtccacctgacgccgcccgcctcctcgtcaccccgtttcgcttcgccttccttcccctctctccctttattcctatcggcgctcggccaccttcccgcaccaacccactcgcccccgcattcccgggtgcctcgcttcgctttgcgcgcgattcgatccaggcttctttggttggaggcatggcctcgtcgcccgcgagcagctacgactgctccttcaaggtcctgcttatcggggattcggccgtcggcaagagcagcctcctcgtcagcttcgtctccgccgctcacatcgacgacgacatcgcgccaaccataggggtggattttaaaatcaattttctcagtgtgggtgggaagaaactaaaactgacaatatgggacactgccggtcaagagaggttcaggacaattaccagctcttactacaggggtgctcatgggattattttaggtaacttgatctctttcaagatacatatatgacagttcattatggattaagaagcttcaaccatttatcattttgtttactttagagtttaaattttttatgctcattttatggtattgcctgttgagctcaggttgggccataaaatgttagtcagatactcagatttaactttttgagttgtgttcaggctccactccggtggaatttttatggtcatctgagctattctttgatatacacgtaactgatgaggcttctaaatttcaagatgatccctcaaagcatgttgcagtccaggatcttgctgtgccacatcttagtggctttgtaccataagtttatttgttttaaacacctcaatttacttgatccctgttgtctaaacttctaaaggttacccactgtatgggtgcatcctttccagtacagtgatagcttaataatgatacacactctgattagctataatttgtaaacaagaccataaaaaacttgtaaacatcccatttctaatgttgattcatataaagtatttctttaatggagtattgtacactttcttatgcttttgccagattattaaatttatatcacttcttgggtggcgactcatttcgataatgtatcacctaagcatttggtacttttttttttttttgcaagtggtagtctggggtttacagtcggtatctgcatgtcatttcctaagcttctcacttgaattaagtagattagctttggcatagctacctggtcaaatttacagatcttctgtctgcccctcactttcatttctctaatttttggtaaactaaactcatgtattccattattaaggataatggaaatgggtttgagctttgtctcggggggaaaataacctaacatttctggttgtatttggaactgaatatgtggttaacttttgagaataatgctgaaatgccagttatgaatagtatcaacaaaatttcaaggaagcattttagtgtgtatgatcctataatcatcattcgtttctgtgattcagaaaatgttgcagggtgacttaaaagaatattaacttggtaatgtcttgttctaatagtttatgacgttacaaagagggagagtttcacaaatttggctgatgtgtggaccaaggaaatagagttacactcaacaaataaggaatgcatcaaaatgcttgttggaaataaagtggacaaggatgaggacagaatggtgacaaaagaagaaggtcttgcatttgcacaagaacgtggatgtctctttgtcgagagtagtgctaaaacaagagaaaacgtggaaaaatgttttgaagagcttgcattaaagattctccaggttcccagtctattggaggaaggttcttcggttgttaagaggaacactctgactctgaaacaaaagcaggagaatgcaaaccgaagtggaggatgctgtcagtaggtcggccagttcttgttgcaagccactcgaggtatcatatatttaggtccttgtaagttgtattgggatgtagatgagttgtatctaaatgcacagcggcagagccaatgcaagtgatgggagaactaaccacttgaggttttggtgtgaattgatctgtacagaagaaaaaccttctcttgtttttcctgtttcttgatgtggtaatttgcgcaagtgatgggagaactaaccacttgaggttttggtgtgaattgatctctacagaagaaaaatcttctctctttttttctgtttcttgatgtggtaatttggtttgttgcttgtaacggatcctgtcagctgatcacttcattgattgtatatgtggaagtgtggtacatagttcatggct

SEQ ID NO: 81776 - DNA, 764 bp, Zea Mays
ttttagttatgacgttacaaagagggagagtttcacaaatttggctgatgtgtggaccaaggaaatagagttacactcaacaaataaggaatgcatcaaaatgcttgttggaaataaagtggacaaggatgaggacagaatggtgacaaaagaagaaggtcttgcatttgcacaagaacgtggatgtctctttgtcgagagtagtgctaaaacaagagaaaacgtggaaaaatgttttgaagagcttgcattaaagattctccaggttcccagtctattggaggaaggttcttcggttgttaagaggaacactctgactctgaaacaaaagcaggagaatgcaaaccgaagtggaggatgctgtcagtaggtcggccagttcttgttgcaagccactcgaggtatcatatatttaggtccttgtaagttgtattgggatgtagatgagttgtatctaaatgcacagcggcagagccaatgcaagtgatgggagaactaaccacttgaggttttggtgtgaattgatctgtacagaagaaaaaccttctcttgtttttcctgtttcttgatgtggtaatttgcgcaagtgatgggagaactaaccacttgaggttttggtgtgaattgatctctacagaagaaaaatcttctctctttttttctgtttcttgatgtggtaatttggtttgttgcttgtaacggatcctgtcagctgatcacttcattgattgtatatgtggaagtgtggtacatagttcatggct

SEQ ID NO: 81777 - DNA, 1161 bp, Zea Mays
atttgaaatgcaaatccaccccacccacccaacaacggaacggaagtacggaaccgtgtgatcccgcaacattctacttgccctacccgccccggcccatctcgcccgtgcatctgcgcaccgacggccgggtccctgctcttcctttcgatccatttaaatatatacgctccccatcccttcccatcgcccccacaccgtctcctccacaacacgctcctcacctcgcggcgactcttgccagggcactcctccgcgaaagccgcatccgctccaaggggagttgatcgagaagcgttggtggacatgggtcagatccagtactccgagaagtacttcgacgacacctacgagtacaggcacgtcgtcctcccgcccgaggtcgccaagctcctccccaagaaccgcctcctgtccgagaacgagtggcgcgcgatcggagtgcagcagagccgcgggtgggtgcactacgcgatccaccgcccggagccgcacatcatgctgttccgccgcccgatcaactaccagcagcagcaggaggcggctgccgcgcagatgctggccaagtgagcccccggtggccagggcggcgaccaggaacgtttaaaaccctaaccccctttccatctctaaaaggggcgtcgctgttctgttgatcaattcctctatgctgttagttggaaacttcgggtgtagttggtggatttgctggtgtgtgccttgtgttcgtggaaattcctgtgaaggaactgccatgtgttaggctgttaccatgcccattttcttaatactatgtgttgactgtgatcaagatggcactcatgcagggatgatatttaatctgtttgacgtgatctttgtaatggtgtgatctggttagtagcactgatatcatgtttaatctgttatgtgtgatggtcagtatggtcatggtgattttgcatgatgagaattgttacctagtgatctaagtttatgtcaagtgaacatgctgttagttggaaacatgggatctagttggtcgactttttggtgggtgccttatgttcgtggaaattctgtgaaggaactgccatgtgttaggctttgttacattgccattttcttaacactattcgttactgtgtgatcaagatgtcacctgtatcgatgatatttaat

SEQ ID NO: 81778 - DNA, 1630 bp, Zea Mays
atttttctgagcatgatgataggagatagcaacccacatgaaagaaacctggccatgccatgtataggctacgagtactaacgaagagcatgtagcagtggtcgcacactttgcaccctaatgacagcccaaatatgaacagcaaaaaaatgtcagatacaagcaaatataggaaacaaatatttgacataaagcagaagggcaggggcagacccacgggagggtccaggtgggcagtggcacaccctaagccaggtccaccaagaccccaaccgaactccaatcgcttcagccttcacttcacgcctgcctgcgacgccaacgaggggacgagtgccggcccgcgaggccaatcgccgccgccccatagggtctggcctttggcactcgcgccacgcgccgtcgcccctaggccctagcaccacgccgtccctgcctcgcagccctgcgtatcgccgccgccgccgccgctctgtgttcgtggccctagcaccagcactggagccccgcccactggccagccgccacggcaccacgcgccaggcttccacgcctcgccatcgcccagccactagcgctcaggtataaaatggtaaaatattggacttctcactgagattggaaattgcaattgatgtggctcatgcctatattcagaccatcccgtaacccacagggacatcaaatcctcttctaatgaacacctgtcgagctataaggttgctggcttcggatttgccaaactagctcagctgacgctagtcatatctctcaatcaagtcaagggaacagcaggctatctcgatccagaatatctatctcagaacataccagctcaatgagatcaatctagcggtcgagaagttgtacgagctggccctgcagtgcttagctccaacgaagaggaaccggcagagcatgaagcggcgcgcagagattctgtggagcatacgtagagattacagggagttggttgttctacccacctctgccatgaactgaagcggatcgtctggagcaatcaagcgaaaggaagatctaaatttttatgtttgcctctcttgatttgattcgcttcaaagattggtggtggaaatcaaccgattgattggattctttcagttaccgcaggtggtggggaacgggactgatcgccttccttcggcatgttcggtttcaccttaatatatgtggattaaattagatttggtgagtttaaatttataccaagtcaaaatctatacgaacattttccaattcaatccaatccatgtgatgtagggataatcgaacaaagcttagatgttgtgtgtctattggctagaaaccagaagagtcccttgcagatcttgctatgcttgtgtggaaatgttgctgagcaaacatatgcgagtaccagatatctaatggtgtgtgtatcctgtaggttttcttatgcaggtaaacgcatcacgcatgaagaaatctagttgtttccatgaagtatgcatctttattgttattttttgttgttgttgcctatgatgagcaatattcagcgtctaatagacaacattcagaacctgtatctgtcctctttcggtgtttctttcctggcgttcaatttgggccggaaaggtcacgaaagcta

SEQ ID NO: 81779 - DNA, 1227 bp, Zea Mays
atcctctgtaacttccaaattgacaacgtcacataatatgtagttcacttcattctttttggaaagcacagaagaaacacttaaaatagaagaaagcaagcttgtcgtgacaatggacacaacaaattagttaatgattggacatctctaaacttcatcaggcacccagaagcaacggaatgtgatttatcttctctgtacaacccatagttattaaggcagtaaagcgacataagacgcttgaaaccttttttaccttttaggcggtaaagcgtaaggcgaggcgacaccttaataagattataaaatcaaaatttagtatatcacttagaccaaatagcatagaaatgaaaaagaaaatgaaagaaaaagtaaaaagagagatgatcagatggatatgtgtccatttcaaggcccatccagcccactcaaagcattgccaggacaccactctccatatctataccctaatgctcatgcacacacagctggccggaggacgcgcgcccgcgccgccagggaccgggagagagggcggagccgcgccgctatgtaagggcggactgacgggtggagcaggagggccgcgtgcccacgccaaagcggaagggagaggagggtcgccgccgccgataggaaagctgctgccgccgccgccgccaccaccaaagctttcgctgcaggaccagcagcagcttcgctagcaggagtaccaccttctggtttcgccacagctccactgacctcagaagcacatttcacaacttgcagcccgacagaagatttatccacaggagtatatagcagttgcacctttgaaggactgaggaacatggcagcagaatttctgaaactctgctgcctctgcttcacaaaacgcccaaaaggacgatttaaacttgtcagcgtcatcaggtgatgaacacaccttcggcaaccgctaagacgcgttcaaggaccatagttgcatagtatttttcaaatgtcgacttgtatttgcctgttgctagccttaatgtaactgtgcaatgcgtagtgaaattttatacgtcaaaatctgatggacaaagaaaatgatagattgatttgcaatgttaccggggtgtaattttggtctagcttacgagtcagtcgagctgacttaagttgtctaacgaaccgaattgagcaagtattctaactcttattgtaacgagtcgattcgagccatctttttgtagtacggag

SEQ ID NO: 81780 - DNA, 838 bp, Zea Mays
aagcaacggaatgtgatttatcttctctgtacaacccatagttattaaggcagtaaagcgacataagacgcttgaaaccttttttaccttttaggcggtaaagcgtaaggcgaggcgacaccttaataagattataaaatcaaaatttagtatatcacttagaccaaatagcatagaaatgaaaaagaaaatgaaagaaaaagtaaaaagagagatgatcagatggatatgtgtccatttcaaggcccatccagcccactcaaagcattgccaggacaccactctccatatctataccctaatgctcatgcacacacagctggccggaggacgcgcgcccgcgccgccagggaccgggagagagggcggagccgcgccgctatgtaagggcggactgacgggtggagcaggagggccgcgtgcccacgccaaagcggaagggagaggagggtcgccgccgccgataggaaagctgctgccgccgccgccgccaccaccaaagatttaaacttgtcagcgtcatcaggtgatgaacacaccttcggcaaccgctaagacgcgttcaaggaccatagttgcatagtatttttcaaatgtcgacttgtatttgcctgttgctagccttaatgtaactgtgcaatgcgtagtgaaattttatacgtcaaaatctgatggacaaagaaaatgatagattgatttgcaatgttaccggggtgtaattttggtctagcttacgagtcagtcgagctgacttaagttgtctaacgaaccgaattgagcaagtattctaactcttattgtaacgagtcgattcgagccatctttttgtagtacggag

SEQ ID NO: 81781 - DNA, 932 bp, Zea Mays
aagcaacggaatgtgatttatcttctctgtacaacccatagttattaaggcagtaaagcgacataagacgcttgaaaccttttttaccttttaggcggtaaagcgtaaggcgaggcgacaccttaataagattataaaatcaaaatttagtatatcacttagaccaaatagcatagaaatgaaaaagaaaatgaaagaaaaagtaaaaagagagatgatcagatggatatgtgtccatttcaaggcccatccagcccactcaaagcattgccaggacaccactctccatatctataccctaatgctcatgcacacacagctggccggaggacgcgcgcccgcgccgccagggaccgggagagagggcggagccgcgccgctatgtaagggcggactgacgggtggagcaggagggccgcgtgcccacgccaaagcggaagggagaggagggtcgccgccgccgataggaaagctgctgccgccgccgccgccaccaccaaagtatatagcagttgcacctttgaaggactgaggaacatggcagcagaatttctgaaactctgctgcctctgcttcacaaaacgcccaaaaggacgatttaaacttgtcagcgtcatcaggtgatgaacacaccttcggcaaccgctaagacgcgttcaaggaccatagttgcatagtatttttcaaatgtcgacttgtatttgcctgttgctagccttaatgtaactgtgcaatgcgtagtgaaattttatacgtcaaaatctgatggacaaagaaaatgatagattgatttgcaatgttaccggggtgtaattttggtctagcttacgagtcagtcgagctgacttaagttgtctaacgaaccgaattgagcaagtattctaactcttattgtaacgagtcgattcgagccatctttttgtagtacggag

SEQ ID NO: 81782 - DNA, 1927 bp, Zea Mays
ccatatctataccctaatgctcatgcacacacagctggccggaggacgcgcgcccgcgccgccagggaccgggagagagggcggagccgcgccgctatgtaagggcggactgacgggtggagcaggagggccgcgtgcccacgccaaagcggaagggagaggagggtcgccgccgccgataggaaagctgctgccgccgccgccgccaccaccaaaggtcctcgcagtctcggtaccctgacaacgacctccacccgctctcctccgccccgaacgacgaggagtcggccgctgcctcgaagtcgaaggtgttcccctgccggccgtcgtcgtccttgtcgtccgcgccggcgtgctcgaacgcgtggcacggcgactgctgcaagtagtccgactccgacctcagcagcgcggtcagggactcgtgcccgacattgccgtacgtggccggcgcgacgcttccattgctgctgcaccctagctgccccgcggcggcggtgcccacgtagcccttggcgtcgtcgacgtcgtgcacgcgctgctgcccctgcgccgtgaccgtgagcgacgccagctgcgtctgcagggccatcacctggatccatcggaatcggggtgcacggcggcacgggtcatcagcaaattaaaccccgtcacgagagacaaagcggagacggcggcggcggcagccgccaggcacttcgtgcacgcagccgtagtgcacctgctgctggagcgcgaagatgtgggcgacgcagccgtaggtggggtcgcgcagcctcgcctgcgcctcgtaggagatggtggcggcggcctccgggcggtcggcgagcggcaggtgcgcgagcagcttggacgcgttgctggcgccgaacaccttgtggatggcggcgaagtgcgccgcgccctgctcgtcgcagaagtagggcgcgaagacgcagccgcgcgcgcacctgcgccgcaggaacttgcacgctccgcacggtgacccgaaccccgtcatctccatctgcaagactgcaagcacagctgttctgtactgcactgtgctgcacgtgatagctcgctcagctcgagctggatcgatcggtggcgacgatcacttcgtgttcttgccctgctgactgcggctgtggtgcggtggaggatgggggcggggcggcaatgcttataaggaggagaaggagacggcagcagggctgggggattagggccaaaggattaaacaaaccaggcgtgtctgcccggtggacaaccagctccattattttgagcttccaatcgccctcgctccttaccgctaagtttttttttggtgacaccctccctgcaccgcatggggcaccctactacaataagcctagcaggagcatgtaagtccagccaccgagaaaaacaaatcaagcaatggtctgccaattcgtagcttaaattatgtgtttataatagaactgaatttgttatagcttaagatgtactgttttcttctttctatagtatatagcagttgcacctttgaaggactgaggaacatggcagcagaatttctgaaactctgctgcctctgcttcacaaaacgcccaaaaggacgatttaaacttgtcagcgtcatcaggtgatgaacacaccttcggcaaccgctaagacgcgttcaaggaccatagttgcatagtatttttcaaatgtcgacttgtatttgcctgttgctagccttaatgtaactgtgcaatgcgtagtgaaattttatacgtcaaaatctgatggacaaagaaaatgatagattgatttgcaatgttaccggggtgtaattttggtctagcttacgagtcagtcgagctgacttaagttgtctaacgaaccgaattgagcaagtattctaactcttattgtaacgagtcgattcgagccatctttttgtagtacggag

SEQ ID NO: 81783 - DNA, 301 bp, Zea Mays
cctaatgctcatgcacacacagctggccggaggacgcgcgcccgcgccgccagggaccgggagagagggcggagccgcgccgctatgtaagggcggactgacgggtggagcaggagggccgcgtgcccacgccaaagcggaagggagaggagggtcgccgccgccgataggaaagctgctgccgccgccgccgccaccaccaaaggcgtcatgcatttgtaaggcttggccccagcatggaccttgaaatgctcagcccggtcccatgaccacttgaaagccatattacaaccatcccatg

SEQ ID NO: 81784 - DNA, 5017 bp, Zea Mays
gtcgccggctcccaaaaccctagcgcccacgccgcctcgatgtcgcctccgccggcggtggcgacgggcggttccggagaacccacggtgccggcgtggctccgcggcctcccgcgcgccccggagtaccgccccacggagtcggagttcgccgaccccatcgccttcctctcccgcgtggagcgcgaggccgccgcctacggcatctgcaaggtcatcccgccctacccgcgcccctcccgccgcttcgtcttcgcgcacctcaatcgctccctcgtctcctcctctgaagccgccaaccccaccactgcctccggctcctccgccactgccccctcgctgccggaatccgccgctgtgttcacgacccgtcaccaggagcttggcacgccgcggcgtgggcgaccgcctccgcaggtgctcaagcaggtgtggcagagcggcgagcggtacacgctcgaccagtttgaggccaagtcccgcgccttctccaagatccacctcgctgggcttcgcgagcctactccactagaggtggaatcccttttctggaaggcgtccgctgacaggcctatctatatcgagtatgcgaatgacgttccggggtctggctttgccgccccaaaacagtcccagcggcacaagaaacggagacgagagagcgatcaggtggaagagggggagaaaggctctgggtggcggctctcaggaagcccatggaacctccaggcgattgcgcgggctcctggttcgcttacgcgattcatgccagatgatgtgcctggggttacctcgccaatggtgtacatcgggatgctctttagttggtttgcatggcatgtagaagatcatgaattgcacagtctcaacttccttcacaccggtgcacccaagacatggtatgcagtccctggggaccgagcctcagagctcgaggaagttattcgtgtacatggatatggaggaaaccctgaccgccttggtatttgtcctttctcatgctcgccgtctgaatgtttcggttgtggtctagcaggtacaagctctgaaatggccagcgtttccattgggtcaaatgttcatgatattattcagacatcagattcttatgaattctttgctgatatgtactgtttcagctttattgaattgattgtgatgtgctatttgttaactatgtttattccagctttgctagattttcaccttcatggatttaattgtggtgaagctgccaactttgcaactccacaatggttaaaatttgctaaagaggctgccgtacgaagggctgtgatgaattatcttccgatgctctctcatcagcagcttctgtacttgctagcagtttcttttataaccagaaccccaaatgtattgtctggaattcgttctcgcttgagagatcggaaaaaagaagaaagagaactgctggtgaagcaggaattcttgcaggacatgattagtgaaaacaagcttttgtgttctttcctggaaaagaaatcaattcgtcatgttgtgctctgggagcctgacttgttaccatcttcgactgctctacattcctgttcttctggctcaaaagctcctgagaagaagtctgaggatggttgcagaattgaatctagtgaacgtggcaccaaagataacagctctgatggcagtgcacatatgattggcgcacaaactaaatttatgtccgggaatagcaaatcatctggaactgcatctgcttccatggatgaggtcaatgctgatactgatgatgaggatgacctaccttttgatttgagcattgattctgggtcattgacctgtgttgcttgtggaattcttggttatccattcatggcaattctgcaaccttcaagagaagtattggaagggatttcccttgctcacacgagtagatacaagatgagttctgaaaaagataattgttcaaacacaattccatgctgtcccactgacagtaagtttggatgttcatttgttcccagtagaccttcttggcctgcggaacagcaatgtctggctactcctttggggcaagctaacatcagtcatcagaataagtgaaaatactcttcattcatgtagtgacaggggaaaatccgagaataagatttctgaggacagtcttggcccagaagtaggtgaacaaacaggcaaatatgtcatcaatgcgcaagctgcagaaagttctgatggtactattaactggaatacttattgtacatttgcacggccccggatcttttgcctgcagcatgcccttgagattgaaaagttgcttgagggcaaaggcggtgtccatggtctcattatttgccactcagactttgtcaaactaaaagcacttgcaatatcagtagctgaggaaattgagtttcaatttgattgtacagacatttcacttgcaaaagcatcaaagtctgatttacatctgatcaatatttcaattgacgacgagggacatgaggaagatggaagagactggacgtcacagatgggtctaaacctgaaatattctgccaaactcaggaaagagaaatcagaaaatcaagaacagtctcctttgccatttgggggactgctttcctgcccttcgcctgtttcggttgttcctaatcttaagtggctttgcaaaagagcgcggacaccatacacagttattggtactatgaggggttctagtgcaacagcaactgctgcggaacttaagcctggagtgaaaacagaaatattcactaatggaaatgtttgcgaggatgacaatagacatcattcttttcgacaaactggcctcgagcaaccaggtggactgcaagattgtgataagccttcatgttccgaggagaatggccatggaagacattgtcttgttaacattcctatcgctgttgctgaatatcctatgatgcatcaagtccgtgagggtccagtgagtgttagcacgtgcaatgactccatttgtttgtcaggttccctggatttacctccacacgcctctccagttgaagtaactagatacctaggatgtatacagtcaactgagctgagcagtttaccagccttttctgttcaacatttctttaatgatgaaagtacctctgtggaaggaagcatagactgtgtaagcaatggctgcttagaatctcaggatgatattttagggagcagagatgaacgtttgcaagttcaacaatatcaagagaagatggggcttcgcaataaccccaatatgaagtcagttgattcacacctgatagaaggtttggctgtatcagaaggaaagcatggggaaactgtggcagcattccttgaaaacaaggagcgttgtgctaagacatcctactgttctaatactgaaacaaaaactactaaatctgcaatagacaatcgattggagactcatcatctgggtactggtccagtgaaactaaattcaagctttaatgagatgcacagtgctgatagacaatgcagtttagtctttggctgccttgactcagctgatgttcctgcttcaactcaggctctgtcagtttcacctgttttgatgagtgacgagcagcaggtcgatgacgcccattctgctgtcaaggccattgagcacctgggcaataatctggctaacataaagcacaaatccctgcatatggatgtcctcatgttagaggacgcccaagttgcttccatggctgcagtccctgggcatgagggagaatctgtcgaggctggatcaaattcttttgatattttacttggagctctggctgaagagtccaaggcagcagatgctcctgggaaagatgaagttggcaaagcttccttgacattaataacactggctagcaacgagccctctgttacagaaggcagagttgtagacgtggtggaaacagacacaattttgggagcaggaaaagatgataaacaacttgaccagccacatggcttccatttgtcagatctggtgtctagatgcatcgggagctcaaatagatccgatatcatatgctatgtcagacgcaaacacaaaaggaagagggattactcgtgtttcgtccgctctccctgtgagagcttgaggccaaggtccaagcctgcagtagtcgaggagtcggaatggagcagaacagccgaggcttcttttgctaaaaggggtaagaggacacaagcagtgggatcatttcagtgtgatattgatctgtgtgacatggcatttgagactagggccgaactcaatgcccacaagcgcaatatttgcactgacgagtcatgtggcaagcgtttcagctcacacaaatacttgaagcgacatcagtgtgtccacagcgagatgaggccatttaaatgcccctgggaaggttgtaaaatgaccttcaagtggttgtgggctcagactgagcatgtcagagtgcacactggagagcggccatacaagtgctcggctcctgactgcgggcagacattcagatacgtatcggattacagccggcacagaaagaaatttaaccattactgacagcttctagttttccgagttattggccgcagctcggggcaaatctccagctgcttgtgtcggtgggccttgtttgttgtagtagctcagctcacgtatttattaacaacctgacagctgataggcctagtgaatgttccccgttaacaatgggctagtaatttagtcggtgtaggagttagaaattgttggggggtgaagtgcaacccccttctgttggtgtaggtttgcataagctgatcaccccccactgacacgtggccattcattatttgtttctcagatcagtgatgatgtatttaatccctgatgacaaacttcatgaacactgaaaccatatgatgtcggatgtcaaaatgatcaggggttgccaccgtcctcatgtaattcctgtcttcgacacattgtccaggtcctcattattctgtcatactgtttcagcagattacttgtatgcctttgtctacgcgaaatctaatcattttt

SEQ ID NO: 81785 - DNA, 5051 bp, Zea Mays
gccgcctcgatgtcgcctccgccggcggtggcgacgggcggttccggagaacccacggtgccggcgtggctccgcggcctcccgcgcgccccggagtaccgccccacggagtcggagttcgccgaccccatcgccttcctctcccgcgtggagcgcgaggccgccgcctacggcatctgcaaggtcatcccgccctacccgcgcccctcccgccgcttcgtcttcgcgcacctcaatcgctccctcgtctcctcctctgaagccgccaaccccaccactgcctccggctcctccgccactgccccctcgctgccggaatccgccgctgtgttcacgacccgtcaccaggagcttggcacgccgcggcgtgggcgaccgcctccgcaggtgctcaagcaggtgtggcagagcggcgagcggtacacgctcgaccagtttgaggccaagtcccgcgccttctccaagatccacctcgctgggcttcgcgagcctactccactagaggtggaatcccttttctggaaggcgtccgctgacaggcctatctatatcgagtatgcgaatgacgttccggggtctggctttgccgccccaaaacagtcccagcggcacaagaaacggagacgagagagcgatcaggtggaagagggggagaaaggctctgggtggcggctctcaggaagcccatggaacctccaggcgattgcgcgggctcctggttcgcttacgcgattcatgccagatgatgtgcctggggttacctcgccaatggtgtacatcgggatgctctttagttggtttgcatggcatgtagaagatcatgaattgcacagtctcaacttccttcacaccggtgcacccaagacatggtatgcagtccctggggaccgagcctcagagctcgaggaagttattcgtgtacatggatatggaggaaaccctgaccgccttggtatttgtcctttctcatgctcgccgtctgaatgtttcggttgtggtctagcaggtacaagctctgaaatggccagcgtttccattgggtcaaatgttcatgatattattcagacatcagattcttatgaattctttgctgatatgtactgtttcagctttattgaattgattgtgatgtgctatttgttaactatgtttattccagctttgctagattttcaccttcatggatttaattgtggtgaagctgccaactttgcaactccacaatggttaaaatttgctaaagaggctgccgtacgaagggctgtgatgaattatcttccgatgctctctcatcagcagcttctgtacttgctagcagtttcttttataaccagaaccccaaatgtattgtctggaattcgttctcgcttgagagatcggaaaaaagaagaaagagaactgctggtgaagcaggaattcttgcaggacatgattagtgaaaacaagcttttgtgttctttcctggaaaagaaatcaattcgtcatgttgtgctctgggagcctgacttgttaccatcttcgactgctctacattcctgttcttctggctcaaaagctcctgagaagaagtctgaggatggttgcagaattgaatctagtgaacgtggcaccaaagataacagctctgatggcagtgcacatatgattggcgcacaaactaaatttatgtccgggaatagcaaatcatctggaactgcatctgcttccatggatgaggtcaatgctgatactgatgatgaggatgacctaccttttgatttgagcattgattctgggtcattgacctgtgttgcttgtggaattcttggttatccattcatggcaattctgcaaccttcaagagaagtattggaagggatttcccttgctcacacgagtagatacaagatgagttctgaaaaagataattgttcaaacacaattccatgctgtcccactgacagtaagtttgaccttcttggcctgcggaacagcaatgtctggctactcctttggggcaagctaacatcagtcatcagaatgtaaattcacataaagatgtttgtttaagggagaatgaacctaatgggcctgtgccacaatgtaacaatatttcacattcttgcagaagtgaaaatactcttcattcatgtagtgacaggggaaaatccgagaataagatttctgaggacagtcttggcccagaagtaggtgaacaaacaggcaaatatgtcatcaatgcgcaagctgcagaaagttctgatggtactattaactggaatacttattgtacatttgcacggccccggatcttttgcctgcagcatgcccttgagattgaaaagttgcttgagggcaaaggcggtgtccatggtctcattatttgccactcagactttgtcaaactaaaagcacttgcaatatcagtagctgaggaaattgagtttcaatttgattgtacagacatttcacttgcaaaagcatcaaagtctgatttacatctgatcaatatttcaattgacgacgagggacatgaggaagatggaagagactggacgtcacagatgggtctaaacctgaaatattctgccaaactcaggaaagagaaatcagaaaatcaagaacagtctcctttgccatttgggggactgctttcctgcccttcgcctgtttcggttgttcctaatcttaagtggctttgcaaaagagcgcggacaccatacacagttattggtactatgaggggttctagtgcaacagcaactgctgcggaacttaagcctggagtgaaaacagaaatattcactaatggaaatgtttgcgaggatgacaatagacatcattcttttcgacaaactggcctcgagcaaccaggtggactgcaagattgtgataagccttcatgttccgaggagaatggccatggaagacattgtcttgttaacattcctatcgctgttgctgaatatcctatgatgcatcaagtccgtgagggtccagtgagtgttagcacgtgcaatgactccatttgtttgtcaggttccctggatttacctccacacgcctctccagttgaagtaactagatacctaggatgtatacagtcaactgagctgagcagtttaccagccttttctgttcaacatttctttaatgatgaaagtacctctgtggaaggaagcatagactgtgtaagcaatggctgcttagaatctcaggatgatattttagggagcagagatgaacgtttgcaagttcaacaatatcaagagaagatggggcttcgcaataaccccaatatgaagtcagttgattcacacctgatagaaggtttggctgtatcagaaggaaagcatggggaaactgtggcagcattccttgaaaacaaggagcgttgtgctaagacatcctactgttctaatactgaaacaaaaactactaaatctgcaatagacaatcgattggagactcatcatctgggtactggtccagtgaaactaaattcaagctttaatgagatgcacagtgctgatagacaatgcagtttagtctttggctgccttgactcagctgatgttcctgcttcaactcaggctctgtcagtttcacctgttttgatgagtgacgagcagcaggtcgatgacgcccattctgctgtcaaggccattgagcacctgggcaataatctggctaacataaagcacaaatccctgcatatggatgtcctcatgttagaggacgcccaagttgcttccatggctgcagtccctgggcatgagggagaatctgtcgaggctggatcaaattcttttgatattttacttggagctctggctgaagagtccaaggcagcagatgctcctgggaaagatgaagttggcaaagcttccttgacattaataacactggctagcaacgagccctctgttacagaaggcagagttgtagacgtggtggaaacagacacaattttgggagcaggaaaagatgataaacaacttgaccagccacatggcttccatttgtcagatctggtgtctagatgcatcgggagctcaaatagatccgatatcatatgctatgtcagacgcaaacacaaaaggaagagggattactcgtgtttcgtccgctctccctgtgagagcttgaggccaaggtccaagcctgcagtagtcgaggagtcggaatggagcagaacagccgaggcttcttttgctaaaaggggtaagaggacacaagcagtgggatcatttcagtgtgatattgatctgtgtgacatggcatttgagactagggccgaactcaatgcccacaagcgcaatatttgcactgacgagtcatgtggcaagcgtttcagctcacacaaatacttgaagcgacatcagtgtgtccacagcgagatgaggccatttaaatgcccctgggaaggttgtaaaatgaccttcaagtggttgtgggctcagactgagcatgtcagagtgcacactggagagcggccatacaagtgctcggctcctgactgcgggcagacattcagatacgtatcggattacagccggcacagaaagaaatttaaccattactgacagcttctagttttccgagttattggccgcagctcggggcaaatctccagctgcttgtgtcggtgggccttgtttgttgtagtagctcagctcacgtatttattaacaacctgacagctgataggcctagtgaatgttccccgttaacaatgggctagtaatttagtcggtgtaggagttagaaattgttggggggtgaagtgcaacccccttctgttggtgtaggtttgcataagctgatcaccccccactgacacgtggccattcattatttgtttctcagatcagtgatgatgtatttaatccctgatgacaaacttcatgaacactgaaaccatatgatgtcggatgtcaaaatgatcaggggttgccaccgtcctcatgtaattcctgtcttcgacacattgtccaggtcctcattattctgtcatactgtttcagcagattacttgtatgcctttgtctacgcgaaatctaatcattttt

SEQ ID NO: 81786 - DNA, 4969 bp, Zea Mays
atgtcgcctccgccggcggtggcgacgggcggttccggagaacccacggtgccggcgtggctccgcggcctcccgcgcgccccggagtaccgccccacggagtcggagttcgccgaccccatcgccttcctctcccgcgtggagcgcgaggccgccgcctacggcatctgcaaggtcatcccgccctacccgcgcccctcccgccgcttcgtcttcgcgcacctcaatcgctccctcgtctcctcctctgaagccgccaaccccaccactgcctccggctcctccgccactgccccctcgctgccggaatccgccgctgtgttcacgacccgtcaccaggagcttggcacgccgcggcgtgggcgaccgcctccgcaggtgctcaagcaggtgtggcagagcggcgagcggtacacgctcgaccagtttgaggccaagtcccgcgccttctccaagatccacctcgctgggcttcgcgagcctactccactagaggtggaatcccttttctggaaggcgtccgctgacaggcctatctatatcgagtatgcgaatgacgttccggggtctggctttgccgccccaaaacagtcccagcggcacaagaaacggagacgagagagcgatcaggtggaagagggggagaaaggctctgggtggcggctctcaggaagcccatggaacctccaggcgattgcgcgggctcctggttcgcttacgcgattcatgccagatgatgtgcctggggttacctcgccaatggtgtacatcgggatgctctttagttggtttgcatggcatgtagaagatcatgaattgcacagtctcaacttccttcacaccggtgcacccaagacatggtatgcagtccctggggaccgagcctcagagctcgaggaagttattcgtgtacatggatatggaggaaaccctgaccgccttggtatttgtcctttctcatgctcgccgtctgaatgtttcggttgtggtctagcaggtacaagctctgaaatggccagcgtttccattgggtcaaatgttcatgatattattcagacatcagattcttatgaattctttgctgatatgtactgtttcagctttattgaattgattgtgatgtgctatttgttaactatgtttattccagctttgctagattttcaccttcatggatttaattgtggtgaagctgccaactttgcaactccacaatggttaaaatttgctaaagaggctgccgtacgaagggctgtgatgaattatcttccgatgctctctcatcagcagcttctgtacttgctagcagtttcttttataaccagaaccccaaatgtattgtctggaattcgttctcgcttgagagatcggaaaaaagaagaaagagaactgctggtgaagcaggaattcttgcaggacatgattagtgaaaacaagcttttgtgttctttcctggaaaagaaatcaattcgtcatgttgtgctctgggagcctgacttgttaccatcttcgactgctctacattcctgttcttctggctcaaaagctcctgagaagaagtctgaggatggttgcagaattgaatctagtgaacgtggcaccaaagataacagctctgatggcagtgcacatatgattggcgcacaaactaaatttatgtccgggaatagcaaatcatctggaactgcatctgcttccatggatgaggtcaatgctgatactgatgatgaggatgacctaccttttgatttgagcattgattctgggtcattgacctgtgttgcttgtggaattcttggttatccattcatggcaattctgcaaccttcaagagaagtattggaagggatttcccttgctcacacgagtagatacaagatgagttctgaaaaagataattgttcaaacacaattccatgctgtcccactgacagatgttcatttgttcccagtagaccttcttggcctgcggaacagcaatgtctggctactcctttggggcaagctaacatcagtcatcagaataagtgaaaatactcttcattcatgtagtgacaggggaaaatccgagaataagatttctgaggacagtcttggcccagaagtaggtgaacaaacaggcaaatatgtcatcaatgcgcaagctgcagaaagttctgatggtactattaactggaatacttattgtacatttgcacggccccggatcttttgcctgcagcatgcccttgagattgaaaagttgcttgagggcaaaggcggtgtccatggtctcattatttgccactcagactttgtcaaactaaaagcacttgcaatatcagtagctgaggaaattgagtttcaatttgattgtacagacatttcacttgcaaaagcatcaaagtctgatttacatctgatcaatatttcaattgacgacgagggacatgaggaagatggaagagactggacgtcacagatgggtctaaacctgaaatattctgccaaactcaggaaagagaaatcagaaaatcaagaacagtctcctttgccatttgggggactgctttcctgcccttcgcctgtttcggttgttcctaatcttaagtggctttgcaaaagagcgcggacaccatacacagttattggtactatgaggggttctagtgcaacagcaactgctgcggaacttaagcctggagtgaaaacagaaatattcactaatggaaatgtttgcgaggatgacaatagacatcattcttttcgacaaactggcctcgagcaaccaggtggactgcaagattgtgataagccttcatgttccgaggagaatggccatggaagacattgtcttgttaacattcctatcgctgttgctgaatatcctatgatgcatcaagtccgtgagggtccagtgagtgttagcacgtgcaatgactccatttgtttgtcaggttccctggatttacctccacacgcctctccagttgaagtaactagatacctaggatgtatacagtcaactgagctgagcagtttaccagccttttctgttcaacatttctttaatgatgaaagtacctctgtggaaggaagcatagactgtgtaagcaatggctgcttagaatctcaggatgatattttagggagcagagatgaacgtttgcaagttcaacaatatcaagagaagatggggcttcgcaataaccccaatatgaagtcagttgattcacacctgatagaaggtttggctgtatcagaaggaaagcatggggaaactgtggcagcattccttgaaaacaaggagcgttgtgctaagacatcctactgttctaatactgaaacaaaaactactaaatctgcaatagacaatcgattggagactcatcatctgggtactggtccagtgaaactaaattcaagctttaatgagatgcacagtgctgatagacaatgcagtttagtctttggctgccttgactcagctgatgttcctgcttcaactcaggctctgtcagtttcacctgttttgatgagtgacgagcagcaggtcgatgacgcccattctgctgtcaaggccattgagcacctgggcaataatctggctaacataaagcacaaatccctgcatatggatgtcctcatgttagaggacgcccaagttgcttccatggctgcagtccctgggcatgagggagaatctgtcgaggctggatcaaattcttttgatattttacttggagctctggctgaagagtccaaggcagcagatgctcctgggaaagatgaagttggcaaagcttccttgacattaataacactggctagcaacgagccctctgttacagaaggcagagttgtagacgtggtggaaacagacacaattttgggagcaggaaaagatgataaacaacttgaccagccacatggcttccatttgtcagatctggtgtctagatgcatcgggagctcaaatagatccgatatcatatgctatgtcagacgcaaacacaaaaggaagagggattactcgtgtttcgtccgctctccctgtgagagcttgaggccaaggtccaagcctgcagtagtcgaggagtcggaatggagcagaacagccgaggcttcttttgctaaaaggggtaagaggacacaagcagtgggatcatttcagtgtgatattgatctgtgtgacatggcatttgagactagggccgaactcaatgcccacaagcgcaatatttgcactgacgagtcatgtggcaagcgtttcagctcacacaaatacttgaagcgacatcagtgtgtccacagcgagatgaggccatttaaatgcccctgggaaggttgtaaaatgaccttcaagtggttgtgggctcagactgagcatgtcagagtgcacactggagagcggccatacaagtgctcggctcctgactgcgggcagacattcagatacgtatcggattacagccggcacagaaagaaatttaaccattactgacagcttctagttttccgagttattggccgcagctcggggcaaatctccagctgcttgtgtcggtgggccttgtttgttgtagtagctcagctcacgtatttattaacaacctgacagctgataggcctagtgaatgttccccgttaacaatgggctagtaatttagtcggtgtaggagttagaaattgttggggggtgaagtgcaacccccttctgttggtgtaggtttgcataagctgatcaccccccactgacacgtggccattcattatttgtttctcagatcagtgatgatgtatttaatccctgatgacaaacttcatgaacactgaaaccatatgatgtcggatgtcaaaatgatcaggggttgccaccgtcctcatgtaattcctgtcttcgacacattgtccaggtcctcattattctgtcatactgtttcagcagattacttgtatgcctttgtctacgcgaaatctaatcattttt

SEQ ID NO: 81787 - DNA, 3854 bp, Zea Mays
gtatcctggagagtttgtggtgacattcccaagggcataccacattgggtttagtcatggatttaattgtggtgaagctgccaactttgcaactccacaatggttaaaatttgctaaagaggctgccgtacgaagggctgtgatgaattatcttccgatgctctctcatcagcagcttctgtacttgctagcagtttcttttataaccagaaccccaaatgtattgtctggaattcgttctcgcttgagagatcggaaaaaagaagaaagagaactgctggtgaagcaggaattcttgcaggacatgattagtgaaaacaagcttttgtgttctttcctggaaaagaaatcaattcgtcatgttgtgctctgggagcctgacttgttaccatcttcgactgctctacattcctgttcttctggctcaaaagctcctgagaagaagtctgaggatggttgcagaattgaatctagtgaacgtggcaccaaagataacagctctgatggcagtgcacatatgattggcgcacaaactaaatttatgtccgggaatagcaaatcatctggaactgcatctgcttccatggatgaggtcaatgctgatactgatgatgaggatgacctaccttttgatttgagcattgattctgggtcattgacctgtgttgcttgtggaattcttggttatccattcatggcaattctgcaaccttcaagagaagtattggaagggatttcccttgctcacacgagtagatacaagatgagttctgaaaaagataattgttcaaacacaattccatgctgtcccactgacagatgttcatttgttcccagtagaccttcttggcctgcggaacagcaatgtctggctactcctttggggcaagctaacatcagtcatcagaataagtgaaaatactcttcattcatgtagtgacaggggaaaatccgagaataagatttctgaggacagtcttggcccagaagtaggtgaacaaacaggcaaatatgtcatcaatgcgcaagctgcagaaagttctgatggtactattaactggaatacttattgtacatttgcacggccccggatcttttgcctgcagcatgcccttgagattgaaaagttgcttgagggcaaaggcggtgtccatggtctcattatttgccactcagactttgtcaaactaaaagcacttgcaatatcagtagctgaggaaattgagtttcaatttgattgtacagacatttcacttgcaaaagcatcaaagtctgatttacatctgatcaatatttcaattgacgacgagggacatgaggaagatggaagagactggacgtcacagatgggtctaaacctgaaatattctgccaaactcaggaaagagaaatcagaaaatcaagaacagtctcctttgccatttgggggactgctttcctgcccttcgcctgtttcggttgttcctaatcttaagtggctttgcaaaagagcgcggacaccatacacagttattggtactatgaggggttctagtgcaacagcaactgctgcggaacttaagcctggagtgaaaacagaaatattcactaatggaaatgtttgcgaggatgacaatagacatcattcttttcgacaaactggcctcgagcaaccaggtggactgcaagattgtgataagccttcatgttccgaggagaatggccatggaagacattgtcttgttaacattcctatcgctgttgctgaatatcctatgatgcatcaagtccgtgagggtccagtgagtgttagcacgtgcaatgactccatttgtttgtcaggttccctggatttacctccacacgcctctccagttgaagtaactagatacctaggatgtatacagtcaactgagctgagcagtttaccagccttttctgttcaacatttctttaatgatgaaagtacctctgtggaaggaagcatagactgtgtaagcaatggctgcttagaatctcaggatgatattttagggagcagagatgaacgtttgcaagttcaacaatatcaagagaagatggggcttcgcaataaccccaatatgaagtcagttgattcacacctgatagaaggtttggctgtatcagaaggaaagcatggggaaactgtggcagcattccttgaaaacaaggagcgttgtgctaagacatcctactgttctaatactgaaacaaaaactactaaatctgcaatagacaatcgattggagactcatcatctgggtactggtccagtgaaactaaattcaagctttaatgagatgcacagtgctgatagacaatgcagtttagtctttggctgccttgactcagctgatgttcctgcttcaactcaggctctgtcagtttcacctgttttgatgagtgacgagcagcaggtcgatgacgcccattctgctgtcaaggccattgagcacctgggcaataatctggctaacataaagcacaaatccctgcatatggatgtcctcatgttagaggacgcccaagttgcttccatggctgcagtccctgggcatgagggagaatctgtcgaggctggatcaaattcttttgatattttacttggagctctggctgaagagtccaaggcagcagatgctcctgggaaagatgaagttggcaaagcttccttgacattaataacactggctagcaacgagccctctgttacagaaggcagagttgtagacgtggtggaaacagacacaattttgggagcaggaaaagatgataaacaacttgaccagccacatggcttccatttgtcagatctggtgtctagatgcatcgggagctcaaatagatccgatatcatatgctatgtcagacgcaaacacaaaaggaagagggattactcgtgtttcgtccgctctccctgtgagagcttgaggccaaggtccaagcctgcagtagtcgaggagtcggaatggagcagaacagccgaggcttcttttgctaaaaggggtaagaggacacaagcagtgggatcatttcagtgtgatattgatctgtgtgacatggcatttgagactagggccgaactcaatgcccacaagcgcaatatttgcactgacgagtcatgtggcaagcgtttcagctcacacaaatacttgaagcgacatcagtgtgtccacagcgagatgaggccatttaaatgcccctgggaaggttgtaaaatgaccttcaagtggttgtgggctcagactgagcatgtcagagtgcacactggagagcggccatacaagtgctcggctcctgactgcgggcagacattcagatacgtatcggattacagccggcacagaaagaaatttaaccattactgacagcttctagttttccgagttattggccgcagctcggggcaaatctccagctgcttgtgtcggtgggccttgtttgttgtagtagctcagctcacgtatttattaacaacctgacagctgataggcctagtgaatgttccccgttaacaatgggctagtaatttagtcggtgtaggagttagaaattgttggggggtgaagtgcaacccccttctgttggtgtaggtttgcataagctgatcaccccccactgacacgtggccattcattatttgtttctcagatcagtgatgatgtatttaatccctgatgacaaacttcatgaacactgaaaccatatgatgtcggatgtcaaaatgatcaggggttgccaccgtcctcatgtaattcctgtcttcgacacattgtccaggtcctcattattctgtcatactgtttcagcagattacttgtatgcctttgtctacgcgaaatctaatcattttt

SEQ ID NO: 81788 - DNA, 3861 bp, Zea Mays
atcctggagagtttgtggtgacattcccaagggcataccacattgggtttagtcatggatttaattgtggtgaagctgccaactttgcaactccacaatggttaaaatttgctaaagaggctgccgtacgaagggctgtgatgaattatcttccgatgctctctcatcagcagcttctgtacttgctagcagtttcttttataaccagaaccccaaatgtattgtctggaattcgttctcgcttgagagatcggaaaaaagaagaaagagaactgctggtgaagcaggaattcttgcaggacatgattagtgaaaacaagcttttgtgttctttcctggaaaagaaatcaattcgtcatgttgtgctctgggagcctgacttgttaccatcttcgactgctctacattcctgttcttctggctcaaaagctcctgagaagaagtctgaggatggttgcagaattgaatctagtgaacgtggcaccaaagataacagctctgatggcagtgcacatatgattggcgcacaaactaaatttatgtccgggaatagcaaatcatctggaactgcatctgcttccatggatgaggtcaatgctgatactgatgatgaggatgacctaccttttgatttgagcattgattctgggtcattgacctgtgttgcttgtggaattcttggttatccattcatggcaattctgcaaccttcaagagaagtattggaagggatttcccttgctcacacgagtagatacaagatgagttctgaaaaagataattgttcaaacacaattccatgctgtcccactgacagtaagtttggatgttcatttgttcccagtagaccttcttggcctgcggaacagcaatgtctggctactcctttggggcaagctaacatcagtcatcagaataagtgaaaatactcttcattcatgtagtgacaggggaaaatccgagaataagatttctgaggacagtcttggcccagaagtaggtgaacaaacaggcaaatatgtcatcaatgcgcaagctgcagaaagttctgatggtactattaactggaatacttattgtacatttgcacggccccggatcttttgcctgcagcatgcccttgagattgaaaagttgcttgagggcaaaggcggtgtccatggtctcattatttgccactcagactttgtcaaactaaaagcacttgcaatatcagtagctgaggaaattgagtttcaatttgattgtacagacatttcacttgcaaaagcatcaaagtctgatttacatctgatcaatatttcaattgacgacgagggacatgaggaagatggaagagactggacgtcacagatgggtctaaacctgaaatattctgccaaactcaggaaagagaaatcagaaaatcaagaacagtctcctttgccatttgggggactgctttcctgcccttcgcctgtttcggttgttcctaatcttaagtggctttgcaaaagagcgcggacaccatacacagttattggtactatgaggggttctagtgcaacagcaactgctgcggaacttaagcctggagtgaaaacagaaatattcactaatggaaatgtttgcgaggatgacaatagacatcattcttttcgacaaactggcctcgagcaaccaggtggactgcaagattgtgataagccttcatgttccgaggagaatggccatggaagacattgtcttgttaacattcctatcgctgttgctgaatatcctatgatgcatcaagtccgtgagggtccagtgagtgttagcacgtgcaatgactccatttgtttgtcaggttccctggatttacctccacacgcctctccagttgaagtaactagatacctaggatgtatacagtcaactgagctgagcagtttaccagccttttctgttcaacatttctttaatgatgaaagtacctctgtggaaggaagcatagactgtgtaagcaatggctgcttagaatctcaggatgatattttagggagcagagatgaacgtttgcaagttcaacaatatcaagagaagatggggcttcgcaataaccccaatatgaagtcagttgattcacacctgatagaaggtttggctgtatcagaaggaaagcatggggaaactgtggcagcattccttgaaaacaaggagcgttgtgctaagacatcctactgttctaatactgaaacaaaaactactaaatctgcaatagacaatcgattggagactcatcatctgggtactggtccagtgaaactaaattcaagctttaatgagatgcacagtgctgatagacaatgcagtttagtctttggctgccttgactcagctgatgttcctgcttcaactcaggctctgtcagtttcacctgttttgatgagtgacgagcagcaggtcgatgacgcccattctgctgtcaaggccattgagcacctgggcaataatctggctaacataaagcacaaatccctgcatatggatgtcctcatgttagaggacgcccaagttgcttccatggctgcagtccctgggcatgagggagaatctgtcgaggctggatcaaattcttttgatattttacttggagctctggctgaagagtccaaggcagcagatgctcctgggaaagatgaagttggcaaagcttccttgacattaataacactggctagcaacgagccctctgttacagaaggcagagttgtagacgtggtggaaacagacacaattttgggagcaggaaaagatgataaacaacttgaccagccacatggcttccatttgtcagatctggtgtctagatgcatcgggagctcaaatagatccgatatcatatgctatgtcagacgcaaacacaaaaggaagagggattactcgtgtttcgtccgctctccctgtgagagcttgaggccaaggtccaagcctgcagtagtcgaggagtcggaatggagcagaacagccgaggcttcttttgctaaaaggggtaagaggacacaagcagtgggatcatttcagtgtgatattgatctgtgtgacatggcatttgagactagggccgaactcaatgcccacaagcgcaatatttgcactgacgagtcatgtggcaagcgtttcagctcacacaaatacttgaagcgacatcagtgtgtccacagcgagatgaggccatttaaatgcccctgggaaggttgtaaaatgaccttcaagtggttgtgggctcagactgagcatgtcagagtgcacactggagagcggccatacaagtgctcggctcctgactgcgggcagacattcagatacgtatcggattacagccggcacagaaagaaatttaaccattactgacagcttctagttttccgagttattggccgcagctcggggcaaatctccagctgcttgtgtcggtgggccttgtttgttgtagtagctcagctcacgtatttattaacaacctgacagctgataggcctagtgaatgttccccgttaacaatgggctagtaatttagtcggtgtaggagttagaaattgttggggggtgaagtgcaacccccttctgttggtgtaggtttgcataagctgatcaccccccactgacacgtggccattcattatttgtttctcagatcagtgatgatgtatttaatccctgatgacaaacttcatgaacactgaaaccatatgatgtcggatgtcaaaatgatcaggggttgccaccgtcctcatgtaattcctgtcttcgacacattgtccaggtcctcattattctgtcatactgtttcagcagattacttgtatgcctttgtctacgcgaaatctaatcattttt

SEQ ID NO: 81789 - DNA, 1270 bp, Zea Mays
atggcggtggaggtggatgcgaggtgggagcccatgggggcgcaggagtactacgactactggcgggccatgtacaacgcccgcggaaacagtttgaattttatttttatggtcctatttgtgcaggtgcatcgtctggtgaagcatgtgtgtccaaaagtgaatattcaaaaagataatggggtgcagatgaagattattggtactcatgtcgatgctacagaaattgtctacgatgaggactcctacaataagattcatgcttccacgcaagtcccctcaactctgaaggcatgcctatttctatatcatgtttccatttcatccttgaactcatggaatccatcgatggtgtggaattcagtttaaaattggaagtcaatactcctcagacaagaatagactttcaagaggaaggggtctgatctagatcctcgaagttatatatctggaaaacaggctcttcagatatcgaacctcctttatataaatgttgttaatcagcttccagcatttgtttcatttgagttgtgtttactgcctagctctccatccaacaattgatatcttactgactggtggtcgagattcaatttgcagggcccagaacatctgcaatttattttttgataagtcctccaagatttgccctaccatgtggcaaccattgatccatgcccaaaatttgcctgccactggtgttcttatcccaacactcgatcaacatgcaagtagaaatgaagcctagagccaaacgatgcgagaggaggtacattacttgatggattgttttagcattatgattatgacatgctttgttctcttctcttgatgatgattatatttgcacctaaaatgcagtatggtctagacacgagccagttcacataaacccttcagacccaagcaggtaccagcagaatggcacgccagctaaagaaaggtgtcatggtgttgttcaaacttcgagtggtgtgtggaatagaagaatcccaattcccaaccatattatttgtcacgcttggtatgtcttctatataaatgttctatgcacctgtaattttattgtgaatgaggaactgttagccattgacatcatttatttgtgtttttagggagtttgtttattgttgccaatctcaaccttttttcatgtagctctatttaaccttgatgatttactcaaatatatgtaagatttggttgtgccatgaagtgagatgatattgatagatctcttttgctttgtgtacatcagaaatgagtaaga

SEQ ID NO: 81790 - DNA, 1192 bp, Zea Mays
atcttagaaagttgcctatcggtctttgcatgcaccactcattgctatttaaaattcatgcttccacgcaagtcccctcaactctgaaggcatgcctatttctatatcatgtttccatttcatccttgaactcatggaatccatcgatggtgtggaattcagtttaaaattggaagtcaatactcctcagacaagaatagactttcaagaggaaggggtctgatctagatcctcgaagttatatatctggaaaacaggctcttcagatatcgaacctcctttatataaatgttgttaatcagcttccagcatttgtttcatttgagttgtgtttactgcctagctctccatccaacaattgatatcttactgactggtggtcgagattcaatttgcagggcccagaacatctgcaatttattttttgataagtcctccaagatttggttagttgcttcatgatttctctttttctctcttaatactctttgatcttttctccaagatttgggcaatgaacaaacacgttgagtatgatagtgatgctaaaattattgcaatcgattgaagccctaccatgtggcaaccattgatccatgcccaaaatttgcctgccactggtgttcttatcccaacactcgatcaacatgcaagtagaaatgaagcctagagccaaacgatgcgagaggaggtacattacttgatggattgttttagcattatgattatgacatgctttgttctcttctcttgatgatgattatatttgcacctaaaatgcagtatggtctagacacgagccagttcacataaacccttcagacccaagcaggtaccagcagaatggcacgccagctaaagaaaggtgtcatggtgttgttcaaacttcgagtggtgtgtggaatagaagaatcccaattcccaaccatattatttgtcacgcttggtatgtcttctatataaatgttctatgcacctgtaattttattgtgaatgaggaactgttagccattgacatcatttatttgtgtttttagggagtttgtttattgttgccaatctcaaccttttttcatgtagctctatttaaccttgatgatttactcaaatatatgtaagatttggttgtgccatgaagtgagatgatattgatagatctcttttgctttgtgtacatcagaaatgagtaaga

SEQ ID NO: 81791 - DNA, 1655 bp, Zea Mays
aaaaaacctgaaaagaaaattcgaggtcccgtgcctgcccgctctctcgacgatttccatctctccctccattttgccccctcgctcttctcttcacttcctccgctccgcttgctgtctcctagtccttcccttagggtttgtccagctccgcgctccgcctcgctcgctagctccctctctcgtcgatcccacggccccgatcagcgcgatctccgcgcggccatggtctccggcgcggcgcacaacccgggcgggggcgccgccgcccagaccacccagcgctcgccgccgcagctgggggcccggacggccctcgccacgccgccgccggtctccggcggcgctgcgcactccgcgtctactagcggcggcaccgctggttcaccaccgtccagccgcagcgagcagcacgcccccgacggtgctgtcaagggtcccgccctcggcactgcgcccgcagcggcggcggcgtccacgcctgccagcgacagcacgttcctccgcttgaataatctcgacatcaacggcgacgacgcgccgtcgtcgcaggctcccacgagcaagaagaaaaggagaggcacacgggcagtgggtcctgataaaggaaaccggggactgcgccagtttagtatgaaaggtggcagatgaacttgttgctgagtttacagaccccaataataatattgaggcaccagaccctgataaccctaatgcgcaacaatatgatgaaaaaaatattcgacgaagagtttatgatgctttaaatgttctgatggctatggacattatatctaaagataaaaaggagatccagtggaagggcttgccgcggactagtataagtgatattgaagaattgaagactgagcttgtgggactgaaaggtagaattgagaagaaaagtgtttacttacaggagctacaagatcaatatgtaggtttgcaaaacctgattcaacgaaatgagcaattatatggttcaggaaacacaccttctggtggagtggctttgccattcatcctagtccagacccgacctcatgcaaccgtggaagttgagatatcagaagatatgcagctggttcattttgacttcaatagcactccatttgagctgcatgatgactcatatgtcctaaaggaaatgcggttctgtggaagagaacaacatgatggaactcaagagtcgatatcaaatggaggtgagagttcaaacgtgtcaaatatttattggcaacaagcacagcgtatggagatgccaaacaatggcacagttaggttatcaagctcaccgcctattccagggatattaaaagggcgtgtgaagcacgagcagcactagcgcttcggttttggttaactggcgttgtcgtcctgagagcagtttgttttattacttttctccgttgtgtaaagcgcctgtaaattattaggcaagggggagggtagtagctctgatctgatttagctctgattggtagaacgacgggtgtaactatatccttgattcggttctctcggtatggttgagaaaagggttgacatgtaatttgtagagcattataaaaactaaaattgttgatgtcttctggggctgcgtgcttcgttctgggcacaagcatatttatttcctgttcctttttcttctctct

SEQ ID NO: 81792 - DNA, 1568 bp, Zea Mays
aggtcccgtgcctgcccgctctctcgacgatttccatctctccctccattttgccccctcgctcttctcttcacttcctccgctccgcttgctgtctcctagtccttcccttagggtttgtccagctccgcgctccgcctcgctcgctagctccctctctcgtcgatcccacggccccgatcagcgcgatctccgcgcggccatggtctccggcgcggcgcacaacccgggcgggggcgccgccgcccagaccacccagcgctcgccgccgcagctgggggcccggacggccctcgccacgccgccgccggtctccggcggcgctgcgcactccgcgtctactagcggcggcaccgctggttcaccaccgtccagccgcagcgagcagcacgcccccgacggtgctgtcaagggtcccgccctcggcactgcgcccgcagcggcggcggcgtccacgcctgccagcgacagcacgttcctccgcttgaataatctcgacatcaacggcgacgacgcgccgtcgtcgcaggctcccacgagcaagaagaaaaggagaggcacacgggcagtgggtcctgataaaggaaaccggggactgcgccagtttagtatgaaagtttgtgagaaagttgaaagtaaagggagaacaacatataatgaggtggcagatgaacttgttgctgagtttacagaccccaataataatattgaggcaccagaccctgataaccctaatgcgataaaaaggagatccagtggaagggcttgccgcggactaactgagcttgtgggactgaaaggtagaattgagaagaaaagtgtttacttacaggagctacaagatcaatatgtaggtttgcaaaacctgattcaacgaaatgagcaattatatggttcaggaaacacaccttctggtggagtggctttgccattcatcctagtccagacccgacctcatgcaaccgtggaagttgagatatcagaagatatgcagctggttcattttgacttcaatagcactccatttgagctgcatgatgactcatatgtcctaaaggaaatgcggttctgtggaagagaacaacatgatggaactcaagagtcgatatcaaatggaggtgagagttcaaacgtgtcaaatatttattggcaacaagcacagcgtatggagatgccaaacaatggcacagttaggttatcaagctcaccgcctattccagggatattaaaagggcgtgtgaagcacgagcagcactagcgcttcggttttggttaactggcgttgtcgtcctgagagcagtttgttttattacttttctccgttgtgtaaagcgcctgtaaattattaggcaagggggagggtagtagctctgatctgatttagctctgattggtagaacgacgggtgtaactatatccttgattcggttctctcggtatggttgagaaaagggttgacatgtaatttgtagagcattataaaaactaaaattgttgatgtcttctggggctgcgtgcttcgttctgggcacaagcatatttatttcctgttcctttttcttctctct

SEQ ID NO: 81793 - DNA, 1675 bp, Zea Mays
aggtcccgtgcctgcccgctctctcgacgatttccatctctccctccattttgccccctcgctcttctcttcacttcctccgctccgcttgctgtctcctagtccttcccttagggtttgtccagctccgcgctccgcctcgctcgctagctccctctctcgtcgatcccacggccccgatcagcgcgatctccgcgcggccatggtctccggcgcggcgcacaacccgggcgggggcgccgccgcccagaccacccagcgctcgccgccgcagctgggggcccggacggccctcgccacgccgccgccggtctccggcggcgctgcgcactccgcgtctactagcggcggcaccgctggttcaccaccgtccagccgcagcgagcagcacgcccccgacggtgctgtcaagggtcccgccctcggcactgcgcccgcagcggcggcggcgtccacgcctgccagcgacagcacgttcctccgcttgaataatctcgacatcaacggcgacgacgcgccgtcgtcgcaggctcccacgagcaagaagaaaaggagaggcacacgggcagtgggtcctgataaaggaaaccggggactgcgccagtttagtatgaaagtttgtgagaaagttgaaagtaaagggagaacaacatataatgaggtggcagatgaacttgttgctgagtttacagaccccaataataatattgaggcaccagaccctgataaccctaatgcgaacaatatgatgaaaaaaatattcgacgaagagtttatgatgctttaaatgttctgatggctatggacattatatctaaagataaaaaggagatccagtggaagggcttgccgcggactagtataagtgatattgaagaattgaagactgagcttgtgggactgaaaggtagaattgagaagaaaagtgtttacttacaggagctacaagatcaatatgtaggtttgcaaaacctgattcaacgaaatgagcaattatatggttcaggaaacacaccttctggtggagtggctttgccattcatcctagtccagacccgacctcatgcaaccgtggaagttgagatatcagaagatatgcagctggttcattttgacttcaatagcactccatttgagctgcatgatgactcatatgtcctaaaggaaatgcggttctgtggaagagaacaacatgatggaactcaagagtcgatatcaaatggaggtgagagttcaaacgtgtcaaatatttattggcaacaagcacagcgtatggagatgccaaacaatggcacagttaggttatcaagctcaccgcctattccagggatattaaaagggcgtgtgaagcacgagcagcactagcgcttcggttttggttaactggcgttgtcgtcctgagagcagtttgttttattacttttctccgttgtgtaaagcgcctgtaaattattaggcaagggggagggtagtagctctgatctgatttagctctgattggtagaacgacgggtgtaactatatccttgattcggttctctcggtatggttgagaaaagggttgacatgtaatttgtagagcattataaaaactaaaattgttgatgtcttctggggctgcgtgcttcgttctgggcacaagcatatttatttcctgttcctttttcttctctct

SEQ ID NO: 81794 - DNA, 1643 bp, Zea Mays
aggtcccgtgcctgcccgctctctcgacgatttccatctctccctccattttgccccctcgctcttctcttcacttcctccgctccgcttgctgtctcctagtccttcccttagggtttgtccagctccgcgctccgcctcgctcgctagctccctctctcgtcgatcccacggccccgatcagcgcgatctccgcgcggccatggtctccggcgcggcgcacaacccgggcgggggcgccgccgcccagaccacccagcgctcgccgccgcagctgggggcccggacggccctcgccacgccgccgccggtctccggcggcgctgcgcactccgcgtctactagcggcggcaccgctggttcaccaccgtccagccgcagcgagcagcacgcccccgacggtgctgtcaagggtcccgccctcggcactgcgcccgcagcggcggcggcgtccacgcctgccagcgacagcacgttcctccgcttgaataatctcgacatcaacggcgacgacgcgccgtcgtcgcaggctcccacgagcaagaagaaaaggagaggcacacgggcagtgggtcctgataaaggaaaccggggactgcgccagtttagtatgaaagtttgtgagaaagttgaaagtaaagggagaacaacatataatgaggtggcagatgaacttgttgctgagtttacagaccccaataataatattgaggcaccagaccctgataaccctaatgcgcaacaatatgatgaaaaaaatattcgacgaagagtttatgatgctttaaatgttctgatggctatggacattatatctaaagataaaaaggagatccagtggaagggcttgccgcggactaactgagcttgtgggactgaaaggtagaattgagaagaaaagtgtttacttacaggagctacaagatcaagtttgcaaaacctgattcaacgaaatgagcaattatatggttcaggaaacacaccttctggtggagtggctttgccattcatcctagtccagacccgacctcatgcaaccgtggaagttgagatatcagaagatatgcagctggttcattttgacttcaatagcactccatttgagctgcatgatgactcatatgtcctaaaggaaatgcggttctgtggaagagaacaacatgatggaactcaagagtcgatatcaaatggaggtgagagttcaaacgtgtcaaatatttattggcaacaagcacagcgtatggagatgccaaacaatggcacagttaggttatcaagctcaccgcctattccagggatattaaaagggcgtgtgaagcacgagcagcactagcgcttcggttttggttaactggcgttgtcgtcctgagagcagtttgttttattacttttctccgttgtgtaaagcgcctgtaaattattaggcaagggggagggtagtagctctgatctgatttagctctgattggtagaacgacgggtgtaactatatccttgattcggttctctcggtatggttgagaaaagggttgacatgtaatttgtagagcattataaaaactaaaattgttgatgtcttctggggctgcgtgcttcgttctgggcacaagcatatttatttcctgttcctttttcttctctct

SEQ ID NO: 81795 - DNA, 1747 bp, Zea Mays
ccccacgtatccggccggacctatcacctctcgtgcgaagaagaaagtgttctcttgcttgatccgccattcagaagccggccactaatccgagctaggcacgctcccatccgacgtcgtcccagctagcacagccatttctgtttcgtttcttccactgcagtcagaacccagaagcagaggccgccgttgcaagcatgccgccgatggaggccgccgaggacgtcgtcatcgtcggcgccggacttgccggactcgcggtggctctcggactgcacaggggtgaggagcctggtgctggagtcgtcgccgtcgctgcgcgcgtcggggttcgccttcaccacgtggacgaacgccttccgggcgctggacgccctcggggtgggcgacaagatcaggaggcagcaccagcaggcgcaggcgctacgcgtcatggcttcttccaccggagaaatcgtacaggaagtggacctcacgcagcaggggaaacgagggcccaacgagatccgttgcgttcggcgggacctgctgctgcaggccttggaggaggagctaccgagaggcgccatccgctactcgtccaggatcgtgtccatcgaggaggaggacggcaacggcgacaaggtcctgcaactaaccgatggttcagtcatcagagcaaaggtgctcgtcgggtgcgacggggtcaactccgtggtggccaaatggctcggcctcgccacgccgtcctactcggggcgctcggcggcgagaggcttcgcgcgttacccggacggccacggcttcgagcccaagttcctgcagttcgtcggccacggcttccgctccggcatgctgccgtgcaacgacaccgacatctactggttcttcacctggactccttccgagaacgacaagggcgtcgacgagagcgcggccaagatgaagcagttcgtgctggccaagctccggggctccaataaggtgcccgcggaggcgctggcggcgatcgacaggagcgagatgagcgacgtgctcgccgcgccgctgcggttccggtcgccgctgtcgctggccaccgcgagcatcgccaggggcagcgcgtgcgtggccggcgacgcgctgcacccgatgacgccggacctcggccagggcggctgctcggcgctggaggacggcgtcgtcctggcccgctgcctcggcgacgccctgctgccgccgcctggcagtggcagtggcagtggcaggggcaaggaggaccgggtccaggcggccttgcgcgagtacgcctggatcaggcggtggaggagcgtcgagctcgtcgccacctcctacaccgttggcttcgtccagcagagtgacagcgcggtcgtcagcttcctgcgggacaggctcctgtcgggagtgctcgctcgaaggcttctgaaaatggcggactacgactgcggcacgctcgaaagctactagcccccttgtactgtttcctgtgtgtacatcagtacactacacgtgttgtgttgtgcctgctgctggaataatatgcctactgttatgtgttattagtagaaaattgtactgcaatatcatcacctctgttgcacatttttttctacccttgtttatgcatagcataggaaccgtcacatcgatgtaacttttgatttctctgcttatcaaccatgcactaacatcacctgatcaccgtaaacaaaaggtgcagtgcagagtcgagatggcctcgcaccttccacgagtgtgcgcgtcacta

SEQ ID NO: 81796 - DNA, 988 bp, Zea Mays
  misc_feature (988)..(988): n is a, c, g, or t
gccttcatcagttcgttctgcgcgggaaccgccgatgggggacgccgtggaggacatcgtcatcgccggcgcgggcctcgccggcctcgcgacggcgctcgggctacacaggaaaggggtgaggtgcctggtgctggagtcgtcgccggcgctgcgcgcgtcggggttcgcgttcaccacgtggaccaacgccttccgcgccctggatgccctcggcgtcggggacaagatccgggagcaccatttgctctacgagcgctactggtgaagcagctgcagaagtgagcctaaagattcagagcaaaagcgggccacacgagatccggtgcgtgaagcgggacttcctgctgcggacgctggccgacgagctgccggagggcaccatcaggtactcggccaaggttgtcgccatggaggaagacggcgtcggcggcgccaagaccctgcagctgcacctggcagacggttccaccataaaggccaaggtcgtgatcgggtgcgacggcgtgaactccgtggtggcccagtggctgggcctgccgaagccgatcctgtcggggcgctcggccaccaggggcctgctccgacacctccgtctactggaactacacctggtacccgtcccccgcggacggcgacgccgaggagagcgtggccaagatgcggagccacgtggtcgccaagctgcggggcgccaaggtcccggccgaggcgctggaggtggtggagcggagcgagatgagcgacgtggcgtcgtcgccgctgcggttccggtccccgctggcgctggtccgcggcagcatcagccgcggcggcgtgtgcgtggcgggcgacgcgctgcaccccatgacgccggagctcgggcagggcgggtgcgcggcgctcgaggacggcgtcgtcctggcccggtgcctgggcaaggccttcgccctgctcggccaggagcgggatgaggggcgggtcgtcacggcggcgctggaggagtacn

SEQ ID NO: 81797 - DNA, 2102 bp, Zea Mays
ggacccccaggccccagcccgcgtccatccaccgcccgtgggaaggcagagcagtgagcgtcgcaggcatcggctccagctccggctccgcccgccgccgcaccggcccaccctcctcccccgatccgatcgccgatcaccggccctcgcttagcctcgccacgcctcgcgacaatatttggaacccctgttaccgatcgcctcatgccgtaccactgaacgatcccaccccaacaccgtacccccgccgcctcctccgccgtgcccacagtcgcctccgcctttcgcctgctaccccgtagaggctctatatcccgatcggactagggtgcggacgatggctagcaacgccgaccagcatgctgccgttgtctcggctgccccgtccgatagcccggttggggcgaagaaggctggggcggcggccgccgtctggaaactccccgcggccgcggcggttcccgtcgcggaggtggttgaaaaccccatcatggacgcacactcctggccggcgctgcccgggctgtcgtctccgccgccgccgccgccgccgcatgcggggccaacagccaaagcgtcaccgaaggccgcttctccagctcccactggggcggcgacgtcgcccgtctctttgggcaatcctggcgcgccggatgctagccatggtaacgatgctcgggtgcgcaatcctgtggcccggcgtgccctggtgatgcctgcggcggatgggctggagaagagtgcccctgcaccggaaccgtcccctgtttatgtgcctaatgcccggagcaatggtgcagatcctcatcagaatggacgtcctggctcgcatcaccatggccgaggtggtggctatggtgggggaaacaggaggggtaatggtggaggtggggggcgtcgcgggagtgagcaccacggtggttttgatgggcaacggcgcggaggtggccgcagagatggccatggaccggttcatcagctgcgtggccatcagccaacatacattaaggctcctgttgtagcaggagcacctccaccgcctccaccatttgttagccccgctactcctcagacaccaccttatggaccacctatgggcttccatgacatgtcagcgcatgtttactatttcccggcacccacctcggaaggcattcaaggcctgccttttgtgcctcttccagcaagcccccaagctgttctaattgacccttctcgaaagaaccttctggagcagatagaatactatttcagcgatgacaatttgtgcaaggacctttacttgcggcaacacatggatgggcaaggttgggtgccattatccctgatcgctggctttcgccaagtccagaaaattactaataatattcagtttatcttggaaacagtcatgctatctaacattgtggaagtgcagggagacaagctacggaggcgtggagcatgggagaattgtttcgttctgttggacttgagggggcaacgtaccatccaagcatgcctgggatgtctggtgaagctctcctgacaagatcagcaacttcagttagtctaggttaccatgcatcaaccttcggtgggctacagagcaatgggagtgaacctctctttgggccgaagtctgcaagaaatctactcaggagcgataccttttgaggctatatattcaagagaagttaagtacaatggcaggccgagttttcacagtaacggcatgcacaccttatctcaggtgagatgtaaaaacagctgttaaataaaaccaaaaaaggcaaaagcataatacaaaaaaaaagcatacacaaagacaaaaaaatacaaaatgcaaaaacaaaaataaaaagagcataggcagcttttgtgctagtactcctgtcctttgtgttatgtggtatattacctagtaggtttgttttctaatgctaggagtttgatggctcttctgtgtgaaccgagttatttaagtgttatggatggtaccattgggaaactgttgagtggacgacgttatataaaagtacatgaaaacattgttaattatgctgctctctgctgatttgtgccgcatttcttgttttggaaggtaatatcttttattaaat

SEQ ID NO: 81798 - DNA, 7016 bp, Zea Mays
caggccccagcccgcgtccatccaccgcccgtgggaaggcagagcagtgagcgtcgcaggcatcggctccagctccggctccgcccgccgccgcaccggcccaccctcctcccccgatccgatcgccgatcaccggccctcgcttagcctcgccacgcctcgcgacaatatttggaacccctgttaccgatcgcctcatgccgtaccactgaacgatcccaccccaacaccgtacccccgccgcctcctccgccgtgcccacagtcgcctccgcctttcgcctgctaccccgtagaggctctatatcccgatcggactagggtgcggacgatggctagcaacgccgaccagcatgctgccgttgtctcggctgccccgtccgatagcccggttggggcgaagaaggctggggcggcggccgccgtctggaaactccccgcggccgcggcggttcccgtcgcggaggtggttgaaaaccccatcatggacgcacactcctggccggcgctgcccgggctgtcgtctccgccgccgccgccgccgccgcatgcggggccaacagccaaagcgtcaccgaaggccgcttctccagctcccactggggcggcgacgtcgcccgtctctttgggcaatcctggcgcgccggatgctagccatggtaacgatgctcgggtgcgcaatcctgtggcccggcgtgccctggtgatgcctgcggcggatgggctggagaagagtgcccctgcaccggaaccgtcccctgtttatgtgcctaatgcccggagcaatggtgcagatcctcatcagaatggacgtcctggctcgcatcaccatggccgaggtggtggctatggtgggggaaacaggaggggtaatggtggaggtggggggcgtcgcgggagtgagcaccacggtggttttgatgggcaacggcgcggaggtggccgcagagatggccatggaccggttcatcagctgcgtggccatcagccaacatacattaaggctcctgttgtagcaggagcacctccaccgcctccaccatttgttagccccgctactcctcagacaccaccttatggaccacctatgggcttccatgacatgtcagcgcatgtttactatttcccggcacccacctcggaaggcattcaaggcctgccttttgtgcctcttccagcaagcccccaagctgttctaattgacccttctcgaaagaaccttctggagcagatagaatactatttcagcgatgacaatttgtgcaaggacctttacttgcggcaacacatggatgggcaaggttgggtgccattatccctgatcgctggctttcgccaagtaagtttgcaggcctcttgagtttatttcccatttaaaatctactctgaatttttgttttgtttcttagtcagctgtctagcgagcttgtgcgcatgttctgtgtctgtaattacttgcactactgaattagaggggctgcatatagtgacatggattaatttaagtatttaactgaacagcaagacagcccttacacaataaggaattggattatattactgacgtggttgataacatggatggcacagctgcactgaattgttgcattctaatatcttagtagtatctgcatttaagaaattaaactccacagttatgtttgcaagtggtaatgttagtgtggaacattcaccatatgattaggatagcgatatgtatcgaaaacagaggggggcactatttttattttctgacactttttgcagtggtattatcatatgacttaagctcagttttagtgaaacagctgttgaccaggttatgtggttacatttacttgagtcgtgagttactcaaaacaggggtcagtagcttcaaggcgcattttttttcaaggttcattgcaagctgagttcatcccaactaacagcagtggtacctccatttttagtgtattcagctacacatttgtacaggctgtttgatgatgcatttactacttatttcttattgctggcatagctttgtatgacccaagccacaaaccttatttcacttccatttgttgagctgctacagatattttgtatggaccaagttctgtgcccatatgcatgttcattctagctttactggataagggtgaactcttgaattgataagtactaatattctattgtttatggtcatatggtgtgatgcattattttctctttctaagttgcatgtaacctttaaaagttacaatatgtgctgggttagttgggtatgtacacaattaatttgcttttagggtaaccttgtccaagctttgcctgggctttttgcaactaatataatacttctgatagttatagaaaactcacggagtaggctagtgctaaatatttaattggatatagttatagtggatctaattggttgcctgcattagcttgtatgcaggcttgcacagttctcaaagctgagcattgtccagtattctagatttttcctgtattagacgatgcagatttgcataatccgatgagcatacaaaaataaaatattttctcattctctacctttactagagacttcagatctctaatcactactactttaaagcacgacattcattgtgtgtcacccgagcgcctcgcgcgcgtgcccagccgccacaccttccgcctcagcttacgctcgcagaaataacaaaaaatggagggtacgacaccaggaatagaacctgggtcattgcgaccgcggcctcgcgctttaaccaccgcgacacacatatgcttgtgttatataaagaagcgatattataaatatgtatatactgttatttggaaaattaaaaatataatcatgtttgaataaaaatctcatttaaacaagatctacctatatgatatatagaaaccatagcaacgtacgggcaactaactagtagaacatataatgtgactatatgcaataatatgtaaacaaacaaacacaattttattagacgcggcttgcatatgcagaacatccaaacgcgaaggtgttgcatacatctatgctggcttaggcagtgcggcataaggtctaatgcaagctaagcctgatacaagcaaccaatcagacctgttgtaacaaagttagctgaggtcactatagaagttaatgtggcaaagtaagttcatttcatacgaaggatgtctcctcacagaagtagtatggtttgatttcacttttgttttttaaggcaattttgcttttttcaagggactttatatccatctttatgagtagtatgtgattttttcagcatgatttcttccatcacaacaacatagcctggcaggaaactggtaaataagggggtgactgcttgcaattgagggtttgtctttagtgttttgatcatatgtttctgcgaaagggcctctaactgagttagttacgtggtctgagtagcattactcaggtcctgattttgactcccaacaattttaggctaggattaaaaaaatcctcttgtctgacccacgccaaagcagaggtctaagacatggccctggtcgtagtcattctcacatgggttacggtgcctctgtgtatgtgtggagcagaggtttggagattttcttgatctgcatgaggtctttttcttaatataatgcctaggggttgtcttacccaagtaggtcgagttttgtttatatgtttctaggataaccatttctctcttctagtcttcaccatagaagtctctagtaggaaattgacaggtatttctctcttacccacgtacgacatattgggatttttttttgttgattgctaggagggttttgtaacatttcattaaggaataaagaaagaagagtgcttattcacaacacctcgaccccaccatgaaactttgtacattttgggataatggagtacataaggtttatgcctctgtttctgtttgtcttttcttttgtgtgtaatgcgcttagtcatgatttacagctggcatactaatgtatttgttaatacaaatggttttgtgacacagaatccattaatatatggaactggatattgttaatccagtaaggtgtctttgtggagtataacagtcgaatcagataacctttttgagaatattcaaatagatgttttgcactccctctgttctaaattgtaagtcgtttagtttttttctagatacatagtttttaaattgtatctagacataatgtatatctagatgcgtatcaaaagctattttactggaaaagcaagaatgacttacagtttgggacggagggaatacttttgttcctttatttatttaagaaatggtatcactcacctactccttttacaggtccagaaaattactaataatattcagtttatcttggaaacagtcatgctatctaacattgtggaagtgcaggtaatgttttctttgtacaattattgttatatgatttctaatatgattccgtttggccaaaaaacatataggttattcactaaccatatatgtttccattaacattgcatattatttgtagaaaaatcatggttcagaccattctcattatcatctgttagtgtgagttcaccaattatttattattgattcaggtaagcgtagtttgttaagcagatatgcttactggttagacaatggcatagatattaggcgatgtttgattcaacaaatggcaatgacaatgcaaagggaatgaataccagtggtagtgggaagggaagctttgattgtttgttttgtttgattgagtatcggatgcctaaatcattccattgatctgttacacctcaaaattgagcgcaacctggtttctgaagcatgtggacacattgccctggcaccaagatacgtcgggcattaaacaaacacaagtggttgacagtggaatctgatcacgccaataaatggccgaaccaaacagcaccttagcttcttgttatagacctagagctcatttttatctgatatgatacctataaaccaacagagtctatatcattttattgcttgtgaaaacatactcttttcctagtatgaccatggaaaatttagtacgaaactgattcaacaaggatctactgagcttacaggtttttgttgttccttgagtgtatatattctttcagttttaggtaggcagcaggtgtgaccgccccacaaaatcatctttgtggctcatgtggactagctgcaatatttttgcgggtccgaccaccaagcccagtggagtccacctcggtcctccagataactctatccatctgtgcgtgagccacaaagaaatccgttttgccatctccatgacgaactgcaggcagtggcatgccgatcctgatgccaggcttcacatctgtggcacccgcaacttgtgatctcctttctcgaaagtgataccccagatcatgacattcaggcaggcaatctacttgatcatgacatttaggcaggcaatctactactacacggtgttctggaacttggaaatacgatctatttgttctaatcctcatcttacctgtgaagcaaatgattcaatttataaatttattgttgtggtctgccctatatttcttgttggttttgatgaatctgatttgccgaagggtacaagtttgtgcggacagcactctgtttctgcttgccatgctagttataggtaaatcttccaaatgcttgaaaccaacctatttctcaatcaatatattaggccattggaccagcatccaacaatctcaaccctctagtgactgtgtgtttattcagtctccattacagcaagtctcttgattaattcatgtggttgaaagagtttttgggtggaagtcttaccagtaattactattcccattagttgttgattcaccgcagaccatttaaaaaaaaaaaagatgagtaccaaaatgggaaaacggcccttgcatttttcatgtacagttagcaatcggagaacaaaagctgagtcttatccttaatgatcaaaagcccctagcaggtgttagcattattaggttaccacatataaatgtggcgacttatcaaacaagttagctttagcaagtgcaaaatgttcacctgatgcttcgcttggtcacacattttagataatctattttgtttgcctcgtaataatatacttatgcatagcctaaaatgaggaactactgtatgtattcactaagccccttctcacttaaagcactctttcctttatgcttgaatagggagacaagctacggaggcgtggagcatgggagaattggttgcttccaaaactgaactattctgctgggagttcttctggttcgatgacccctgtgacatctaacattgatgctcttgcatctcagtttcgttctgttggacttgagggggcaacgtaccatccaagcatgcctgggatgtctggtgaagctctcctgacaagatcagcaacttcagttagtctaggttaccatgcatcaaccttcggtgggctacagagcaatgggagtgaacctctctttgggccgaagtctgcaagaaatctactcaggagcgataccttttgaggctatatattcaagagaagttaagtacaatggcaggccgagttttcacagtaacggcatgcacaccttatctcaggtgagatgtaaaaacagctgttaaataaaaccaaaaaaggcaaaagcataatacaaaaaaaaagcatacacaaagacaaaaaaatacaaaatgcaaaaacaaaaataaaaagagcataggcagcttttgtgctagtactcctgtcctttgtgttatgtggtatattacctagtaggtttgttttctaatgctaggagtttgatggctcttctgtgtgaaccgagttatttaagtgttatggatggtaccattgggaaactgttgagtggacgacgttatataaaagtacatgaaaacattgttaattatgctgctctctgctgatttgtgccgcatttcttgttttggaaggtaatatcttttattaaat

SEQ ID NO: 81799 - DNA, 4006 bp, Zea Mays
caggccccagcccgcgtccatccaccgcccgtgggaaggcagagcagtgagcgtcgcaggcatcggctccagctccggctccgcccgccgccgcaccggcccaccctcctcccccgatccgatcgccgatcaccggccctcgcttagcctcgccacgcctcgcgacaatatttggaacccctgttaccgatcgcctcatgccgtaccactgaacgatcccaccccaacaccgtacccccgccgcctcctccgccgtgcccacagtcgcctccgcctttcgcctgctaccccgtagaggctctatatcccgatcggactagggtgcggacgatggctagcaacgccgaccagcatgctgccgttgtctcggctgccccgtccgatagcccggttggggcgaagaaggctggggcggcggccgccgtctggaaactccccgcggccgcggcggttcccgtcgcggaggtggttgaaaaccccatcatggacgcacactcctggccggcgctgcccgggctgtcgtctccgccgccgccgccgccgccgcatgcggggccaacagccaaagcgtcaccgaaggccgcttctccagctcccactggggcggcgacgtcgcccgtctctttgggcaatcctggcgcgccggatgctagccatggtaacgatgctcgggtgcgcaatcctgtggcccggcgtgccctggtgatgcctgcggcggatgggctggagaagagtgcccctgcaccggaaccgtcccctgtttatgtgcctaatgcccggagcaatggtgcagatcctcatcagaatggacgtcctggctcgcatcaccatggccgaggtggtggctatggtgggggaaacaggaggggtaatggtggaggtggggggcgtcgcgggagtgagcaccacggtggttttgatgggcaacggcgcggaggtggccgcagagatggccatggaccggttcatcagctgcgtggccatcagccaacatacattaaggctcctgttgtagcaggagcacctccaccgcctccaccatttgttagccccgctactcctcagacaccaccttatggaccacctatgggcttccatgacatgtcagcgcatgtttactatttcccggcacccacctcggaaggcattcaaggcctgccttttgtgcctcttccagcaagcccccaagctgttctaattgacccttctcgaaagaaccttctggagcagatagaatactatttcagcgatgacaatttgtgcaaggacctttacttgcggcaacacatggatgggcaaggttgggtgccattatccctgatcgctggctttcgccaagtccagaaaattactaataatattcagtttatcttggaaacagtcatgctatctaacattgtggaagtgcaggtaatgttttctttgtacaattattgttatatgatttctaatatgattccgtttggccaaaaaacatataggttattcactaaccatatatgtttccattaacattgcatattatttgtagaaaaatcatggttcagaccattctcattatcatctgttagtgtgagttcaccaattatttattattgattcaggtaagcgtagtttgttaagcagatatgcttactggttagacaatggcatagatattaggcgatgtttgattcaacaaatggcaatgacaatgcaaagggaatgaataccagtggtagtgggaagggaagctttgattgtttgttttgtttgattgagtatcggatgcctaaatcattccattgatctgttacacctcaaaattgagcgcaacctggtttctgaagcatgtggacacattgccctggcaccaagatacgtcgggcattaaacaaacacaagtggttgacagtggaatctgatcacgccaataaatggccgaaccaaacagcaccttagcttcttgttatagacctagagctcatttttatctgatatgatacctataaaccaacagagtctatatcattttattgcttgtgaaaacatactcttttcctagtatgaccatggaaaatttagtacgaaactgattcaacaaggatctactgagcttacaggtttttgttgttccttgagtgtatatattctttcagttttaggtaggcagcaggtgtgaccgccccacaaaatcatctttgtggctcatgtggactagctgcaatatttttgcgggtccgaccaccaagcccagtggagtccacctcggtcctccagataactctatccatctgtgcgtgagccacaaagaaatccgttttgccatctccatgacgaactgcaggcagtggcatgccgatcctgatgccaggcttcacatctgtggcacccgcaacttgtgatctcctttctcgaaagtgataccccagatcatgacattcaggcaggcaatctacttgatcatgacatttaggcaggcaatctactactacacggtgttctggaacttggaaatacgatctatttgttctaatcctcatcttacctgtgaagcaaatgattcaatttataaatttattgttgtggtctgccctatatttcttgttggttttgatgaatctgatttgccgaagggtacaagtttgtgcggacagcactctgtttctgcttgccatgctagttataggtaaatcttccaaatgcttgaaaccaacctatttctcaatcaatatattaggccattggaccagcatccaacaatctcaaccctctagtgactgtgtgtttattcagtctccattacagcaagtctcttgattaattcatgtggttgaaagagtttttgggtggaagtcttaccagtaattactattcccattagttgttgattcaccgcagaccatttaaaaaaaaaaaagatgagtaccaaaatgggaaaacggcccttgcatttttcatgtacagttagcaatcggagaacaaaagctgagtcttatccttaatgatcaaaagcccctagcaggtgttagcattattaggttaccacatataaatgtggcgacttatcaaacaagttagctttagcaagtgcaaaatgttcacctgatgcttcgcttggtcacacattttagataatctattttgtttgcctcgtaataatatacttatgcatagcctaaaatgaggaactactgtatgtattcactaagccccttctcacttaaagcactctttcctttatgcttgaatagggagacaagctacggaggcgtggagcatgggagaattggttgcttccaaaactgaactattctgctgggagttcttctggttcgatgacccctgtgacatctaacattgatgctcttgcatctcagtttcgttctgttggacttgagggggcaacgtaccatccaagcatgcctgggatgtctggtgaagctctcctgacaagatcagcaacttcagttagtctaggttaccatgcatcaaccttcggtgggctacagagcaatgggagtgaacctctctttgggccgaagtctgcaagaaatctactcaggagcgataccttttgaggctatatattcaagagaagttaagtacaatggcaggccgagttttcacagtaacggcatgcacaccttatctcaggtgagatgtaaaaacagctgttaaataaaaccaaaaaaggcaaaagcataatacaaaaaaaaagcatacacaaagacaaaaaaatacaaaatgcaaaaacaaaaataaaaagagcataggcagcttttgtgctagtactcctgtcctttgtgttatgtggtatattacctagtaggtttgttttctaatgctaggagtttgatggctcttctgtgtgaaccgagttatttaagtgttatggatggtaccattgggaaactgttgagtggacgacgttatataaaagtacatgaaaacattgttaattatgctgctctctgctgatttgtgccgcatttcttgttttggaaggtaatatcttttattaaat

SEQ ID NO: 81800 - DNA, 2115 bp, Zea Mays
gtccatccaccgcccgtgggaaggcagagcagtgagcgtcgcaggcatcggctccagctccggctccgcccgccgccgcaccggcccaccctcctcccccgatccgatcgccgatcaccggccctcgcttagcctcgccacgcctcgcgacaatatttggaacccctgttaccgatcgcctcatgccgtaccactgaacgatcccaccccaacaccgtacccccgccgcctcctccgccgtgcccacagtcgcctccgcctttcgcctgctaccccgtagaggctctatatcccgatcggactagggtgcggacgatggctagcaacgccgaccagcatgctgccgttgtctcggctgccccgtccgatagcccggttggggcgaagaaggctggggcggcggccgccgtctggaaactccccgcggccgcggcggttcccgtcgcggaggtggttgaaaaccccatcatggacgcacactcctggccggcgctgcccgggctgtcgtctccgccgccgccgccgccgccgcatgcggggccaacagccaaagcgtcaccgaaggccgcttctccagctcccactccatggtaacgatgctcgggtgcgcaatcctgtggcccggcgtgccctggtgatgcctgcggcggatgggctggagaagagtgcccctgcaccggaaccgtcccctgtttatgtgcctaatgcccggagcaatggtgcagatcctcatcagaatggacgtcctggctcgcatcaccatggccgaggtggtggctatggtgggggaaacaggaggggtaatggtggaggtggggggcgtcgcgggagtgagcaccacggtggttttgatgggcaacggcgcggaggtggccgcagagatggccatggaccggttcatcagctgcgtggccatcagccaacatacattaaggctcctgttgtagcaggagcacctccaccgcctccaccatttgttagccccgctactcctcagacaccaccttatggaccacctatgggcttccatgacatgtcagcgcatgtttactatttcccggcacccacctcggaaggcattcaaggcctgccttttgtgcctcttccagcaagcccccaagctgttctaattgacccttctcgaaagaaccttctggagcagatagaatactatttcagcgatgacaatttgtgcaaggacctttacttgcggcaacacatggatgggcaaggttgggtgccattatccctgatcgctggctttcgccaagtccagaaaattactaataatattcagtttatcttggaaacagtcatgctatctaacattgtggaagtgcagggagacaagctacggaggcgtggagcatgggagaattggttgcttccaaaactgaactattctgctgggagttcttctggttcgatgacccctgtgacatctaacattgatgctcttgcatctcagtttcgttctgttggacttgagggggcaacgtaccatccaagcatgcctgggatgtctggtgaagctctcctgacaagatcagcaacttcagttagtctaggttaccatgcatcaaccttcggtgggctacagagcaatgggagtgaacctctctttgggccgaagtctgcaagaaatctactcaggagcgataccttttgaggctatatattcaagagaagttaagtacaatggcaggccgagttttcacagtaacggcatgcacaccttatctcaggtgagatgtaaaaacagctgttaaataaaaccaaaaaaggcaaaagcataatacaaaaaaaaagcatacacaaagacaaaaaaatacaaaatgcaaaaacaaaaataaaaagagcataggcagcttttgtgctagtactcctgtcctttgtgttatgtggtatattacctagtaggtttgttttctaatgctaggagtttgatggctcttctgtgtgaaccgagttatttaagtgttatggatggtaccattgggaaactgttgagtggacgacgttatataaaagtacatgaaaacattgttaattatgctgctctctgctgatttgtgccgcatttcttgttttggaaggtaatatcttttattaaat

SEQ ID NO: 81801 - DNA, 2171 bp, Zea Mays
gtccatccaccgcccgtgggaaggcagagcagtgagcgtcgcaggcatcggctccagctccggctccgcccgccgccgcaccggcccaccctcctcccccgatccgatcgccgatcaccggccctcgcttagcctcgccacgcctcgcgacaatatttggaacccctgttaccgatcgcctcatgccgtaccactgaacgatcccaccccaacaccgtacccccgccgcctcctccgccgtgcccacagtcgcctccgcctttcgcctgctaccccgtagaggctctatatcccgatcggactagggtgcggacgatggctagcaacgccgaccagcatgctgccgttgtctcggctgccccgtccgatagcccggttggggcgaagaaggctggggcggcggccgccgtctggaaactccccgcggccgcggcggttcccgtcgcggaggtggttgaaaaccccatcatggacgcacactcctggccggcgctgcccgggctgtcgtctccgccgccgccgccgccgccgcatgcggggccaacagccaaagcgtcaccgaaggccgcttctccagctcccactggggcggcgacgtcgcccgtctctttgggcaatcctggcgcgccggatgctagccatggtaacgatgctcgggtgcgcaatcctgtggcccggcgtgccctggtgatgcctgcggcggatgggctggagaagagtgcccctgcaccggaaccgtcccctgtttatgtgcctaatgcccggagcaatggtgcagatcctcatcagaatggacgtcctggctcgcatcaccatggccgaggtggtggctatggtgggggaaacaggaggggtaatggtggaggtggggggcgtcgcgggagtgagcaccacggtggttttgatgggcaacggcgcggaggtggccgcagagatggccatggaccggttcatcagctgcgtggccatcagccaacatacattaaggctcctgttgtagcaggagcacctccaccgcctccaccatttgttagccccgctactcctcagacaccaccttatggaccacctatgggcttccatgcagacatgtcagcgcatgtttactatttcccggcacccacctcggaaggcattcaaggcctgccttttgtgcctcttccagcaagcccccaagctgttctaattgacccttctcgaaagaaccttctggagcagatagaatactatttcagcgatgacaatttgtgcaaggacctttacttgcggcaacacatggatgggcaaggttgggtgccattatccctgatcgctggctttcgccaagtccagaaaattactaataatattcagtttatcttggaaacagtcatgctatctaacattgtggaagtgcagggagacaagctacggaggcgtggagcatgggagaattggttgcttccaaaactgaactattctgctgggagttcttctggttcgatgacccctgtgacatctaacattgatgctcttgcatctcagtttcgttctgttggacttgagggggcaacgtaccatccaagcatgcctgggatgtctggtgaagctctcctgacaagatcagcaacttcagttagtctaggttaccatgcatcaaccttcggtgggctacagagcaatgggagtgaacctctctttgggccgaagtctgcaagaaatctactcaggagcgataccttttgaggctatatattcaagagaagttaagtacaatggcaggccgagttttcacagtaacggcatgcacaccttatctcaggtgagatgtaaaaacagctgttaaataaaaccaaaaaaggcaaaagcataatacaaaaaaaaagcatacacaaagacaaaaaaatacaaaatgcaaaaacaaaaataaaaagagcataggcagcttttgtgctagtactcctgtcctttgtgttatgtggtatattacctagtaggtttgttttctaatgctaggagtttgatggctcttctgtgtgaaccgagttatttaagtgttatggatggtaccattgggaaactgttgagtggacgacgttatataaaagtacatgaaaacattgttaattatgctgctctctgctgatttgtgccgcatttcttgttttggaaggtaatatcttttattaaat

SEQ ID NO: 81802 - DNA, 2698 bp, Zea Mays
gtccatccaccgcccgtgggaaggcagagcagtgagcgtcgcaggcatcggctccagctccggctccgcccgccgccgcaccggcccaccctcctcccccgatccgatcgccgatcaccggccctcgcttagcctcgccacgcctcgcgacaatatttggaacccctgttaccgatcgcctcatgccgtaccactgaacgatcccaccccaacaccgtacccccgccgcctcctccgccgtgcccacagtcgcctccgcctttcgcctgctaccccgtagaggctctatatcccgatcggactagggtgcggacgatggctagcaacgccgaccagcatgctgccgttgtctcggctgccccgtccgatagcccggttggggcgaagaaggctggggcggcggccgccgtctggaaactccccgcggccgcggcggttcccgtcgcggaggtggttgaaaaccccatcatggacgcacactcctggccggcgctgcccgggctgtcgtctccgccgccgccgccgccgccgcatgcggggccaacagccaaagcgtcaccgaaggccgcttctccagctcccactggggcggcgacgtcgcccgtctctttgggcaatcctggcgcgccggatgctagccatggtaacgatgctcgggtgcgcaatcctgtggcccggcgtgccctggtgatgcctgcggcggatgggctggagaagagtgcccctgcaccggaaccgtcccctgtttatgtgcctaatgcccggagcaatggtgcagatcctcatcagaatggacgtcctggctcgcatcaccatggccgaggtggtggctatggtgggggaaacaggaggggtaatggtggaggtggggggcgtcgcgggagtgagcaccacggtggttttgatgggcaacggcgcggaggtggccgcagagatggccatggaccggttcatcagctgcgtggccatcagccaacatacattaaggctcctgttgtagcaggagcacctccaccgcctccaccatttgttagccccgctactcctcagacaccaccttatggaccacctatgggcttccatgacatgtcagcgcatgtttactatttcccggcacccacctcggaaggcattcaaggcctgccttttgtgcctcttccagcaagcccccaagctgttctaattgacccttctcgaaagaaccttctggagcagatagaatactatttcagcgatgacaatttgtgcaaggacctttacttgcggcaacacatggatgggcaaggttgggtgccattatccctgatcgctggctttcgccaagtccagaaaattactaataatattcagtttatcttggaaacagtcatgctatctaacattgtggaagtgcagttttaggtaggcagcaggtgtgaccgccccacaaaatcatctttgtggctcatgtggactagctgcaatatttttgcgggtccgaccaccaagcccagtggagtccacctcggtcctccagataactctatccatctgtgcgtgagccacaaagaaatccgttttgccatctccatgacgaactgcaggcagtggcatgccgatcctgatgccaggcttcacatctgtggcacccgcaacttgtgatctcctttctcgaaagtgataccccagatcatgacattcaggcaggcaatctacttgatcatgacatttaggcaggcaatctactactacacggtgttctggaacttggaaatacgatctatttgttctaatcctcatcttacctgtgaagcaaatgattcaatttataaatttattgttgtggtctgccctatatttcttgttggttttgatgaatctgatttgccgaagggtacaagtttgtgcggacagcactctgtttctgcttgccatgctagttatagggagacaagctacggaggcgtggagcatgggagaattggttgcttccaaaactgaactattctgctgggagttcttctggttcgatgacccctgtgacatctaacattgatgctcttgcatctcagtttcgttctgttggacttgagggggcaacgtaccatccaagcatgcctgggatgtctggtgaagctctcctgacaagatcagcaacttcagttagtctaggttaccatgcatcaaccttcggtgggctacagagcaatgggagtgaacctctctttgggccgaagtctgcaagaaatctactcaggagcgataccttttgaggctatatattcaagagaagttaagtacaatggcaggccgagttttcacagtaacggcatgcacaccttatctcaggtgagatgtaaaaacagctgttaaataaaaccaaaaaaggcaaaagcataatacaaaaaaaaagcatacacaaagacaaaaaaatacaaaatgcaaaaacaaaaataaaaagagcataggcagcttttgtgctagtactcctgtcctttgtgttatgtggtatattacctagtaggtttgttttctaatgctaggagtttgatggctcttctgtgtgaaccgagttatttaagtgttatggatggtaccattgggaaactgttgagtggacgacgttatataaaagtacatgaaaacattgttaattatgctgctctctgctgatttgtgccgcatttcttgttttggaaggtaatatcttttattaaat

SEQ ID NO: 81803 - DNA, 3913 bp, Zea Mays
cggcccaccctcctcccccgatccgatcgccgatcaccggccctcgcttagcctcgccacgcctcgcgacaatatttggaacccctgttaccgatcgcctcatgccgtaccactgaacgatcccaccccaacaccgtacccccgccgcctcctccgccgtgcccacagtcgcctccgcctttcgcctgctaccccgtagaggctctatatcccgatcggactagggtgcggacgatggctagcaacgccgaccagcatgctgccgttgtctcggctgccccgtccgatagcccggttggggcgaagaaggctggggcggcggccgccgtctggaaactccccgcggccgcggcggttcccgtcgcggaggtggttgaaaaccccatcatggacgcacactcctggccggcgctgcccgggctgtcgtctccgccgccgccgccgccgccgcatgcggggccaacagccaaagcgtcaccgaaggccgcttctccagctcccactggggcggcgacgtcgcccgtctctttgggcaatcctggcgcgccggatgctagccatggtaacgatgctcgggtgcgcaatcctgtggcccggcgtgccctggtgatgcctgcggcggatgggctggagaagagtgcccctgcaccggaaccgtcccctgtttatgtgcctaatgcccggagcaatggtgcagatcctcatcagaatggacgtcctggctcgcatcaccatggccgaggtggtggctatggtgggggaaacaggaggggtaatggtggaggtggggggcgtcgcgggagtgagcaccacggtggttttgatgggcaacggcgcggaggtggccgcagagatggccatggaccggttcatcagctgcgtggccatcagccaacatacattaaggctcctgttgtagcaggagcacctccaccgcctccaccatttgttagccccgctactcctcagacaccaccttatggaccacctatgggcttccatgcagacatgtcagcgcatgtttactatttcccggcacccacctcggaaggcattcaaggcctgccttttgtgcctcttccagcaagcccccaagctgttctaattgacccttctcgaaagaaccttctggagcagatagaatactatttcagcgatgacaatttgtgcaaggacctttacttgcggcaacacatggatgggcaaggttgggtgccattatccctgatcgctggctttcgccaagtccagaaaattactaataatattcagtttatcttggaaacagtcatgctatctaacattgtggaagtgcaggtaatgttttctttgtacaattattgttatatgatttctaatatgattccgtttggccaaaaaacatataggttattcactaaccatatatgtttccattaacattgcatattatttgtagaaaaatcatggttcagaccattctcattatcatctgttagtgtgagttcaccaattatttattattgattcaggtaagcgtagtttgttaagcagatatgcttactggttagacaatggcatagatattaggcgatgtttgattcaacaaatggcaatgacaatgcaaagggaatgaataccagtggtagtgggaagggaagctttgattgtttgttttgtttgattgagtatcggatgcctaaatcattccattgatctgttacacctcaaaattgagcgcaacctggtttctgaagcatgtggacacattgccctggcaccaagatacgtcgggcattaaacaaacacaagtggttgacagtggaatctgatcacgccaataaatggccgaaccaaacagcaccttagcttcttgttatagacctagagctcatttttatctgatatgatacctataaaccaacagagtctatatcattttattgcttgtgaaaacatactcttttcctagtatgaccatggaaaatttagtacgaaactgattcaacaaggatctactgagcttacaggtttttgttgttccttgagtgtatatattctttcagttttaggtaggcagcaggtgtgaccgccccacaaaatcatctttgtggctcatgtggactagctgcaatatttttgcgggtccgaccaccaagcccagtggagtccacctcggtcctccagataactctatccatctgtgcgtgagccacaaagaaatccgttttgccatctccatgacgaactgcaggcagtggcatgccgatcctgatgccaggcttcacatctgtggcacccgcaacttgtgatctcctttctcgaaagtgataccccagatcatgacattcaggcaggcaatctacttgatcatgacatttaggcaggcaatctactactacacggtgttctggaacttggaaatacgatctatttgttctaatcctcatcttacctgtgaagcaaatgattcaatttataaatttattgttgtggtctgccctatatttcttgttggttttgatgaatctgatttgccgaagggtacaagtttgtgcggacagcactctgtttctgcttgccatgctagttataggtaaatcttccaaatgcttgaaaccaacctatttctcaatcaatatattaggccattggaccagcatccaacaatctcaaccctctagtgactgtgtgtttattcagtctccattacagcaagtctcttgattaattcatgtggttgaaagagtttttgggtggaagtcttaccagtaattactattcccattagttgttgattcaccgcagaccatttaaaaaaaaaaaagatgagtaccaaaatgggaaaacggcccttgcatttttcatgtacagttagcaatcggagaacaaaagctgagtcttatccttaatgatcaaaagcccctagcaggtgttagcattattaggttaccacatataaatgtggcgacttatcaaacaagttagctttagcaagtgcaaaatgttcacctgatgcttcgcttggtcacacattttagataatctattttgtttgcctcgtaataatatacttatgcatagcctaaaatgaggaactactgtatgtattcactaagccccttctcacttaaagcactctttcctttatgcttgaatagggagacaagctacggaggcgtggagcatgggagaattggttgcttccaaaactgaactattctgctgggagttcttctggttcgatgacccctgtgacatctaacattgatgctcttgcatctcagtttcgttctgttggacttgagggggcaacgtaccatccaagcatgcctgggatgtctggtgaagctctcctgacaagatcagcaacttcagttagtctaggttaccatgcatcaaccttcggtgggctacagagcaatgggagtgaacctctctttgggccgaagtctgcaagaaatctactcaggagcgataccttttgaggctatatattcaagagaagttaagtacaatggcaggccgagttttcacagtaacggcatgcacaccttatctcaggtgagatgtaaaaacagctgttaaataaaaccaaaaaaggcaaaagcataatacaaaaaaaaagcatacacaaagacaaaaaaatacaaaatgcaaaaacaaaaataaaaagagcataggcagcttttgtgctagtactcctgtcctttgtgttatgtggtatattacctagtaggtttgttttctaatgctaggagtttgatggctcttctgtgtgaaccgagttatttaagtgttatggatggtaccattgggaaactgttgagtggacgacgttatataaaagtacatgaaaacattgttaattatgctgctctctgctgatttgtgccgcatttcttgttttggaaggtaatatcttttattaaat

SEQ ID NO: 81804 - DNA, 3102 bp, Zea Mays
cggcccaccctcctcccccgatccgatcgccgatcaccggccctcgcttagcctcgccacgcctcgcgacaatatttggaacccctgttaccgatcgcctcatgccgtaccactgaacgatcccaccccaacaccgtacccccgccgcctcctccgccgtgcccacagtcgcctccgcctttcgcctgctaccccgtagaggctctatatcccgatcggactagggtgcggacgatggctagcaacgccgaccagcatgctgccgttgtctcggctgccccgtccgatagcccggttggggcgaagaaggctggggcggcggccgccgtctggaaactccccgcggccgcggcggttcccgtcgcggaggtggttgaaaaccccatcatggacgcacactcctggccggcgctgcccgggctgtcgtctccgccgccgccgccgccgccgcatgcggggccaacagccaaagcgtcaccgaaggccgcttctccagctcccactggggcggcgacgtcgcccgtctctttgggcaatcctggcgcgccggatgctagccatggtaacgatgctcgggtgcgcaatcctgtggcccggcgtgccctggtgatgcctgcggcggatgggctggagaagagtgcccctgcaccggaaccgtcccctgtttatgtgcctaatgcccggagcaatggtgcagatcctcatcagaatggacgtcctggctcgcatcaccatggccgaggtggtggctatggtgggggaaacaggaggggtaatggtggaggtggggggcgtcgcgggagtgagcaccacggtggttttgatgggcaacggcgcggaggtggccgcagagatggccatggaccggttcatcagctgcgtggccatcagccaacatacattaaggctcctgttgtagcaggagcacctccaccgcctccaccatttgttagccccgctactcctcagacaccaccttatggaccacctatgggcttccatgacatgtcagcgcatgtttactatttcccggcacccacctcggaaggcattcaaggcctgccttttgtgcctcttccagcaagcccccaagctgttctaattgacccttctcgaaagaaccttctggagcagatagaatactatttcagcgatgacaatttgtgcaaggacctttacttgcggcaacacatggatgggcaaggttgggtgccattatccctgatcgctggctttcgccaagtccagaaaattactaataatattcagtttatcttggaaacagtcatgctatctaacattgtggaagtgcaggtaatgttttctttgtacaattattgttatatgatttctaatatgattccgtttggccaaaaaacatataggttattcactaaccatatatgtttccattaacattgcatattatttgtagaaaaatcatggttcagaccattctcattatcatctgttagtgtgagttcaccaattatttattattgattcaggtaagcgtagtttgttaagcagatatgcttactggttagacaatggcatagatattaggcgatgtttgattcaacaaatggcaatgacaatgcaaagggaatgaataccagtggtagtgggaagggaagctttgattgtttgttttgtttgattgagtatcggatgcctaaatcattccattgatctgttacacctcaaaattgagcgcaacctggtttctgaagcatgtggacacattgccctggcaccaagatacgtcgggcattaaacaaacacaagtggttgacagtggaatctgatcacgccaataaatggccgaaccaaacagcaccttagcttcttgttatagacctagagctcatttttatctgatatgatacctataaaccaacagagtctatatcattttattgcttgtgaaaacatactcttttcctagtatgaccatggaaaatttagtacgaaactgattcaacaaggatctactgagcttacaggtttttgttgttccttgagtgtatatattctttcagttttaggtaggcagcaggtgtgaccgccccacaaaatcatctttgtggctcatgtggactagctgcaatatttttgcgggtccgaccaccaagcccagtggagtccacctcggtcctccagataactctatccatctgtgcgtgagccacaaagaaatccgttttgccatctccatgacgaactgcaggcagtggcatgccgatcctgatgccaggcttcacatctgtggcacccgcaacttgtgatctcctttctcgaaagtgataccccagatcatgacattcagggagacaagctacggaggcgtggagcatgggagaattggttgcttccaaaactgaactattctgctgggagttcttctggttcgatgacccctgtgacatctaacattgatgctcttgcatctcagtttcgttctgttggacttgagggggcaacgtaccatccaagcatgcctgggatgtctggtgaagctctcctgacaagatcagcaacttcagttagtctaggttaccatgcatcaaccttcggtgggctacagagcaatgggagtgaacctctctttgggccgaagtctgcaagaaatctactcaggagcgataccttttgaggctatatattcaagagaagttaagtacaatggcaggccgagttttcacagtaacggcatgcacaccttatctcaggtgagatgtaaaaacagctgttaaataaaaccaaaaaaggcaaaagcataatacaaaaaaaaagcatacacaaagacaaaaaaatacaaaatgcaaaaacaaaaataaaaagagcataggcagcttttgtgctagtactcctgtcctttgtgttatgtggtatattacctagtaggtttgttttctaatgctaggagtttgatggctcttctgtgtgaaccgagttatttaagtgttatggatggtaccattgggaaactgttgagtggacgacgttatataaaagtacatgaaaacattgttaattatgctgctctctgctgatttgtgccgcatttcttgttttggaaggtaatatcttttattaaat

SEQ ID NO: 81805 - DNA, 1853 bp, Zea Mays
cctcgcttagcctcgccacgcctcgcgacaatatttggaacccctgttaccgatcgcctcatgccgtaccactgaacgatcccaccccaacaccgtacccccgccgcctcctccgccgtgcccacagtcgcctccgcctttcgcctgctaccccgtagaggctctatatcccgatcggactagggtgcggacgatggctagcaacgccgaccagcatgctgccgttgtctcggctgccccgtccgatagcccggttggggcgaagaaggctggggcggcggccgccgtctggaaactccccgcggccgcggcggttcccgtcgcggaggtggttgaaaaccccatcatggacgcacactcctggccggcgctgcccgggctgtcgtctccgccgccgccgccgccgccgcatgcggggccaacagccaaagcgtcaccgaaggccgcttctccagctcccactatcctcatcagaatggacgtcctggctcgcatcaccatggccgaggtggtggctatggtgggggaaacaggaggggtaatggtggaggtggggggcgtcgcgggagtgagcaccacggtggttttgatgggcaacggcgcggaggtggccgcagagatggccatggaccggttcatcagctgcgtggccatcagccaacatacattaaggctcctgttgtagcaggagcacctccaccgcctccaccatttgttagccccgctactcctcagacaccaccttatggaccacctatgggcttccatgacatgtcagcgcatgtttactatttcccggcacccacctcggaaggcattcaaggcctgccttttgtgcctcttccagcaagcccccaagctgttctaattgacccttctcgaaagaaccttctggagcagatagaatactatttcagcgatgacaatttgtgcaaggacctttacttgcggcaacacatggatgggcaaggttgggtgccattatccctgatcgctggctttcgccaagtccagaaaattactaataatattcagtttatcttggaaacagtcatgctatctaacattgtggaagtgcagggagacaagctacggaggcgtggagcatgggagaattggttgcttccaaaactgaactattctgctgggagttcttctggttcgatgacccctgtgacatctaacattgatgctcttgcatctcagtttcgttctgttggacttgagggggcaacgtaccatccaagcatgcctgggatgtctggtgaagctctcctgacaagatcagcaacttcagttagtctaggttaccatgcatcaaccttcggtgggctacagagcaatgggagtgaacctctctttgggccgaagtctgcaagaaatctactcaggagcgataccttttgaggctatatattcaagagaagttaagtacaatggcaggccgagttttcacagtaacggcatgcacaccttatctcaggtgagatgtaaaaacagctgttaaataaaaccaaaaaaggcaaaagcataatacaaaaaaaaagcatacacaaagacaaaaaaatacaaaatgcaaaaacaaaaataaaaagagcataggcagcttttgtgctagtactcctgtcctttgtgttatgtggtatattacctagtaggtttgttttctaatgctaggagtttgatggctcttctgtgtgaaccgagttatttaagtgttatggatggtaccattgggaaactgttgagtggacgacgttatataaaagtacatgaaaacattgttaattatgctgctctctgctgatttgtgccgcatttcttgttttggaaggtaatatcttttattaaat

SEQ ID NO: 81806 - DNA, 4040 bp, Zea Mays
aacctttaaaagttacaatatgtgctgggttagttgggtatgtacacaattaatttgcttttagggtaaccttgtccaagctttgcctgggctttttgcaactaatataatacttctgatagttatagaaaactcacggagtaggctagtgctaaatatttaattggatatagttatagtggatctaattggttgcctgcattagcttgtatgcaggcttgcacagttctcaaagctgagcattgtccagtattctagatttttcctgtattagacgatgcagatttgcataatccgatgagcatacaaaaataaaatattttctcattctctacctttactagagacttcagatctctaatcactactactttaaagcacgacattcattgtgtgtcacccgagcgcctcgcgcgcgtgcccagccgccacaccttccgcctcagcttacgctcgcagaaataacaaaaaatggagggtacgacaccaggaatagaacctgggtcattgcgaccgcggcctcgcgctttaaccaccgcgacacacatatgcttgtgttatataaagaagcgatattataaatatgtatatactgttatttggaaaattaaaaatataatcatgtttgaataaaaatctcatttaaacaagatctacctatatgatatatagaaaccatagcaacgtacgggcaactaactagtagaacatataatgtgactatatgcaataatatgtaaacaaacaaacacaattttattagacgcggcttgcatatgcagaacatccaaacgcgaaggtgttgcatacatctatgctggcttaggcagtgcggcataaggtctaatgcaagctaagcctgatacaagcaaccaatcagacctgttgtaacaaagttagctgaggtcactatagaagttaatgtggcaaagtaagttcatttcatacgaaggatgtctcctcacagaagtagtatggtttgatttcacttttgttttttaaggcaattttgcttttttcaagggactttatatccatctttatgagtagtatgtgattttttcagcatgatttcttccatcacaacaacatagcctggcaggaaactggtaaataagggggtgactgcttgcaattgagggtttgtctttagtgttttgatcatatgtttctgcgaaagggcctctaactgagttagttacgtggtctgagtagcattactcaggtcctgattttgactcccaacaattttaggctaggattaaaaaaatcctcttgtctgacccacgccaaagcagaggtctaagacatggccctggtcgtagtcattctcacatgggttacggtgcctctgtgtatgtgtggagcagaggtccagaaaattactaataatattcagtttatcttggaaacagtcatgctatctaacattgtggaagtgcaggtaatgttttctttgtacaattattgttatatgatttctaatatgattccgtttggccaaaaaacatataggttattcactaaccatatatgtttccattaacattgcatattatttgtagaaaaatcatggttcagaccattctcattatcatctgttagtgtgagttcaccaattatttattattgattcaggtaagcgtagtttgttaagcagatatgcttactggttagacaatggcatagatattaggcgatgtttgattcaacaaatggcaatgacaatgcaaagggaatgaataccagtggtagtgggaagggaagctttgattgtttgttttgtttgattgagtatcggatgcctaaatcattccattgatctgttacacctcaaaattgagcgcaacctggtttctgaagcatgtggacacattgccctggcaccaagatacgtcgggcattaaacaaacacaagtggttgacagtggaatctgatcacgccaataaatggccgaaccaaacagcaccttagcttcttgttatagacctagagctcatttttatctgatatgatacctataaaccaacagagtctatatcattttattgcttgtgaaaacatactcttttcctagtatgaccatggaaaatttagtacgaaactgattcaacaaggatctactgagcttacaggtttttgttgttccttgagtgtatatattctttcagttttaggtaggcagcaggtgtgaccgccccacaaaatcatctttgtggctcatgtggactagctgcaatatttttgcgggtccgaccaccaagcccagtggagtccacctcggtcctccagataactctatccatctgtgcgtgagccacaaagaaatccgttttgccatctccatgacgaactgcaggcagtggcatgccgatcctgatgccaggcttcacatctgtggcacccgcaacttgtgatctcctttctcgaaagtgataccccagatcatgacattcaggcaggcaatctacttgatcatgacatttaggcaggcaatctactactacacggtgttctggaacttggaaatacgatctatttgttctaatcctcatcttacctgtgaagcaaatgattcaatttataaatttattgttgtggtctgccctatatttcttgttggttttgatgaatctgatttgccgaagggtacaagtttgtgcggacagcactctgtttctgcttgccatgctagttataggtaaatcttccaaatgcttgaaaccaacctatttctcaatcaatatattaggccattggaccagcatccaacaatctcaaccctctagtgactgtgtgtttattcagtctccattacagcaagtctcttgattaattcatgtggttgaaagagtttttgggtggaagtcttaccagtaattactattcccattagttgttgattcaccgcagaccatttaaaaaaaaaaaagatgagtaccaaaatgggaaaacggcccttgcatttttcatgtacagttagcaatcggagaacaaaagctgagtcttatccttaatgatcaaaagcccctagcaggtgttagcattattaggttaccacatataaatgtggcgacttatcaaacaagttagctttagcaagtgcaaaatgttcacctgatgcttcgcttggtcacacattttagataatctattttgtttgcctcgtaataatatacttatgcatagcctaaaatgaggaactactgtatgtattcactaagccccttctcacttaaagcactctttcctttatgcttgaatagggagacaagctacggaggcgtggagcatgggagaattggttgcttccaaaactgaactattctgctgggagttcttctggttcgatgacccctgtgacatctaacattgatgctcttgcatctcagtttcgttctgttggacttgagggggcaacgtaccatccaagcatgcctgggatgtctggtgaagctctcctgacaagatcagcaacttcagttagtctaggttaccatgcatcaaccttcggtgggctacagagcaatgggagtgaacctctctttgggccgaagtctgcaagaaatctactcaggagcgataccttttgaggctatatattcaagagaagttaagtacaatggcaggccgagttttcacagtaacggcatgcacaccttatctcaggtgagatgtaaaaacagctgttaaataaaaccaaaaaaggcaaaagcataatacaaaaaaaaagcatacacaaagacaaaaaaatacaaaatgcaaaaacaaaaataaaaagagcataggcagcttttgtgctagtactcctgtcctttgtgttatgtggtatattacctagtaggtttgttttctaatgctaggagtttgatggctcttctgtgtgaaccgagttatttaagtgttatggatggtaccattgggaaactgttgagtggacgacgttatataaaagtacatgaaaacattgttaattatgctgctctctgctgatttgtgccgcatttcttgttttggaaggtaatatcttttattaaat

SEQ ID NO: 81807 - DNA, 1997 bp, Zea Mays
ctcacggagtaggctagtgctaaatatttaattggatatagttatagtggatctaattggttgcctgcattagcttgtatgcaggcttgcacagttctcaaagctgagcattgtccagtattctagatttttcctgtattagacgatgcagatttgcataatccgatgagcatacaaaaataaaatattttctcattctctacctttactagagacttcagatctctaatcactactactttaaagcacgacattcattgtgtgtcacccgagcgcctcgcgcgcgtgcccagccgccacaccttccgcctcagcttacgctcgcagaaataacaaaaaatggagggtacgacaccaggaatagaacctgggtcattgcgaccgcggcctcgcgctttaaccaccgcgacacacatatgcttgtgttatataaagaagcgatattataaatatgtatatactgttatttggaaaattaaaaatataatcatgtttgaataaaaatctcatttaaacaagatctacctatatgatatatagaaaccatagcaacgtacgggcaactaactagtagaacatataatgtgactatatgcaataatatgtaaacaaacaaacacaattttattagacgcggcttgcatatgcagaacatccaaacgcgaaggtgttgcatacatctatgctggcttaggcagtgcggcataaggtctaatgcaagctaagcctgatacaagcaaccaatcagacctgttgtaacaaagttagctgaggtcactatagaagttaatgtggcaaagtaagttcatttcatacgaaggatgtctcctcacagaagtagtatggtttgatttcacttttgttttttaaggcaattttgcttttttcaagggactttatatccatctttatgagtagtatgtgattttttcagcatgatttcttccatcacaacaacatagcctggcaggaaactggtaaataagggggtgactgcttgcaattgagggtttgtctttagtgttttgatcatatgtttctgcgaaagggcctctaactgagttagttacgtggtctgagtagcattactcaggtcctgattttgactcccaacaattttaggctaggattaaaaaaatcctcttgtctgacccacgccaaagcagaggtctaagacatggccctggtcgtagtcattctcacatgggttacggtgcctctgtgtatgtgtggagcagaggtccagaaaattactaataatattcagtttatcttggaaacagtcatgctatctaacattgtggaagtgcagggagacaagctacggaggcgtggagcatgggagaattgtttcgttctgttggacttgagggggcaacgtaccatccaagcatgcctgggatgtctggtgaagctctcctgacaagatcagcaacttcagttagtctaggttaccatgcatcaaccttcggtgggctacagagcaatgggagtgaacctctctttgggccgaagtctgcaagaaatctactcaggagcgataccttttgaggctatatattcaagagaagttaagtacaatggcaggccgagttttcacagtaacggcatgcacaccttatctcaggtgagatgtaaaaacagctgttaaataaaaccaaaaaaggcaaaagcataatacaaaaaaaaagcatacacaaagacaaaaaaatacaaaatgcaaaaacaaaaataaaaagagcataggcagcttttgtgctagtactcctgtcctttgtgttatgtggtatattacctagtaggtttgttttctaatgctaggagtttgatggctcttctgtgtgaaccgagttatttaagtgttatggatggtaccattgggaaactgttgagtggacgacgttatataaaagtacatgaaaacattgttaattatgctgctctctgctgatttgtgccgcatttcttgttttggaaggtaatatcttttattaaat

SEQ ID NO: 81808 - DNA, 2084 bp, Zea Mays
aattggttgcctgcattagcttgtatgcaggcttgcacagttctcaaagctgagcattgtccagtattctagatttttcctgtattagacgatgcagatttgcataatccgatgagcatacaaaaataaaatattttctcattctctacctttactagagacttcagatctctaatcactactactttaaagcacgacattcattgtgtgtcacccgagcgcctcgcgcgcgtgcccagccgccacaccttccgcctcagcttacgctcgcagaaataacaaaaaatggagggtacgacaccaggaatagaacctgggtcattgcgaccgcggcctcgcgctttaaccaccgcgacacacatatgcttgtgttatataaagaagcgatattataaatatgtatatactgttatttggaaaattaaaaatataatcatgtttgaataaaaatctcatttaaacaagatctacctatatgatatatagaaaccatagcaacgtacgggcaactaactagtagaacatataatgtgactatatgcaataatatgtaaacaaacaaacacaattttattagacgcggcttgcatatgcagaacatccaaacgcgaaggtgttgcatacatctatgctggcttaggcagtgcggcataaggtctaatgcaagctaagcctgatacaagcaaccaatcagacctgttgtaacaaagttagctgaggtcactatagaagttaatgtggcaaagtaagttcatttcatacgaaggatgtctcctcacagaagtagtatggtttgatttcacttttgttttttaaggcaattttgcttttttcaagggactttatatccatctttatgagtagtatgtgattttttcagcatgatttcttccatcacaacaacatagcctggcaggaaactggtaaataagggggtgactgcttgcaattgagggtttgtctttagtgttttgatcatatgtttctgcgaaagggcctctaactgagttagttacgtggtctgagtagcattactcaggtcctgattttgactcccaacaattttaggctaggattaaaaaaatcctcttgtctgacccacgccaaagcagaggtctaagacatggccctggtcgtagtcattctcacatgggttacggtgcctctgtgtatgtgtggagcagaggtccagaaaattactaataatattcagtttatcttggaaacagtcatgctatctaacattgtggaagtgcagggtacaagtttgtgcggacagcactctgtttctgcttgccatgctagttatagggagacaagctacggaggcgtggagcatgggagaattggttgcttccaaaactgaactattctgctgggagttcttctggttcgatgacccctgtgacatctaacattgatgctcttgcatctcagtttcgttctgttggacttgagggggcaacgtaccatccaagcatgcctgggatgtctggtgaagctctcctgacaagatcagcaacttcagttagtctaggttaccatgcatcaaccttcggtgggctacagagcaatgggagtgaacctctctttgggccgaagtctgcaagaaatctactcaggagcgataccttttgaggctatatattcaagagaagttaagtacaatggcaggccgagttttcacagtaacggcatgcacaccttatctcaggtgagatgtaaaaacagctgttaaataaaaccaaaaaaggcaaaagcataatacaaaaaaaaagcatacacaaagacaaaaaaatacaaaatgcaaaaacaaaaataaaaagagcataggcagcttttgtgctagtactcctgtcctttgtgttatgtggtatattacctagtaggtttgttttctaatgctaggagtttgatggctcttctgtgtgaaccgagttatttaagtgttatggatggtaccattgggaaactgttgagtggacgacgttatataaaagtacatgaaaacattgttaattatgctgctctctgctgatttgtgccgcatttcttgttttggaaggtaatatcttttattaaat

SEQ ID NO: 81809 - DNA, 869 bp, Zea Mays
ttttgggataatggagtacataaggtccagaaaattactaataatattcagtttatcttggaaacagtcatgctatctaacattgtggaagtgcagggagacaagctacggaggcgtggagcatgggagaattggttgcttccaaaactgaactattctgctgggagttcttctggttcgatgacccctgtgacatctaacattgatgctcttgcatctcagtttcgttctgttggacttgagggggcaacgtaccatccaagcatgcctgggatgtctggtgaagctctcctgacaagatcagcaacttcagttagtctaggttaccatgcatcaaccttcggtgggctacagagcaatgggagtgaacctctctttgggccgaagtctgcaagaaatctactcaggagcgataccttttgaggctatatattcaagagaagttaagtacaatggcaggccgagttttcacagtaacggcatgcacaccttatctcaggtgagatgtaaaaacagctgttaaataaaaccaaaaaaggcaaaagcataatacaaaaaaaaagcatacacaaagacaaaaaaatacaaaatgcaaaaacaaaaataaaaagagcataggcagcttttgtgctagtactcctgtcctttgtgttatgtggtatattacctagtaggtttgttttctaatgctaggagtttgatggctcttctgtgtgaaccgagttatttaagtgttatggatggtaccattgggaaactgttgagtggacgacgttatataaaagtacatgaaaacattgttaattatgctgctctctgctgatttgtgccgcatttcttgttttggaaggtaatatcttttattaaat

SEQ ID NO: 81810 - DNA, 931 bp, Zea Mays
gtgtctttgtggagtataacagtcgaatcagataacctttttgagaatattcaaatagatgttttgcactccctctgttctaaattgtccagaaaattactaataatattcagtttatcttggaaacagtcatgctatctaacattgtggaagtgcagggagacaagctacggaggcgtggagcatgggagaattggttgcttccaaaactgaactattctgctgggagttcttctggttcgatgacccctgtgacatctaacattgatgctcttgcatctcagtttcgttctgttggacttgagggggcaacgtaccatccaagcatgcctgggatgtctggtgaagctctcctgacaagatcagcaacttcagttagtctaggttaccatgcatcaaccttcggtgggctacagagcaatgggagtgaacctctctttgggccgaagtctgcaagaaatctactcaggagcgataccttttgaggctatatattcaagagaagttaagtacaatggcaggccgagttttcacagtaacggcatgcacaccttatctcaggtgagatgtaaaaacagctgttaaataaaaccaaaaaaggcaaaagcataatacaaaaaaaaagcatacacaaagacaaaaaaatacaaaatgcaaaaacaaaaataaaaagagcataggcagcttttgtgctagtactcctgtcctttgtgttatgtggtatattacctagtaggtttgttttctaatgctaggagtttgatggctcttctgtgtgaaccgagttatttaagtgttatggatggtaccattgggaaactgttgagtggacgacgttatataaaagtacatgaaaacattgttaattatgctgctctctgctgatttgtgccgcatttcttgttttggaaggtaatatcttttattaaat

SEQ ID NO: 81811 - DNA, 2049 bp, Zea Mays
cggggtatttaaacgagtacgacgattgccggagtatattttttggcgagcgccagcggcaaacgaaccgtctccattccgttctccacttctccagatcccctccgcaatctaccttcgcgcggctaccacggcgccggtgctgaagccagcgaccgtggccatgcagtcgccggagccctcctcctcctccccggttctcctcaatatagggggcaagaagtacgcgacaaccgtggagacgctgatgcagcgggagcccgactccatgctcgccgccatgttcagcgggcggcacacgctccatgatcacccaaccacggggaagggagtggtcttcgtggacagggacgggaagcacttccgccacgtgctcaattggctcagggacggcgccatccccgtgctgtccgagtccgactaccagcagctgctgcgagaggcagagtactaccagttgctcggtttagtcgactacataaacgagaggctgggttggaaggaaaccgacaattcggaggctgaattgacacgaaaggacgtgatcaagtgcatacaaacgcaaagagtcaggttccgtggcgtgaatctatctggccttgatctgtctaagcttgacttatcagaggtggacttcagctatgcatgcattaagaacactgatttttcatatgctaacctttacaaagcaaaatttggggtaaatcagttgcaccaaaattatttattgttgtttgctgtcttcttagcagtagcaggctgtagaaactatgttaatttacttgtctgtgacctgtataaatgtttcaaatccgtctcagatttcttaaaaagagtcttagtttagttcctggctaagatttttgctatataaaatgaaacattttactgataacactgtaactctacatttttagcagcaggtagaagcttcgtcttcatctttccaaaacgcaattttgcgtgtgagtttattggagctaatcttgaagaatctattttggatggagcaaaccttcgaagtgccaatttacaagatgcttgcttaacacgatgtagcctcattttaacagatcttcattctgcccatttacagactgctaatcttacacaagccgacttaagaggagctaatcttgaagcggccaatctcaagggtgccaagttgtcaggtacaaacttgcaaggcgcaaatcttcagagagcttacttgcgagaagttgatttgcgtgacactgtatgttcttttgtcgtgtcccgtttattaaggatcttgggttcttctgtttacaatctgcctcacgttctgtgcaagtagtttctacacctctcatgacaccagcatatagacatcggaggatgaattttaattgcgtttactttggtcaacagcaattgactggtgctaagctcggaggtgcaaatcttcttggagctatcagatgatctacagattgttcgtgtagcttcatactgtgtatactgtactacacaaattcattggaggtaatgcggcaggaccatctgcggagttctggtctcaatcatgatcgagaacacaaatattccttctgttcaaaaataaatcagttcctagaatgattctaagtcgaactatcttaagttcgaccaactttataggaaaggatggagtttatgtgctgttctttgtacgccgccctctgattggaagtttagaatctagcatgttagctgtcagagctgaaaccatcacagcaagcacatttgctgggccccgattgcagtggacagatgtacctgtattgctgttgattcaatcttggtgtcattaccatatcatgtagaggtggtatccacactattggtaggtcatttgtattaccgctggcgctgggccaaatgggaacagtacttcgcaggtgggcggtagtcgctggttcagatcaggccaggccacgccacgccacaagtatgcatttgagttagaatccgtactaactgaactgaaacatcagtatcaaaatatctgtatcgattctaatggtctgtttggttggaatatagctg

SEQ ID NO: 81812 - DNA, 1530 bp, Zea Mays
cggggtatttaaacgagtacgacgattgccggagtatattttttggcgagcgccagcggcaaacgaaccgtctccattccgttctccacttctccagatcccctccgcaatctaccttcgcgcggctaccacggcgccggtgctgaagccagcgaccgtggccatgcagtcgccggagccctcctcctcctccccggttctcctcaatatagggggcaagaagtacgcgacaaccgtggagacgctgatgcagcgggagcccgactccatgctcgccgccatgttcagcgggcggcacacgctccatgatcacccaaccacggggaagggagtggtcttcgtggacagggacgggaagcacttccgccacgtgctcaattggctcagggacggcgccatccccgtgctgtccgagtccgactaccagcagctgctgcgagaggcagaggtttagtcgactacataaacgagaggctgggttggaaggaaaccgacaattcggaggctgaattgacacgaaaggacgtgatcaagtgcatacaaacgcaaagagtcaggttccgtggcgtgaatctatctggccttgatctgtctaagcttgacttatcagaggtggacttcagctatgcatgcattaagaacactgatttttcatatgctaacctttacaaagcaaaatttgggcagcaggtagaagcttcgtcttcatctttccaaaacgcaattttgcgtgagtgtgagtttattggagctaatcttgaagaatctattttggatggagcaaaccttcgaagtgccaatttacaagatgcttgcttaacacgatgtagcctcattttaacagatcttcattctgcccatttacagactgctaatcttacacaagccgacttaagaggagctaatcttgaagcggccaatctcaagggtgccaagttgtcaggtacaaacttgcaaggcgcaaatcttcagagagcttacttgcgagaagttgatttgcgtgacactcaattgactggtgctaagctcggaggtgcaaatcttcttggagctatcagatgatctacagattgttcgtgtagcttcatactgtgtatactgtactacacaaattcattggaggaaaggatggagtttatgtgctgttctttgtacgccgccctctgattggaagtttagaatctagcatgttagctgtcagagctgaaaccatcacagcaagcacatttgctgggccccgattgcagtggacagatgtacctgtattgctgttgattcaatcttggtgtcattaccatatcatgtagaggtggtatccacactattggtaggtcatttgtattaccgctggcgctgggccaaatgggaacagtacttcgcaggtgggcggtagtcgctggttcagatcaggccaggccacgccacgccacaagtatgcatttgagttagaatccgtactaactgaactgaaacatcagtatcaaaatatctgtatcgattctaatggtctgtttggttggaatatagctg

SEQ ID NO: 81813 - DNA, 1677 bp, Zea Mays
cggggtatttaaacgagtacgacgattgccggagtatattttttggcgagcgccagcggcaaacgaaccgtctccattccgttctccacttctccagatcccctccgcaatctaccttcgcgcggctaccacggcgccggtgctgaagccagcgaccgtggccatgcagtcgccggagccctcctcctcctccccggttctcctcaatatagggggcaagaagtacgcgacaaccgtggagacgctgatgcagcgggagcccgactccatgctcgccgccatgttcagcgggcggcacacgctccatgatcacccaaccacggggaagggagtggtcttcgtggacagggacgggaagcacttccgccacgtgctcaattggctcagggacggcgccatccccgtgctgtccgagtccgactaccagcagctgctgcgagaggcagagtactaccagttgctcggtttagtcgactacataaacgagaggctgggttggaaggaaaccgacaattcggaggctgaattgacacgaaaggacgtgatcaagtgcatacaaacgcaaagagtcaggttccgtggcgtgaatctatctggccttgatctgtctaagcttgacttatcagaggtggacttcagctatgcatgcattaagaacactgatttttcatatgctaacctttacaaagcaaaatttgggcagcaggtagaagcttcgtcttcatctttccaaaacgcaattttgcgtgtgagtttattggagctaatcttgaagaatctattttggatggagcaaaccttcgaagtgccaatttacaagatgcttgcttaacacgatgtagcctcattttaacagatcttcattctgcccatttacagactgctaatcttacacaagccgacttaagaggagctaatcttgaagcggccaatctcaagggtgccaagttgtcaggtacaaacttgcaaggcgcaaatcttcagagagcttacttgcgagaagttgatttgcgtgacactcaattgactggtgctaagctcggaggtgcaaatcttcttggagctatcagatgatctacagattgttcgtgtagcttcatactgtgtatactgtactacacaaattcattggaggtaatgcggcaggaccatctgcggagttctggtctcaatcatgatcgagaacacaaatattccttctgttcaaaaataaatcagttcctagaatgattctaagtcgaactatcttaagttcgaccaactttataggaaaggatggagtttatgtgctgttctttgtacgccgccctctgattggaagtttagaatctagcatgttagctgtcagagctgaaaccatcacagcaagcacatttgctgggccccgattgcagtggacagatgtacctgtattgctgttgattcaatcttggtgtcattaccatatcatgtagaggtggtatccacactattggtaggtcatttgtattaccgctggcgctgggccaaatgggaacagtacttcgcaggtgggcggtagtcgctggttcagatcaggccaggccacgccacgccacaagtatgcatttgagttagaatccgtactaactgaactgaaacatcagtatcaaaatatctgtatcgattctaatggtctgtttggttggaatatagctg

SEQ ID NO: 81814 - DNA, 1658 bp, Zea Mays
cggggtatttaaacgagtacgacgattgccggagtatattttttggcgagcgccagcggcaaacgaaccgtctccattccgttctccacttctccagatcccctccgcaatctaccttcgcgcggctaccacggcgccggtgctgaagccagcgaccgtggccatgcagtcgccggagccctcctcctcctccccggttctcctcaatatagggggcaagaagtacgcgacaaccgtggagacgctgatgcagcgggagcccgactccatgctcgccgccatgttcagcgggcggcacacgctccatgatcacccaaccacggggaagggagtggtcttcgtggacagggacgggaagcacttccgccacgtgctcaattggctcagggacggcgccatccccgtgctgtccgagtccgactaccagcagctgctgcgagaggcagaggtttagtcgactacataaacgagaggctgggttggaaggaaaccgacaattcggaggctgaattgacacgaaaggacgtgatcaagtgcatacaaacgcaaagagtcaggttccgtggcgtgaatctatctggccttgatctgtctaagcttgacttatcagaggtggacttcagctatgcatgcattaagaacactgatttttcatatgctaacctttacaaagcaaaatttgggcaggtagaagcttcgtcttcatctttccaaaacgcaattttgcgtgtgagtttattggagctaatcttgaagaatctattttggatggagcaaaccttcgaagtgccaatttacaagatgcttgcttaacacgatgtagcctcattttaacagatcttcattctgcccatttacagactgctaatcttacacaagccgacttaagaggagctaatcttgaagcggccaatctcaagggtgccaagttgtcaggtacaaacttgcaaggcgcaaatcttcagagagcttacttgcgagaagttgatttgcgtgacactcaattgactggtgctaagctcggaggtgcaaatcttcttggagctatcagatgatctacagattgttcgtgtagcttcatactgtgtatactgtactacacaaattcattggaggtaatgcggcaggaccatctgcggagttctggtctcaatcatgatcgagaacacaaatattccttctgttcaaaaataaatcagttcctagaatgattctaagtcgaactatcttaagttcgaccaactttataggaaaggatggagtttatgtgctgttctttgtacgccgccctctgattggaagtttagaatctagcatgttagctgtcagagctgaaaccatcacagcaagcacatttgctgggccccgattgcagtggacagatgtacctgtattgctgttgattcaatcttggtgtcattaccatatcatgtagaggtggtatccacactattggtaggtcatttgtattaccgctggcgctgggccaaatgggaacagtacttcgcaggtgggcggtagtcgctggttcagatcaggccaggccacgccacgccacaagtatgcatttgagttagaatccgtactaactgaactgaaacatcagtatcaaaatatctgtatcgattctaatggtctgtttggttggaatatagctg

SEQ ID NO: 81815 - DNA, 1539 bp, Zea Mays
cggggtatttaaacgagtacgacgattgccggagtatattttttggcgagcgccagcggcaaacgaaccgtctccattccgttctccacttctccagatcccctccgcaatctaccttcgcgcggctaccacggcgccggtgctgaagccagcgaccgtggccatgcagtcgccggagccctcctcctcctccccggttctcctcaatatagggggcaagaagtacgcgacaaccgtggagacgctgatgcagcgggagcccgactccatgctcgccgccatgttcagcgggcggcacacgctccatgatcacccaaccacggggaagggagtggtcttcgtggacagggacgggaagcacttccgccacgtgctcaattggctcagggacggcgccatccccgtgctgtccgagtccgactaccagcagctgctgcgagaggcagagtactaccagttgctcggtttagtcgactacataaacgagaggctgggttggaaggaaaccgacaattcggaggctgaattgacacgaaaggacgtgatcaagtgcatacaaacgcaaagagtcaggttccgtggcgtgaatctatctggccttgatctgtctaagcttgacttatcagaggtggacttcagctatgcatgcattaagaacactgatttttcatatgctaacctttacaaagcaaaatttgggcaggtagaagcttcgtcttcatctttccaaaacgcaattttgcgtgtgagtttattggagctaatcttgaagaatctattttggatggagcaaaccttcgaagtgccaatttacaagatgcttgcttaacacgatgtagcctcattttaacagatcttcattctgcccatttacagactgctaatcttacacaagccgacttaagaggagctaatcttgaagcggccaatctcaagggtgccaagttgtcaggtacaaacttgcaaggcgcaaatcttcagagagcttacttgcgagaagttgatttgcgtgacactcaattgactggtgctaagctcggaggtgcaaatcttcttggagctatcagatgatctacagattgttcgtgtagcttcatactgtgtatactgtactacacaaattcattggaggaaaggatggagtttatgtgctgttctttgtacgccgccctctgattggaagtttagaatctagcatgttagctgtcagagctgaaaccatcacagcaagcacatttgctgggccccgattgcagtggacagatgtacctgtattgctgttgattcaatcttggtgtcattaccatatcatgtagaggtggtatccacactattggtaggtcatttgtattaccgctggcgctgggccaaatgggaacagtacttcgcaggtgggcggtagtcgctggttcagatcaggccaggccacgccacgccacaagtatgcatttgagttagaatccgtactaactgaactgaaacatcagtatcaaaatatctgtatcgattctaatggtctgtttggttggaatatagctg

SEQ ID NO: 81816 - DNA, 1653 bp, Zea Mays
cggggtatttaaacgagtacgacgattgccggagtatattttttggcgagcgccagcggcaaacgaaccgtctccattccgttctccacttctccagatcccctccgcaatctaccttcgcgcggctaccacggcgccggtgctgaagccagcgaccgtggccatgcagtcgccggagccctcctcctcctccccggttctcctcaatatagggggcaagaagtacgcgacaaccgtggagacgctgatgcagcgggagcccgactccatgctcgccgccatgttcagcgggcggcacacgctccatgatcacccaaccacggggaagggagtggtcttcgtggacagggacgggaagcacttccgccacgtgctcaattggctcagggacggcgccatccccgtgctgtccgagtccgactaccagcagctgctgcgagagggtttagtcgactacataaacgagaggctgggttggaaggaaaccgacaattcggaggctgaattgacacgaaaggacgtgatcaagtgcatacaaacgcaaagagtcaggttccgtggcgtgaatctatctggccttgatctgtctaagcttgacttatcagaggtggacttcagctatgcatgcattaagaacactgatttttcatatgctaacctttacaaagcaaaatttgggcaggtagaagcttcgtcttcatctttccaaaacgcaattttgcgtgtgagtttattggagctaatcttgaagaatctattttggatggagcaaaccttcgaagtgccaatttacaagatgcttgcttaacacgatgtagcctcattttaacagatcttcattctgcccatttacagactgctaatcttacacaagccgacttaagaggagctaatcttgaagcggccaatctcaagggtgccaagttgtcaggtacaaacttgcaaggcgcaaatcttcagagagcttacttgcgagaagttgatttgcgtgacactcaattgactggtgctaagctcggaggtgcaaatcttcttggagctatcagatgatctacagattgttcgtgtagcttcatactgtgtatactgtactacacaaattcattggaggtaatgcggcaggaccatctgcggagttctggtctcaatcatgatcgagaacacaaatattccttctgttcaaaaataaatcagttcctagaatgattctaagtcgaactatcttaagttcgaccaactttataggaaaggatggagtttatgtgctgttctttgtacgccgccctctgattggaagtttagaatctagcatgttagctgtcagagctgaaaccatcacagcaagcacatttgctgggccccgattgcagtggacagatgtacctgtattgctgttgattcaatcttggtgtcattaccatatcatgtagaggtggtatccacactattggtaggtcatttgtattaccgctggcgctgggccaaatgggaacagtacttcgcaggtgggcggtagtcgctggttcagatcaggccaggccacgccacgccacaagtatgcatttgagttagaatccgtactaactgaactgaaacatcagtatcaaaatatctgtatcgattctaatggtctgtttggttggaatatagctg

SEQ ID NO: 81817 - DNA, 2618 bp, Zea Mays
gcgggggacgcgtgcagcggagcacgggcgcgaggtggcgagctgcatgtgcccagccacgcgccaacgaataggcgcacagcccgatggaccgcgcagacggaccgacgcaaccaggcaccatccagtgcatgcgcacccgcggcccagccatggacatggggtttgtcgagagccagccggagttgacggccgcgccggcggcgggacccggcacgggaagcaggctgccgggcgggggcggcgggcgcaagcggaagcacctctcctccatcgccaaccacgtgctccggcaatgttctctgacactggacaggagcgtggacgatttggtggcagacttcgagctgggcttaaagactgcagcagtggacagctactcaagaaaactggtcgagttctgcagtctccaggcgctgcagatcatcacgtcacgcgatataggggagaagatcagcgagggctcgctaggtcggttcaccttcgatatgatgctggcctgggagaccccgactccgtcggaccaacagatcaccatggagagcgtagcgaaggagagggaagataggaaggagacccttggagaaggtgaagctgtgatgggtgatgagacgtcactgttctattcagacatcatgcctcttcttgtgaatgaagagccaactgttggggaagaagcgtacgtgtggtttggatctgtgttccctttggcttgtgacgtggtcaatgctcgattcacattcgaagctctcactgccaccacagctaacaggctgcactaccctgcctatgacaggttcctgaaagagatggataagtatgctgcctgctccatgattgcaccaacaattcttcatctgtcggcactatcgttagatgtccttcaagttcttccaagacttgccaactccgactggagttgaattcgctgaggatgagttcattttgcacatggagggcacggcagggacacagagagtggtgaggcacattggaaccactagctggccaggtcgagtgactctgacgaacaaggcactgtattttgaggcttccggaaaattttcatacgaatctgcaatcaaggttgatctctcagacaccggagtagaacaccaaatcagcacggcgtcaacaggccctttcggcgtgcctttgttcgacaaggccatcgtgttcgagtcactaccagagcctgtggtcttggagttcccggagatgaccagctcgacaaggcgcaacacgtggctcgctctgatcagggaagtgctgtccatccaccgtttcatctcagcgtacagcatagtgtcccccgtccacagatgggaggtgcactccagaaccatactaggagtggtacgtctccacgccgcgagggagatgctacggatgtcgccgccgccggcttccagcttcctagtgttctcgctgtacggcgacatgcccaagggcgacttcgtgctcgagcagctggcgagcaacctgaagcggacctccaccatcacccggctgagcgcgtcctacgtgttcaagggtctgagcaggtcttcttctgtcccacctctgagcgcggaggtggccgccgaaggccgtggcgcggacgacgacgccagtggccgcgagcacgagcggcccctggcgtccctggaggacaagatcggccgggtgcgagatgaggccagggaagtcaccgccgccaacgccgccgttgaagggatgaaggacgaaggcatctcggatagtcttctcgtgctggtggggttggtcggtcccgtcggcaagctgcggcccgcgatccagcggataacctcgtgggagcggccgcttgtcactggcagcatccttgccgcagcttcgctgatcatatacaatgaatggttcagttacgtgctagctgcgtccctggtgctggccgccggcgtgatggtctgggcgaggcagaggaagataggggagctatgctcggaggtgatcatcgatgcctcttcgtcgtcgtcgtcggacaagacaacgatggatagcatagtggaggcgcagcgaagcctgcagaaagtgcacaggtacatcgtgaccgcgaacgttgccatcctcaggctgtggtcgattgcgctagcaaggtcgccaaagcacacagagacggtgatctggatgctggccgtgtccgcggcggtggtagccgtggtcccgttcaggtacattctgatcgggctggtggcggggagcttcgcgttgaacacgagggtcgcgagggccgtgatgaacccgcagggcggccggcggtggagggagtggtgggagtccatacccgccgtccccgttcggacggtgcacagttgacaaaagtatattttcctctactacgtgaaatgatcgcagaaggaacccgttatagaagcctgtttgttcaggaagaataatgaagtcaataagaaactgtttgttcgcttgtgtctcttttcacctcagccagcaatttcaccttgtaatgaacaccgccatgcacccctgtttaattagtttcattcactaaattttagtttctgtcgcatcaaatgtttggattttagtttaaaactattaaatacagcgattatagtctaattcaaaattaattatac

SEQ ID NO: 81818 - DNA, 2557 bp, Zea Mays
gcgggggacgcgtgcagcggagcacgggcgcgaggtggcgagctgcatgtgcccagccacgcgccaacgaataggcgcacagcccgatggaccgcgcagacggaccgacgcaaccaggcaccatccagtgcatgcgcacccgcggcccagccatggacatggggtttgtcgagagccagccggagttgacggccgcgccggcggcgggacccggcacgggaagcaggctgccgggcgggggcggcgggcgcaagcggaagcacctctcctccatcgccaaccacgtgctccggcaatgttctctgacactggacaggagcgtggacgatttggtggcagacttcgagctgggcttaaagactgcagcagtggacagctactcaagaaaactggtcgagttctgcagtctccaggcgctgcagatcatcacgtcacgcgatataggggagaagatcagcgagggctcgctaggtcggttcaccttcgatatgatgctggcctgggagaccccgactccgtcggaccaacagatcaccatggagagcgtagcgaaggagagggaagataggaaggagacccttggagaaggtgaagctgtgatgggtgatgagacgtcactgttctattcagacatcatgcctcttcttgtgaatgaagagccaactgttggggaagaagcgtacgtgtggtttggatctgtgttccctttggcttgtgacgtggtcaatgctcgattcacattcgaagctctcactgccaccacagctaacaggctgcactaccctgcctatgacaggttcctgaaagagatggataagtccttcaagttcttccaagacttgccaactccgactggagttgaattcgctgaggatgagttcattttgcacatggagggcacggcagggacacagagagtggtgaggcacattggaaccactagctggccaggtcgagtgactctgacgaacaaggcactgtattttgaggcttccggaaaattttcatacgaatctgcaatcaaggttgatctctcagacaccggagtagaacaccaaatcagcacggcgtcaacaggccctttcggcgtgcctttgttcgacaaggccatcgtgttcgagtcactaccagagcctgtggtcttggagttcccggagatgaccagctcgacaaggcgcaacacgtggctcgctctgatcagggaagtgctgtccatccaccgtttcatctcagcgtacagcatagtgtcccccgtccacagatgggaggtgcactccagaaccatactaggagtggtacgtctccacgccgcgagggagatgctacggatgtcgccgccgccggcttccagcttcctagtgttctcgctgtacggcgacatgcccaagggcgacttcgtgctcgagcagctggcgagcaacctgaagcggacctccaccatcacccggctgagcgcgtcctacgtgttcaagggtctgagcaggtcttcttctgtcccacctctgagcgcggaggtggccgccgaaggccgtggcgcggacgacgacgccagtggccgcgagcacgagcggcccctggcgtccctggaggacaagatcggccgggtgcgagatgaggccagggaagtcaccgccgccaacgccgccgttgaagggatgaaggacgaaggcatctcggatagtcttctcgtgctggtggggttggtcggtcccgtcggcaagctgcggcccgcgatccagcggataacctcgtgggagcggccgcttgtcactggcagcatccttgccgcagcttcgctgatcatatacaatgaatggttcagttacgtgctagctgcgtccctggtgctggccgccggcgtgatggtctgggcgaggcagaggaagataggggagctatgctcggaggtgatcatcgatgcctcttcgtcgtcgtcgtcggacaagacaacgatggatagcatagtggaggcgcagcgaagcctgcagaaagtgcacaggtacatcgtgaccgcgaacgttgccatcctcaggctgtggtcgattgcgctagcaaggtcgccaaagcacacagagacggtgatctggatgctggccgtgtccgcggcggtggtagccgtggtcccgttcaggtacattctgatcgggctggtggcggggagcttcgcgttgaacacgagggtcgcgagggccgtgatgaacccgcagggcggccggcggtggagggagtggtgggagtccatacccgccgtccccgttcggacggtgcacagttgacaaaagtatattttcctctactacgtgaaatgatcgcagaaggaacccgttatagaagcctgtttgttcaggaagaataatgaagtcaataagaaactgtttgttcgcttgtgtctcttttcacctcagccagcaatttcaccttgtaatgaacaccgccatgcacccctgtttaattagtttcattcactaaattttagtttctgtcgcatcaaatgtttggattttagtttaaaactattaaatacagcgattatagtctaattcaaaattaattatac

SEQ ID NO: 81819 - DNA, 2558 bp, Zea Mays
gacgcgtgcagcggagcacgggcgcgaggtggcgagctgcatgtgcccagccacgcgccaacgaataggcgcacagcccgatggaccgcgcagacggaccgacgcaaccaggcaccatccagtgcatgcgcacccgcggcccagccatggacatggggtttgtcgagagccagccggagttgacggccgcgccggcggcgggacccggcacgggaagcaggctgccgggcgggggcggcgggcgcaagcggaagcacctctcctccatcgccaaccacgtgctccggcaatgttctctgacactggacaggagcgtggacgatttggtggcagacttcgagctgggcttaaagactgcagcagtggacagctactcaagaaaactggtcgagttctgcagtctccaggcgctgcagatcatcacgtcacgcgatataggggagaagatcagcgagggctcgctaggtcggttcaccttcgatatgatgctggcctgggagaccccgactccgtcggaccaacagatcaccatggagagcgtagcgaaggagagggaagataggaaggagacccttggagaaggtgaagctgtgatgggtgatgagacgtcactgttctattcagacatcatgcctcttcttgtgaatgaagagccaactgttggggaagaagcgtacgtgtggtttggatctgtgttccctttggcttgtgacgtggtcaatgctcgattcacattcgaagctctcactgccaccacagctaacaggctgcactaccctgcctatgacaggttcctgaaagagatggataagtccttcaagttcttccaagacttgccaactccgactggagttgaattcgctgaggatgagttcattttgcacatggagggcacggcagggacacagagagtggtgaggcacattggaaccactagctggccaggtcgagtgactctgacgaacaaggcactgtattttgaggcttccggaaaattttcatacgaatctgcaatcaaggttgatctctcagacaccggagtagaacaccaaatcagcacggcgtcaacaggccctttcggcgtgcctttgttcgacaaggccatcgtgttcgagtcactgtaagttccatctcacaaaaggacccttgaaacgatcaatcctacctggctacctgaaccattcatccgtgcagaccagagcctgtggtcttggagttcccggagatgaccagctcgacaaggcgcaacacgtggctcgctctgatcagggaagtgctgtccatccaccgtttcatctcagcgtacagcatagtgtcccccgtccacagatgggaggtgcactccagaaccatactaggagtggtacgtctccacgccgcgagggagatgctacggatgtcgccgccgccggcttccagcttcctagtgttctcgctgtacggcgacatgcccaagggcgacttcgtgctcgagcagctggcgagcaacctgaagcggacctccaccatcacccggctgagcgcgtcctacgtgttcaagggtctgagcaggtcttcttctgtcccacctctgagcgcggaggtggccgccgaaggccgtggcgcggacgacgacgccagtggccgcgagcacgagcggcccctggcgtccctggaggacaagatcggccgggtgcgagatgaggccagggaagtcaccgccgccaacgccgccgttgaagggatgaaggacgaaggcatctcggatagtcttctcgtgctggtggggttggtcggtcccgtcggcaagctgcggcccgcgatccagcggataacctcgtgggagcggccgcttgtcactggcagcatccttgccgcagcttcgctgatcatatacaatgaatggttcagttacgtgctagctgcgtccctggtgctggccgccggcgtgatggtctgggcgaggcagaggaagataggggagctatgctcggaggtgatcatcgatgcctcttcgtcgtcgtcgtcggacaagacaacgatggatagcatagtggaggcgcagcgaagcctgcagaaagtgcacagcacacagagacggtgatctggatgctggccgtgtccgcggcggtggtagccgtggtcccgttcaggtacattctgatcgggctggtggcggggagcttcgcgttgaacacgagggtcgcgagggccgtgatgaacccgcagggcggccggcggtggagggagtggtgggagtccatacccgccgtccccgttcggacggtgcacagttgacaaaagtatattttcctctactacgtgaaatgatcgcagaaggaacccgttatagaagcctgtttgttcaggaagaataatgaagtcaataagaaactgtttgttcgcttgtgtctcttttcacctcagccagcaatttcaccttgtaatgaacaccgccatgcacccctgtttaattagtttcattcactaaattttagtttctgtcgcatcaaatgtttggattttagtttaaaactattaaatacagcgattatagtctaattcaaaattaattatac

SEQ ID NO: 81820 - DNA, 2543 bp, Zea Mays
gcgtgcagcggagcacgggcgcgaggtggcgagctgcatgtgcccagccacgcgccaacgaataggcgcacagcccgatggaccgcgcagacggaccgacgcaaccaggcaccatccagtgcatgcgcacccgcggcccagccatggacatggggtttgtcgagagccagccggagttgacggccgcgccggcggcgggacccggcacgggaagcaggctgccgggcgggggcggcgggcgcaagcggaagcacctctcctccatcgccaaccacgtgctccggcaatgttctctgacactggacaggagcgtggacgatttggtggcagacttcgagctgggcttaaagactgcagcagtggacagctactcaagaaaactggtcgagttctgcagtctccaggcgctgcagatcatcacgtcacgcgatataggggagaagatcagcgagggctcgctaggtcggttcaccttcgatatgatgctggcctgggagaccccgactccgtcggaccaacagatcaccatggagagcgtagcgaaggagagggaagataggaaggagacccttggagaaggtgaagctgtgatgggtgatgagacgtcactgttctattcagacatcatgcctcttcttgtgaatgaagagccaactgttggggaagaagcgtacgtgtggtttggatctgtgttccctttggcttgtgacgtggtcaatgctcgattcacattcgaagctctcactgccaccacagctaacaggctgcactaccctgcctatgacaggttcctgaaagagatggataagtccttcaagttcttccaagacttgccaactccgactggagttgaattcgctgaggatgagttcattttgcacatggagggcacggcagggacacagagagtggtgaggcacattggaaccactagctggccaggtcgagtgactctgacgaacaaggcactgtattttgaggcttccggaaaattttcatacgaatctgcaatcaaggttgatctctcagacaccggagtagaacaccaaatcagcacggcgtcaacaggccctttcggcgtgcctttgttcgacaaggccatcgtgttcgagtcactagcctgtggtcttggagttcccggagatgaccagctcgacaaggcgcaacacgtggctcgctctgatcagggaagtgctgtccatccaccgtttcatctcagcgtacagcatagtgtcccccgtccacagatgggaggtgcactccagaaccatactaggagtggtacgtctccacgccgcgagggagatgctacggatgtcgccgccgccggcttccagcttcctagtgttctcgctgtacggcgacatgcccaagggcgacttcgtgctcgagcagctggcgagcaacctgaagcggacctccaccatcacccggctgagcgcgtcctacgtgttcaagggtctgagcaggtcttcttctgtcccacctctgagcgcggaggtggccgccgaaggccgtggcgcggacgacgacgccagtggccgcgagcacgagcggcccctggcgtccctggaggacaagatcggccgggtgcgagatgaggccagggaagtcaccgccgccaacgccgccgttgaagggatgaaggacgaaggcatctcggatagtcttctcgtgctggtggggttggtcggtcccgtcggcaagctgcggcccgcgatccagcggataacctcgtgggagcggccgcttgtcactggcagcatccttgccgcagcttcgctgatcatatacaatgaatggttcagttacgtgctagctgcgtccctggtgctggccgccggcgtgatggtctgggcgaggcagaggaagataggggagctatgctcggaggtgatcatcgatgcctcttcgtcgtcgtcgtcggacaagacaacgatggatagcatagtggaggcgcagcgaagcctgcagaaagtgcacaggtacatcgtgaccgcgaacgttgccatcctcaggctgtggtcgattgcgctagcaaggtcgccaaagcacacagagacggtgatctggatgctggccgtgtccgcggcggtggtagccgtggtcccgttcaggtacattctgatcgggctggtggcggggagcttcgcgttgaacacgagggtcgcgagggccgtgatgaacccgcagggcggccggcggtggagggagtggtgggagtccatacccgccgtccccgttcggacggtgcacagttgacaaaagtatattttcctctactacgtgaaatgatcgcagaaggaacccgttatagaagcctgtttgttcaggaagaataatgaagtcaataagaaactgtttgttcgcttgtgtctcttttcacctcagccagcaatttcaccttgtaatgaacaccgccatgcacccctgtttaattagtttcattcactaaattttagtttctgtcgcatcaaatgtttggattttagtttaaaactattaaatacagcgattatagtctaattcaaaattaattatac

SEQ ID NO: 81821 - DNA, 2567 bp, Zea Mays
atggaccgcgcagacggaccgacgcaaccaggcaccatccagtgcatgcgcacccgcggcccagccatggacatggggtttgtcgagagccagccggagttgacggccgcgccggcggcgggacccggcacgggaagcaggctgccgggcgggggcggcgggcgcaagcggaagcacctctcctccatcgccaaccacgtgctccggcaatgttctctgacactggacaggagcgtggacgatttggtggcagacttcgagctgggcttaaagactgcagcagtggacagctactcaagaaaactggtcgagttctgcagtctccaggcgctgcagatcatcacgtcacgcgatataggggagaagatcagcgagggctcgctaggtcggttcaccttcgatatgatgctggcctgggagaccccgactccgtcggaccaacagatcaccatggtatggttggtgacttgacatggagagcgtagcgaaggagagggaagataggaaggagacccttggagaaggtgaagctgtgatgggtgatgagacgtcactgttctattcagacatcatgcctcttcttgtgaatgaagagccaactgttggggaagaagcgtacgtgtggtttggatctgtgttccctttggcttgtgacgtggtcaatgctcgattcacattcgaagctctcactgccaccacagctaacaggctgcactaccctgcctatgacaggttcctgaaagagatggataagtccttcaagttcttccaagacttgccaactccgactggagttgaattcgctgaggatgagttcattttgcacatggagggcacggcagggacacagagagtggtgaggcacattggaaccactagctggccaggtcgagtgactctgacgaacaaggcactgtattttgaggcttccggaaaattttcatacgaatctgcaatcaaggttgatctctcagacaccggagtagaacaccaaatcagcacggcgtcaacaggccctttcggcgtgcctttgttcgacaaggccatcgtgttcgagtcactgtaagttccatctcacaaaaggacccttgaaacgatcaatcctacctggctacctgaaccattcatccgtgcagaccagagcctgtggtcttggagttcccggagatgaccagctcgacaaggcgcaacacgtggctcgctctgatcagggaagtgctgtccatccaccgtttcatctcagcgtacagcatagtgtcccccgtccacagatgggaggtgcactccagaaccatactaggagtggtacgtctccacgccgcgagggagatgctacggatgtcgccgccgccggcttccagcttcctagtgttctcgctgtacggcgacatgcccaagggcgacttcgtgctcgagcagctggcgagcaacctgaagcggacctccaccatcacccggctgagcgcgtcctacgtgttcaagggtctgagcaggtcttcttctgtcccacctctgagcgcggaggtggccgccgaaggccgtggcgcggacgacgacgccagtggccgcgagcacgagcggcccctggcgtccctggaggacaagatcggccgggtgcgagatgaggccagggaagtcaccgccgccaacgccgccgttgaagggatgaaggacgaaggcatctcggatagtcttctcgtgctggtggggttggtcggtcccgtcggcaagctgcggcccgcgatccagcggataacctcgtgggagcggccgcttgtcactggcagcatccttgccgcagcttcgctgatcatatacaatgaatggttcagttacgtgctagctgcgtccctggtgctggccgccggcgtgatggtctgggcgaggcagaggaagataggggagctatgctcggaggtgatcatcgatgcctcttcgtcgtcgtcgtcggacaagacaacgatggatagcatagtggaggcgcagcgaagcctgcagaaagtgcacaggtacatcgtgaccgcgaacgttgccatcctcaggctgtggtcgattgcgctagcaaggtcgccaaagcacacagagacggtgatctggatgctggccgtgtccgcggcggtggtagccgtggtcccgttcaggtacattctgatcgggctggtggcggggagcttcgcgttgaacacgagggtcgcgagggccgtgatgaacccgcagggcggccggcggtggagggagtggtgggagtccatacccgccgtccccgttcggacggtgcacagttgacaaaagtatattttcctctactacgtgaaatgatcgcagaaggaacccgttatagaagcctgtttgttcaggaagaataatgaagtcaataagaaactgtttgttcgcttgtgtctcttttcacctcagccagcaatttcaccttgtaatgaacaccgccatgcacccctgtttaattagtttcattcactaaattttagtttctgtcgcatcaaatgtttggattttagtttaaaactattaaatacagcgattatagtctaattcaaaattaattatac

SEQ ID NO: 81822 - DNA, 1551 bp, Zea Mays
aaccaaaccggagatggaagaaaagctccaatctaacccactttcattcagatccattcaatgtaacgacgaacacagcagggtatactcggatcccagttacgcaacacacccacagggacagaccctggcattccgacactacgggagaaaagagtcttcggggctataagcaaactgaaacggggaacacaagaggaagagaaactagggaaaccgctaacaactagccaactgctctccatccagtagcgatgaggagatcgagcaacgcttatggggccatgctgccagttccacagcctgccttggttggtcaccagttcccttgcaccgcatcctggctatggagctctggttgcacgatcgagttaaccggtcttggcgactccgttggagaggacgggtttctctggtgctgtctgggccacctttgctgcataggaaacaacaggagcagtgatgccgttctctgcgggagccttcaccgccttcacctctgccgtgacaccatctggtacggacggattgggcttcccattagcaggttcctgcggtcgctcaccggtgacagaaacgggggtcctagtgtcccagacctggacgattcaagacagtcgaacccacaggtattatagacagggcaaggtgatgaaatctgcagttgacaaatataagccatgtatttggggctccaaacctacctgcttttggagctgctgctgtttcgacctcttatcctgcatcaacttctggcggctctcgtagaaggcaaagtcgtcgaggatggaagtcttgctgacatgatccttgaatatcttgagcatctgaaggcttgttctcattgttctccaggatgatgtgcttgagaatattgttgggcacgtccttcacaatgtgccacttaacagagaaggagccgttccacttgtcctgttgccaatactctagggttttctcaaaatcaacggcgccagtcatttcagcaacaccaacaaactgcccacttatccttactgagaagaacaagaatatagggcatgcagatccctttgactgagcttcttggtaagcagcatcaagcttcttgtttccgttggttgtgcttgcccacacattgtattttacgctcttgtggatgtcatcctcgctgtacgatttaatgacaaagaactttgcagcatcgtactgaacagggaagtcatctctattgtactttgctctatcaggcacagcactatcattcttgctttcactagaagggagagactgccctttcacagcaatagtgacagtatgaccgtacaatttctggttcttgaaccggccagatctaggacctctgtttaactcaattgttccatcctgactctcattgccataaccatagtatccactacatgccctgggcctgtacctgttatccataccattaccaagaccacatcgaccatatatcctggaatcataaccgttactcccgtagggaagaccagtttttactgaattcccatactgggtgtacggtcgggggctagggtacatcctatt

SEQ ID NO: 81823 - DNA, 1608 bp, Zea Mays
accaaaccggagatggaagaaaagctccaatctaacccactttcattcagatccattcaatgtaacgacgaacacagcagggtatactcggatcccagttacgcaacacacccacagggacagaccctggcattccgacactacgggagaaaagagtcttcggggctataagcaaactgaaacggggaacacaagaggaagagaaactagggaaaccgctaacaactagccaactgctctccatccagtagcgatgaggagatcgagcaacgcttatggggccatgctgccagttccacagcctgccttggttggtcaccagttcccttgcaccgcatcctggctatggagctctggttgcacgatcgagttaaccggtcttggcgactccgttggagaggacgggtttctctggtgctgtctgggccacctttgctgcataggaaacaacaggagcagtgatgccgttctctgcgggagccttcaccgccttcacctctgccgtgacaccatctggtacggacggattgggcttcccattagcaggttcctgcggtcgctcaccggtgacagaaacgggggtcctagtgtcccagacctggacgattcaagacagtcgaacccacaggtattatagacagggcaaggtgatgaaatctgcagttgacaaatataagccatgtatttggggctccaaacctacctgcttttggagctgctgctgtttcgacctcttatcctgcatcaacttctggcggctctcgtagaaggcaaagtcgtcgaggatggaagtcttgctgacatgatccttgaatatcttgagcatctgaaggccttgttcgaggcgtatctacattgttgtagaagaggatgatgtgcttgagaatattgttgggcacgtccttcacaatgtgccacttaacagagaaggagccgttccacttgtcctgttgccaatactctagggttttctcaaaatcaacggcgccagtcatttcagcaacaccaacaaactgcccacttatccttactgagaagaacaagaatatagggcatgcagatccctttgactgagcttcttggtaagcagcatcaagcttcttgtttccgttggttgtgcttgcccacacattgtattttacgctcttgtggatgtcatcctcgctgtacgatttaatgacaaagaactttgcagcatcgtactgaacagggaagtcatctctattgtactttgctctatcaggcacagcactatcattcttgctttcactagaagggagagactgccctttcacagcaatagtgacagtatgaccgtacaatttctggttcttgaaccggccagatctaggacctctgtttaactcaattgttccatcctgactctcattgccataaccatagtatccactacatgccctgggcctgtacctgttatccataccattaccaagaccacatcgaccatatatcctggaatcataaccgttactcccgtagggaagaccagtttttactgaattcccatactgggtgtacggtcgggggctagggtacatcctattgggataggtaggagctgctgatgtagttgtaggtcttctattc

SEQ ID NO: 81824 - DNA, 1078 bp, Zea Mays
ctccctttcctagaataaagagattccctgctgcagttgggataagaaggaaagtcttctaaggactttgctgatgtccatggacttgtcatgcatgcttacaacccaccaaatgcagattcacttgttgatcatcttggtttgcacaaggcattgtgtgttcttatgggatgggattatacaaaagtccctgagaactttaagggctaccaatcattaccttctgaccttgtccaagcaagtagggaggacctcattgtctggccgcctactgttatcattcacaatacttcgactgggaggaagaaagatggtcgcttggagggtttagggaacaaagaaatggataaaaaaatgacagaactagggttttctggtgggaagtcgaagtccttgtatggaaaggaaggacatatgggtttgacacttatcaagtttgcaaacaactcatctggcttgaaggaggctgagcgtcttgctgagtatcttgagaggcaagatcgtggacgtataggttggtcacgcgctcatgccagtcgttctgtagattcagatcagaaccctttgttggtcgagacggataccaggacagctgagaaaaagaggatactttatgggtacctagcaattgcatccgatctggacgaactagactcagattctagaaaaagggcttccctccagagcagaagagaattcgacccaaacgaatgatctcttgtcataaagcccacccccatcagttcattaaatttgcactgaggcgtgcatacctatctctgatcccaatttataaattcatactgctgctgtggagaaaaggtgttaccttgaatataatatctgccgctagttgagttataaccactagttctggaagctgtatttgcactatgtgtattttcttgcacgcgtctatggctcacgatttgactggctatttggaagagatctgtcttcctatttaagtatcgcccgttgcatgattcattgctcttcatttggaagtgatgttgcatagacctcctgattggtatcttttatgtattatagcattccctttctttcttgacttccc

SEQ ID NO: 81825 - DNA, 1154 bp, Zea Mays
aatggatttgctcatgacagctttgttagtgaatacatctatggaagctgagaggataagctgataaagatgatgagaagtaatggtgatatgtggaagttattggatattagaatgaattttcttaaggtcttctaaggactttgctgatgtccatggacttgtcatgcatgcttacaacccaccaaatgcagattcacttgttgatcatcttggtttgcacaaggcattgtgtgttcttatgggatgggattatacaaaagtccctgagaactttaagggctaccaatcattaccttctgaccttgtccaagcaagtagggaggacctcattgtctggccgcctactgttatcattcacaatacttcgactgggaggaagaaagatggtcgcttggagggtttagggaacaaagaaatggataaaaaaatgacagaactagggttttctggtgggaagtcgaagtccttgtatggaaaggaaggacatatgggtttgacacttatcaagtttgcaaacaactcatctggcttgaaggaggctgagcgtcttgctgagtatcttgagaggcaagatcgtggacgtataggttggtcacgcgctcatgccagtcgttctgtagattcagatcagaaccctttgttggtcgagacggataccaggacagctgagaaaaagaggatactttatgggtacctagcaattgcatccgatctggacgaactagactcagattctagaaaaagggcttccctccagagcagaagagaattcgacccaaacgaatgatctcttgtcataaagcccacccccatcagttcattaaatttgcactgaggcgtgcatacctatctctgatcccaatttataaattcatactgctgctgtggagaaaaggtgttaccttgaatataatatctgccgctagttgagttataaccactagttctggaagctgtatttgcactatgtgtattttcttgcacgcgtctatggctcacgatttgactggctatttggaagagatctgtcttcctatttaagtatcgcccgttgcatgattcattgctcttcatttggaagtgatgttgcatagacctcctgattggtatcttttatgtattatagcattccctttctttcttgacttccc

SEQ ID NO: 81826 - DNA, 1186 bp, Zea Mays
aggcacatcaagccggcatctataaagcccgctatgtccctggaaatttaagaggctgaaatgtatcatacagtcttgtggtgaatcagatgtttacaaaattccaacagccataggaaattgttaagtgggcaaatttcacaatatgatatttgaattaggtcttctaaggactttgctgatgtccatggacttgtcatgcatgcttacaacccaccaaatgcagattcacttgttgatcatcttggtttgcacaaggcattgtgtgttcttatgggatgggattatacaaaagtccctgagaactttaagggctaccaatcattaccttctgaccttgtccaagcaagtagggaggacctcattgtctggccgcctactgttatcattcacaatacttcgactgggaggaagaaagatggtcgcttggagggtttagggaacaaagaaatggataaaaaaatgacagaactagggttttctggtgggaagtcgaagtccttgtatggaaaggaaggacatatgggtttgacacttatcaagtttgcaaacaactcatctggcttgaaggaggctgagcgtcttgctgagtatcttgagaggcaagatcgtggacgtataggttggtcacgcgctcatgccagtcgttctgtagattcagatcagaaccctttgttggtcgagacggataccaggacagctgagaaaaagaggatactttatgggtacctagcaattgcatccgatctggacgaactagactcagattctagaaaaagggcttccctccagagcagaagagaattcgacccaaacgaatgatctcttgtcataaagcccacccccatcagttcattaaatttgcactgaggcgtgcatacctatctctgatcccaatttataaattcatactgctgctgtggagaaaaggtgttaccttgaatataatatctgccgctagttgagttataaccactagttctggaagctgtatttgcactatgtgtattttcttgcacgcgtctatggctcacgatttgactggctatttggaagagatctgtcttcctatttaagtatcgcccgttgcatgattcattgctcttcatttggaagtgatgttgcatagacctcctgattggtatcttttatgtattatagcattccctttctttcttgacttccc

SEQ ID NO: 81827 - DNA, 792 bp, Zea Mays
gttttctcatgatacaattaacctcgggctgccagttaagtctcaggattacgtggaggctatgaggattacctgaactagggttttctggtgggaagtcgaagtccttgtatggaaaggaaggacatatgggtttgacacttatcaagtttgcaaacaactcatctggcttgaaggaggctgagcgtcttgctgagtatcttgagaggcaagatcgtggacgtataggttggtcacgcgctcatgccagtcgttctgtagattcagatcagaaccctttgttggtcgagacggataccaggacagctgagaaaaagaggatactttatgggtacctagcaattgcatccgatctggacgaactagactcagattctagaaaaagggcttccctccagagcagaagagaattcgacccaaacgaatgatctcttgtcataaagcccacccccatcagttcattaaatttgcactgaggcgtgcatacctatctctgatcccaatttataaattcatactgctgctgtggagaaaaggtgttaccttgaatataatatctgccgctagttgagttataaccactagttctggaagctgtatttgcactatgtgtattttcttgcacgcgtctatggctcacgatttgactggctatttggaagagatctgtcttcctatttaagtatcgcccgttgcatgattcattgctcttcatttggaagtgatgttgcatagacctcctgattggtatcttttatgtattatagcattccctttctttcttgacttccc

SEQ ID NO: 81828 - DNA, 741 bp, Zea Mays
gtaccactactctccagtctccagaactagggttttctggtgggaagtcgaagtccttgtatggaaaggaaggacatatgggtttgacacttatcaagtttgcaaacaactcatctggcttgaaggaggctgagcgtcttgctgagtatcttgagaggcaagatcgtggacgtataggttggtcacgcgctcatgccagtcgttctgtagattcagatcagaaccctttgttggtcgagacggataccaggacagctgagaaaaagaggatactttatgggtacctagcaattgcatccgatctggacgaactagactcagattctagaaaaagggcttccctccagagcagaagagaattcgacccaaacgaatgatctcttgtcataaagcccacccccatcagttcattaaatttgcactgaggcgtgcatacctatctctgatcccaatttataaattcatactgctgctgtggagaaaaggtgttaccttgaatataatatctgccgctagttgagttataaccactagttctggaagctgtatttgcactatgtgtattttcttgcacgcgtctatggctcacgatttgactggctatttggaagagatctgtcttcctatttaagtatcgcccgttgcatgattcattgctcttcatttggaagtgatgttgcatagacctcctgattggtatcttttatgtattatagcattccctttctttcttgacttccc

SEQ ID NO: 81829 - DNA, 3492 bp, Zea Mays
ctttcggctttccttcgcagttcgcactcctcccgtgcccccccatccccagtcgggccagtccccacctcctccccgcttccaccccctcgcccgtcgcttcctcgtcacgagtcgtcgtctccccttcgccgaccgggacgcggaaacgctcgacgcaagcaaaccctagccaccgagctagcggggagcctggagggatgaagagcctgttcaagagtaagatcaggtggcagcaccggtccaacgaccccgcgtccccggcggcgccgccgccgcagacgtcggggccgccgcccgcgagctccccgtcggggacggcgccggcgccggcgctctccgtctctacgccggtctcgccctcgccctcctccgcggcggcgacgcccacgggcgctgctgctgctgcggcggcggctggagcgggaggggaggactacatatcgtcggaagaggagttccagatgcagcttgccatggcgctgtcggcgtcttccaacagcgactgcgcggggggcctggacggggagcagatcaggaaggccaagctcatgagcctcgatcgcttcgccgcccaccgggacgagacccacaccgcggagttcctctcccgccgatattgggattataactttcttgattaccatgagaaagttattgatggcttctatgacatctttggctcctctattgaatcctctaggcaggggaagatgccatcattagcagatctccaaacaggcataggggacctaggctttgaagtcattgtagtaaaccgagccattgatagtaccttgcaggagatggagcaagtggcacagtgcatcctgttggacttccctgttgccaatattgcactcttagtgcaaagaatagctgagcttgttacagataatatgggtggacctgtcaaagatgctaacgacatgctcacaaggtggctggagaagagtactgagctgagaacatcgctacaaacaagtttgttgcctattggttgcatcaagatagggttatcacgtcaccgtgccctacttttcaagatccttgccgatagtgttgggattccatgcaaacttgtcaaagggagcaattatactggtggtgatgatgacgatgctataaacataattaagatggacaatgaaagatatcttaagttggaaaggcaattcgttaaattctaatcgaaaactcggcctgaatcgaacagctggatcatcaagtactgttgatgctaatgtggatcctactgtattgccacttgaacctaaaggtggccaactgcctttgttcagcagtggtgattggatgtcagacattgattctggatatgaggcagcagaaattgcagcttctactcaaacctcttcgggtgtcacaccatctgtttctgctggaagtgtttttggcagttcatggatgctggttaatcatgaccaatcagatggaccatcaacttctgctggtacatcatcgcagcagaaagttgtacctcaaagcgagcatcagcggaatttaaaccgccttccagatctgcaggaaattccagagtcaaaatacctttttgctgatcttgttccttctggggataataagtctaagaaaacttcagtaccattcaaaggaccagatcataggaacaatgagttgcaaaagcgcagagagaacattgtccctaatgctggaagaccacagcagcggttagttatgaagaattggtctccttacaatgatgtttccaacaacaaacagtacaattatgtcgaggattcgtttgctcgtagaaatgttggtaataatgctgcatcatcatcatcccagatgccacgaccagccgtaagatctaaccttaattctggattgcataatgatgcatcatatcataattatgatagcattatggctggtacctctgccatgaagattacatctacagctgagaccgggaaggttcctgaaagggttctgcgtggtgatttggacaagggtcaaacaaattatagattggaggatcaacatgtcatagttcaaccaccacagggaagacttccatggggtaatcctgcagaaggaagagttccaatgaatagagttcagagtcaagcaaaacaacacttggaaaacatggatgcaaagcaagaccataagaaattgctccctgatccaaaaaaatctccccttgacagattcatggacacatcattgccttcaagaaacatggacatgaggtcacagaggcttgacttcgatgatgtctctgagtgcgaaattccttgggaagatcttgtgattggtgaaaggattggcttaggttcatatggagaggtttaccgtgctgactggaatggaaccgaagtagctgtaaaaaaattcttggatcaagatttttatggcgatgctctggatgagtttaggagtgaagttcgaattatgcgtcggctgcgccatccaaatattgttctctttatgggtgctgttacacgccctccgaacttatctattgtatctgaatatcttccaaggggaagcttgtataagatccttcaccgccctaattgcctaattgatgaaaagcggaggatcaagatggcccttgatgtggccaaaggtatgaattgcctgcacactagcatgcctacaattgttcatcgagatctgaaatctccaaacttgctggttgacaataattggaatgttaaggtttgtgactttggactttcgcggttgaagcacagtacatttttgtcatccaaatctacagctggaacacctgagtggatggcacctgaggttctgcggaatgaacaatcgaatgaaaagtgagtgattttcagatgcattctagctcccatcttattcgggaatcaggatattcgggttattgagcatttccgtggagcgtggatataggattccatgttcctgtcgaatttttgttcttgtggttttgtgctcagaccaaagatttttttgttttctcgtagttggatctgactgcttagtaatttcatgttgtgggatcatgcatctatctagtcaatcttttacaaatattttgtactccatatgcaagactttgttactaagaccgtgtcaagcaggttacctatatggtcacccaaaacactattttgcattatagactgcattgttcgcagagtggaatttgaaataggagatgagatgagagataggatgagtaagctggagatagtgtaaatgtgtaataacccggtaaaacacagttctcttctctctcccttctactctgccatctctctgtctctcctccgtcaccccatcctaacaacacgaacccaagtagcatatatggcgcacagcttgacacatacatgcttgtcacatgtgactatgtgagccttgttcctgttacacttgccagcgatccaacactcgccttcggcaatgaattcttacaagccgccttctccaggagatacacttaccttccttgccaacttcccc

SEQ ID NO: 81830 - DNA, 3480 bp, Zea Mays
cgcagttcgcactcctcccgtgcccccccatccccagtcgggccagtccccacctcctccccgcttccaccccctcgcccgtcgcttcctcgtcacgagtcgtcgtctccccttcgccgaccgggacgcggaaacgctcgacgcaagcaaaccctagccaccgagctagcggggagcctggagggatgaagagcctgttcaagagtaagatcaggtggcagcaccggtccaacgaccccgcgtccccggcggcgccgccgccgcagacgtcggggccgccgcccgcgagctccccgtcggggacggcgccggcgccggcgctctccgtctctacgccggtctcgccctcgccctcctccgcggcggcgacgcccacgggcgctgctgctgctgcggcggcggctggagcgggaggggaggactacatatcgtcggaagaggagttccagatgcagcttgccatggcgctgtcggcgtcttccaacagcgactgcgcggggggcctggacggggagcagatcaggaaggccaagctcatgagcctcgatcgcttcgccgcccaccgggacgagacccacaccgcggagttcctctcccgccgatattgggattataactttcttgattaccatgagaaagttattgatggcttctatgacatctttggctcctctattgaatcctctaggcaggggaagatgccatcattagcagatctccaaacaggcataggggacctaggctttgaagtcattgtagtaaaccgagccattgatagtaccttgcaggagatggagcaagtggcacagtgcatcctgttggacttccctgttgccaatattgcactcttagtgcaaagaatagctgagcttgttacagataatatgggtggacctgtcaaagatgctaacgacatgctcacaaggtggctggagaagagtactgagctgagaacatcgctacaaacaagtttgttgcctattggttgcatcaagatagggttatcacgtcaccgtgccctacttttcaagatccttgccgatagtgttgggattccatgcaaacttgtcaaagggagcaattatactggtggtgatgatgacgatgctataaacataattaagatggacaatgaaagcagatatcttaagttggaaaggcaattcgttaaattctaatcgaaaactcggcctgaatcgaacagctggatcatcaagtactgttgatgctaatgtggatcctactgtattgccacttgaacctaaaggtggccaactgcctttgttcagcagtggtgattggatgtcagacattgattctggatatgaggcagcagaaattgcagcttctactcaaacctcttcgggtgtcacaccatctgtttctgctggaagtgtttttggcagttcatggatgctggttaatcatgaccaatcagatggaccatcaacttctgctggtacatcatcgcagcagaaagttgtacctcaaagcgagcatcagcggaatttaaaccgccttccagatctgcaggaaattccagagtcaaaatacctttttgctgatcttgttccttctggggataataagtctaagaaaacttcagtaccattcaaaggaccagatcataggaacaatgagttgcaaaagcgcagagagaacattgtccctaatgctggaagaccacagcagcggttagttatgaagaattggtctccttacaatgatgtttccaacaacaaacagtacaattatgtcgaggattcgtttgctcgtagaaatgttggtaataatgctgcatcatcatcatcccagatgccacgaccagccgtaagatctaaccttaattctggattgcataatgatgcatcatatcataattatgatagcattatggctggtacctctgccatgaagattacatctacagctgagaccgggaaggttcctgaaagggttctgcgtggtgatttggacaagggtcaaacaaattatagattggaggatcaacatgtcatagttcaaccaccacagggaagacttccatggggtaatcctgcagaaggaagagttccaatgaatagagttcagagtcaagcaaaacaacacttggaaaacatggatgcaaagcaagaccataagaaattgctccctgatccaaaaaaatctccccttgacagattcatggacacatcattgccttcaagaaacatggacatgaggtcacagaggcttgacttcgatgatgtctctgagtgcgaaattccttgggaagatcttgtgattggtgaaaggattggcttaggttcatatggagaggtttaccgtgctgactggaatggaaccgaagtagctgtaaaaaaattcttggatcaagatttttatggcgatgctctggatgagtttaggagtgaagttcgaattatgcgtcggctgcgccatccaaatattgttctctttatgggtgctgttacacgccctccgaacttatctattgtatctgaatatcttccaaggggaagcttgtataagatccttcaccgccctaattgcctaattgatgaaaagcggaggatcaagatggcccttgatgtggccaaaggtatgaattgcctgcacactagcatgcctacaattgttcatcgagatctgaaatctccaaacttgctggttgacaataattggaatgttaaggtttgtgactttggactttcgcggttgaagcacagtacatttttgtcatccaaatctacagctggaacacctgagtggatggcacctgaggttctgcggaatgaacaatcgaatgaaaagtgagtgattttcagatgcattctagctcccatcttattcgggaatcaggatattcgggttattgagcatttccgtggagcgtggatataggattccatgttcctgtcgaatttttgttcttgtggttttgtgctcagaccaaagatttttttgttttctcgtagttggatctgactgcttagtaatttcatgttgtgggatcatgcatctatctagtcaatcttttacaaatattttgtactccatatgcaagactttgttactaagaccgtgtcaagcaggttacctatatggtcacccaaaacactattttgcattatagactgcattgttcgcagagtggaatttgaaataggagatgagatgagagataggatgagtaagctggagatagtgtaaatgtgtaataacccggtaaaacacagttctcttctctctcccttctactctgccatctctctgtctctcctccgtcaccccatcctaacaacacgaacccaagtagcatatatggcgcacagcttgacacatacatgcttgtcacatgtgactatgtgagccttgttcctgttacacttgccagcgatccaacactcgccttcggcaatgaattcttacaagccgccttctccaggagatacacttaccttccttgccaacttcccc

SEQ ID NO: 81831 - DNA, 3499 bp, Zea Mays
cccagtcgggccagtccccacctcctccccgcttccaccccctcgcccgtcgcttcctcgtcacgagtcgtcgtctccccttcgccgaccgggacgcggaaacgctcgacgcaagcaaaccctagccaccgagctagcggggagcctggagggatgaagagcctgttcaagagtaagatcaggtggcagcaccggtccaacgaccccgcgtccccggcggcgccgccgccgcagacgtcggggccgccgcccgcgagctccccgtcggggacggcgccggcgccggcgctctccgtctctacgccggtctcgccctcgccctcctccgcggcggcgacgcccacgggcgctgctgctgctgcggcggcggctggagcgggaggggaggactacatatcgtcggaagaggagttccagatgcagcttgccatggcgctgtcggcgtcttccaacagcgactgcgcggggggcctggacggggagcagatcaggaaggccaagctcatgagcctcgatcgcttcgccgcccaccgggacgagacccacaccgcggagttcctctcccgccgatattgggattataactttcttgattaccatgagaaagttattgatggcttctatgacatctttggctcctctattgaatcctctaggcaggggaagatgccatcattagcagatctccaaacaggcataggggacctaggctttgaagtcattgtagtaaaccgagccattgatagtaccttgcaggagatggagcaagtggcacagtgcatcctgttggacttccctgttgccaatattgcactcttagtgcaaagaatagctgagcttgttacagataatatgggtggacctgtcaaagatgctaacgacatgctcacaaggtggctggagaagagtactgagctgagaacatcgctacaaacaagtttgttgcctattggttgcatcaagatagggttatcacgtcaccgtgccctacttttcaagatccttgccgatagtgttgggattccatgcaaacttgtcaaagggagcaattatactggtggtgatgatgacgatgctataaacataattaagatggacaatgaaagggagtttttggttgatctgatggctgctcctggtgctcttattccagcagatatcttaagttggaaaggcaattcgttaaattctaatcgaaaactcggcctgaatcgaacagctggatcatcaagtactgttgatgctaatgtggatcctactgtattgccacttgaacctaaaggtggccaactgcctttgttcagcagtggtgattggatgtcagacattgattctggatatgaggcagcagaaattgcagcttctactcaaacctcttcgggtgtcacaccatctgtttctgctggaagtgtttttggcagttcatggatgctggttaatcatgaccaatcagatggaccatcaacttctgctggtacatcatcgcagcagaaagttgtacctcaaagcgagcatcagcggaatttaaaccgccttccagatctgcaggaaattccagagtcaaaatacctttttgctgatcttgttccttctggggataataagtctaagaaaacttcagtaccattcaaaggaccagatcataggaacaatgagttgcaaaagcgcagagagaacattgtccctaatgctggaagaccacagcagcggttagttatgaagaattggtctccttacaatgatgtttccaacaacaaacagtacaattatgtcgaggattcgtttgctcgtagaaatgttggtaataatgctgcatcatcatcatcccagatgccacgaccagccgtaagatctaaccttaattctggattgcataatgatgcatcatatcataattatgatagcattatggctggtacctctgccatgaagattacatctacagctgagaccgggaaggttcctgaaagggttctgcgtggtgatttggacaagggtcaaacaaattatagattggaggatcaacatgtcatagttcaaccaccacagggaagacttccatggggtaatcctgcagaaggaagagttccaatgaatagagttcagagtcaagcaaaacaacacttggaaaacatggatgcaaagcaagaccataagaaattgctccctgatccaaaaaaatctccccttgacagattcatggacacatcattgccttcaagaaacatggacatgaggtcacagaggcttgacttcgatgatgtctctgagtgcgaaattccttgggaagatcttgtgattggtgaaaggattggcttaggttcatatggagaggtttaccgtgctgactggaatggaaccgaagtagctgtaaaaaaattcttggatcaagatttttatggcgatgctctggatgagtttaggagtgaagtaggttcgaattatgcgtcggctgcgccatccaaatattgttctctttatgggtgctgttacacgccctccgaacttatctattgtatctgaatatcttccaaggggaagcttgtataagatccttcaccgccctaattgcctaattgatgaaaagcggaggatcaagatggcccttgatgtggccaaaggtatgaattgcctgcacactagcatgcctacaattgttcatcgagatctgaaatctccaaacttgctggttgacaataattggaatgttaaggtttgtgactttggactttcgcggttgaagcacagtacatttttgtcatccaaatctacagctggaacacctgagtggatggcacctgaggttctgcggaatgaacaatcgaatgaaaagtgagtgattttcagatgcattctagctcccatcttattcgggaatcaggatattcgggttattgagcatttccgtggagcgtggatataggattccatgttcctgtcgaatttttgttcttgtggttttgtgctcagaccaaagatttttttgttttctcgtagttggatctgactgcttagtaatttcatgttgtgggatcatgcatctatctagtcaatcttttacaaatattttgtactccatatgcaagactttgttactaagaccgtgtcaagcaggttacctatatggtcacccaaaacactattttgcattatagactgcattgttcgcagagtggaatttgaaataggagatgagatgagagataggatgagtaagctggagatagtgtaaatgtgtaataacccggtaaaacacagttctcttctctctcccttctactctgccatctctctgtctctcctccgtcaccccatcctaacaacacgaacccaagtagcatatatggcgcacagcttgacacatacatgcttgtcacatgtgactatgtgagccttgttcctgttacacttgccagcgatccaacactcgccttcggcaatgaattcttacaagccgccttctccaggagatacacttaccttccttgccaacttcccc

SEQ ID NO: 81832 - DNA, 3438 bp, Zea Mays
tccccacctcctccccgcttccaccccctcgcccgtcgcttcctcgtcacgagtcgtcgtctccccttcgccgaccgggacgcggaaacgctcgacgcaagcaaaccctagccaccgagctagcggggagcctggagggatgaagagcctgttcaagagtaagatcaggtggcagcaccggtccaacgaccccgcgtccccggcggcgccgccgccgcagacgtcggggccgccgcccgcgagctccccgtcggggacggcgccggcgccggcgctctccgtctctacgccggtctcgccctcgccctcctccgcggcggcgacgcccacgggcgctgctgctgctgcggcggcggctggagcgggaggggaggactacatatcgtcggaagaggagttccagatgcagcttgccatggcgctgtcggcgtcttccaacagcgactgcgcggggggcctggacggggagcagatcaggaaggccaagctcatgagcctcgatcgcttcgccgcccaccgggacgagacccacaccgcggagttcctctcccgccgatattgggattataactttcttgattaccatgagaaagttattgatggcttctatgacatctttggctcctctattgaatcctctaggcaggggaagatgccatcattagcagatctccaaacaggcataggggacctaggctttgaagtcattgtagtaaaccgagccattgatagtaccttgcaggagatggagcaagtggcacagtgcatcctgttggacttccctgttgccaatattgcactcttagtgcaaagaatagctgagcttgttacagataatatgggtggacctgtcaaagatgctaacgacatgctcacaaggtggctggagaagagtactgagctgagaacatcgctacaaacaagtttgttgcctattggttgcatcaagatagggttatcacgtcaccgtgccctacttttcaagatccttgccgatagtgttgggattccatgcaaacttgtcaaagggagcaattatactggtggtgatgatgacgatgctataaacataattaagatggacaatgaaagcagatatcttaagttggaaaggcaattcgttaaattctaatcgaaaactcggcctgaatcgaacagctggatcatcaagtactgttgatgctaatgtggatcctactgtattgccacttgaacctaaaggtggccaactgcctttgttcagcagtggtgattggatgtcagacattgattctggatatgaggcagcagaaattgcagcttctactcaaacctcttcgggtgtcacaccatctgtttctgctggaagtgtttttggcagttcatggatgctggttaatcatgaccaatcagatggaccatcaacttctgctggtacatcatcgcagcagaaagttgtacctcaaagcgagcatcagcggaatttaaaccgccttccagatctgcaggaaattccagagtcaaaatacctttttgctgatcttgttccttctggggataataagtctaagaaaacttcagtaccattcaaaggaccagatcataggaacaatgagttgcaaaagcgcagagagaacattgtccctaatgctggaagaccacagcagcggttagttatgaagaattggtctccttacaatgatgtttccaacaacaaacagtacaattatgtcgaggattcgtttgctcgtagaaatgttggtaataatgctgcatcatcatcatcccagatgccacgaccagccgtaagatctaaccttaattctggattgcataatgatgcatcatatcataattatgatagcattatggctggtacctctgccatgaagattacatctacagctgagaccgggaaggttcctgaaagggttctgcgtggtgatttggacaagggtcaaacaaattatagattggaggatcaacatgtcatagttcaaccaccacagggaagacttccatggggtaatcctgcagaaggaagagttccaatgaatagagttcagagtcaagcaaaacaacacttggaaaacatggatgcaaagcaagaccataagaaattgctccctgatccaaaaaaatctccccttgacagattcatggacacatcattgccttcaagaaacatggacatgaggtcacagaggcttgacttcgatgatgtctctgagtgcgaaattccttgggaagatcttgtgattggtgaaaggattggcttaggttcatatggagaggtttaccgtgctgactggaatggaaccgaagtagctgtaaaaaaattcttggatcaagatttttatggcgatgctctggatgagtttaggagtgaagtaggttcgaattatgcgtcggctgcgccatccaaatattgttctctttatgggtgctgttacacgccctccgaacttatctattgtatctgaatatcttccaaggggaagcttgtataagatccttcaccgccctaattgcctaattgatgaaaagcggaggatcaagatggcccttgatgtggccaaaggtatgaattgcctgcacactagcatgcctacaattgttcatcgagatctgaaatctccaaacttgctggttgacaataattggaatgttaaggtttgtgactttggactttcgcggttgaagcacagtacatttttgtcatccaaatctacagctggaacacctgagtggatggcacctgaggttctgcggaatgaacaatcgaatgaaaagtgagtgattttcagatgcattctagctcccatcttattcgggaatcaggatattcgggttattgagcatttccgtggagcgtggatataggattccatgttcctgtcgaatttttgttcttgtggttttgtgctcagaccaaagatttttttgttttctcgtagttggatctgactgcttagtaatttcatgttgtgggatcatgcatctatctagtcaatcttttacaaatattttgtactccatatgcaagactttgttactaagaccgtgtcaagcaggttacctatatggtcacccaaaacactattttgcattatagactgcattgttcgcagagtggaatttgaaataggagatgagatgagagataggatgagtaagctggagatagtgtaaatgtgtaataacccggtaaaacacagttctcttctctctcccttctactctgccatctctctgtctctcctccgtcaccccatcctaacaacacgaacccaagtagcatatatggcgcacagcttgacacatacatgcttgtcacatgtgactatgtgagccttgttcctgttacacttgccagcgatccaacactcgccttcggcaatgaattcttacaagccgccttctccaggagatacacttaccttccttgccaacttcccc

SEQ ID NO: 81833 - DNA, 3470 bp, Zea Mays
cacctcctccccgcttccaccccctcgcccgtcgcttcctcgtcacgagtcgtcgtctccccttcgccgaccgggacgcggaaacgctcgacgcaagcaaaccctagccaccgagctagcggggagcctggagggatgaagagcctgttcaagagtaagatcaggtggcagcaccggtccaacgaccccgcgtccccggcggcgccgccgccgcagacgtcggggccgccgcccgcgagctccccgtcggggacggcgccggcgccggcgctctccgtctctacgccggtctcgccctcgccctcctccgcggcggcgacgcccacgggcgctgctgctgctgcggcggcggctggagcgggaggggaggactacatatcgtcggaagaggagttccagatgcagcttgccatggcgctgtcggcgtcttccaacagcgactgcgcggggggcctggacggggagcagatcaggaaggccaagctcatgagcctcgatcgcttcgccgcccaccgggacgagacccacaccgcggagttcctctcccgccgatattgggattataactttcttgattaccatgagaaagttattgatggcttctatgacatctttggctcctctattgaatcctctaggcaggggaagatgccatcattagcagatctccaaacaggcataggggacctaggctttgaagtcattgtagtaaaccgagccattgatagtaccttgcaggagatggagcaagtggcacagtgcatcctgttggacttccctgttgccaatattgcactcttagtgcaaagaatagctgagcttgttacagataatatgggtggacctgtcaaagatgctaacgacatgctcacaaggtggctggagaagagtactgagctgagaacatcgctacaaacaagtttgttgcctattggttgcatcaagatagggttatcacgtcaccgtgccctacttttcaagatccttgccgatagtgttgggattccatgcaaacttgtcaaagggagcaattatactggtggtgatgatgacgatgctataaacataattaagatggacaatgaaagggagtttttggttgatctgatggctgctcctggtgctcttattccagcagatatcttaagttggaaaggcaattcgttaaattctaatcgaaaactcggcctgaatcgaacagctggatcatcaagtactgttgatgctaatgtggatcctactgtattgccacttgaacctaaaggtggccaactgcctttgttcagcagtggtgattggatgtcagacattgattctggatatgaggcagcagaaattgcagcttctactcaaacctcttcgggtgtcacaccatctgtttctgctggaagtgtttttggcagttcatggatgctggttaatcatgaccaatcagatggaccatcaacttctgctggtacatcatcgcagcagaaagttgtacctcaaagcgagcatcagcggaatttaaaccgccttccagatctgcaggaaattccagagtcaaaatacctttttgctgatcttgttccttctggggataataagtctaagaaaacttcagtaccattcaaaggaccagatcataggaacaatgagttgcaaaagcgcagagagaacattgtccctaatgctggaagaccacagcagcggttagttatgaagaattggtctccttacaatgatgtttccaacaacaaacagtacaattatgtcgaggattcgtttgctcgtagaaatgttggtaataatgctgcatcatcatcatcccagatgccacgaccagccgtaagatctaaccttaattctggattgcataatgatgcatcatatcataattatgatagcattatggctggtacctctgccatgaagattacatctacagctgagaccgggaaggttcctgaaagggttctgcgtggtgatttggacaagggtcaaacaaattatagattggaggatcaacatgtcatagttcaaccaccacagggaagacttccatggggtaatcctgcagaaggaagagttccaatgaatagagttcagagtcaagcaaaacaacacttggaaaacatggatgcaaagcaagaccataagaaattgctccctgatccaaaaaaatctccccttgacagattcatggacacatcattgccttcaagaaacatggacatgaggtcacagaggcttgacttcgatgatgtctctgagtgcgaaattccttgggaagatcttgtgattggtgaaaggattggcttaggttcatatggagaggtttaccgtgctgactggaatggaaccgaagtagctgtaaaaaaattcttggatcaagatttttatggcgatgctctggatgagtttaggagtgaagttcgaattatgcgtcggctgcgccatccaaatattgttctctttatgggtgctgttacacgccctccgaacttatctattgtatctgaatatcttccaaggggaagcttgtataagatccttcaccgccctaattgcctaattgatgaaaagcggaggatcaagatggcccttgatgtggtatgaattgcctgcacactagcatgcctacaattgttcatcgagatctgaaatctccaaacttgctggttgacaataattggaatgttaaggtttgtgactttggactttcgcggttgaagcacagtacatttttgtcatccaaatctacagctggaacacctgagtggatggcacctgaggttctgcggaatgaacaatcgaatgaaaagtgagtgattttcagatgcattctagctcccatcttattcgggaatcaggatattcgggttattgagcatttccgtggagcgtggatataggattccatgttcctgtcgaatttttgttcttgtggttttgtgctcagaccaaagatttttttgttttctcgtagttggatctgactgcttagtaatttcatgttgtgggatcatgcatctatctagtcaatcttttacaaatattttgtactccatatgcaagactttgttactaagaccgtgtcaagcaggttacctatatggtcacccaaaacactattttgcattatagactgcattgttcgcagagtggaatttgaaataggagatgagatgagagataggatgagtaagctggagatagtgtaaatgtgtaataacccggtaaaacacagttctcttctctctcccttctactctgccatctctctgtctctcctccgtcaccccatcctaacaacacgaacccaagtagcatatatggcgcacagcttgacacatacatgcttgtcacatgtgactatgtgagccttgttcctgttacacttgccagcgatccaacactcgccttcggcaatgaattcttacaagccgccttctccaggagatacacttaccttccttgccaacttcccc

SEQ ID NO: 81834 - DNA, 2579 bp, Zea Mays
gtattcaaattttattctacaaataatatcgtgtatagtgtaaaataatattttaggtgatacatgtaagcgctggtggacacgattcacggacgccacccggaccctattaaacccgcctctcagccgaccgtttcgagtccgtcgtcgtctagctcccatccgacctcctgcattccccactagtcccaactcccaaccaccgccagccgtccgctctccgcaagcgcgaccttccggccagatccgccccgttgcgccgacgagcggtccttctgcctagtttctccgcgcagcgagcggcgggttcctcggagattcccgctggccgcggggatccatttgtgactgctcgcgttgcgcgtggatctggtttgggacggaggagtgaaacgcgacggtgatcgtgcgaggtggggacgccatcagtgctctgtctggggttcggtctgttcttcgactgcagatctggaagggtttcgtgggatccgtcgctacgatctgtcccagtcagagcacctgcatcatctcgggtcgggccatggagactctgctcatctcggaggagcgcaaccaccagctccaccacttctcgggtcgccggaagaaggcgttagcagcgtcgcctcagtccacgcgcagctaccatgctggcaactgccgggcgttccactccggcatcaccgtcggcatcctgccatccccgcccgcgcagagggttgcactgacccgctcctctcctgagcccaagacaccgaaacatcagcttcaccatgggaaaaagcgcagccgagcaatctctataaacctttcgacgtcccctccctctcgccctgagctctgggctggcccggggttctgcaattcgccgcctcccagctccctcccgatccccaagttctcactccaccagaagcgcagtgtctcacttgaatttccacctgctgaccggtcagacgacgaagaggtgcccgtgcatgccaagtcggcaccttcatcgccgactgcaggctcaggtgttaccttcttcagtggtactgatgctaccattgccaccgagaatctgaggaggatccttaacctcaaaattgaggataactgaatggcggttgggtagttctgtgtacatagtttaactacaactgacctttgtagtatgtatagggtaaccggggataaccactgtgtacctggcggtggttccttctgcagcagtactgtaggcggttagcaagcacagcgaggagtttaggaagtttggaaatgcagtgagaaggatgttgtggtaatggagatttggtggatttgcatatcactgcagtttcagagtcacctttgttccttgtaccttgtagttgcctattagtagtccaatactccatttagatgttatagtatttgcatcttccctgcccatcattaaccagtagccacagccttcatatcataatccttgtcatgtagttcatctcaggcagggcattgtaggctagctagtactgttcaagttctgtcatatatgtagtcttctgtaggattgctgcatcccttgaaacttgcattctgtatcacattgcatcctgctgactcacctcccttcataacatctccctgtgttatgcaaagcgcacaaggatctcccctctggcacttctgttttttggaatgaagatgctcagaggagttgttatgaagtcccgatccaatgttctttgtcctccatgtctgtactgactttagctattcatctcctttgtcaccccagtcccattgcatgtgccatccaatccgtttcgaaccattcatctcaaaattgcatttagtggtggttttcccttcgtcttattatcttttgtgcctcatgatcctggagcatgcccaggattctagtctcctccatgtattctcataaaggacttcacgtatcagagatctgcgaatgctcaaccctgaatatggtttgcttgtccgatgccacttcgcctcatccatacctggagttcagaattggcgaagcacctatcacttagctatctgtttcatagtcagtattgtgtcagactgttgtttttgtgcaatatttgattggctactagtctgtttgtgttactgttcaagtttatggtagtgatcatatatggcggccggagtgttccacgccgatgctgtggcattctgttgctttcaagtaaaactagtcaatgttatgtaccttcatgttattttttggtcctgtttctgtgacatgtttgaagttccatgttatcgcactgtatttgctcccaagatcttttttgtttggtccgcttttctagtggtcctaatcatcgtgtgacaaatggttgttactatacttaagggtctcctttttaaggataaatatcaacgttgcgaattgcgatgcttggtgatggatgcatactttgtgcggggaagatggctatggttggtacttgttgagatgattgtggagcctgtttgagaacctgtagttgattagtgttgtggagataaaaataccaatatgcttgtcagtaactcagcatctgttgctttgttcttttcactgaaagggctgg

SEQ ID NO: 81835 - DNA, 222 bp, Zea Mays
gttgcggttgcgggtctgatcagtcgccccagcccgttgccgggatgctcgaaacgtcgcaccaaccgggagggaaggtgtacttccccgcgcctgcgtcctggagctgactgtcgtcgttggtcaacgactggtcggcctgcgcgtctccctgtgcagctgcagccccttcctcgccgtcctgcttcggcgtctcctcaacatctgcttgggggttgctga

SEQ ID NO: 81836 - DNA, 578 bp, Zea Mays
ctgaaattcactcccgtgaggtatcgaactcaagacctgaggagtacttctcggacaacctaactaactcagggtgaggcaatgaagagtggggagagtggtagggaatggcaacttcagatcccggaggaatcccctgtacatactgctctcttcttggtcttggaggagataacctgagactccctcaggttaagccccaacgcagcgagccctcgcaagaggagctattcgtctgcacgtgcccatgaactactcctgcaactattctccacactaacactggtgagctcatccgggtgggttctccatcaagttgagatctagtgatagctaactacataagtacgctactaccaccaccgtccaccattagtttctcatttctgcaaaagcttgacagcgtgctcaagactggagatggggtgttgtgccttgctacttgacccctgttagaccaactactagaatggagattggtggactaaatgcttaaatttgtaaagtaatgtagtgtaatcctgatcctgaatcatcggtttcactcgcgctatacaattctgatgtggttatcttaa

SEQ ID NO: 81837 - DNA, 181 bp, Zea Mays
tcgtcaaagctgcgggcgtggtaccgatgaggatcctttccccagctgatcgactatgattatactgtgcgcaactgcgacgcctcctctgcggaggagggtcccaagccagaaatctgatccatcatgtgtgctagtttctgcatcgattgttgtaaaacatttggaatttgaaaggtac

SEQ ID NO: 81838 - DNA, 1108 bp, Zea Mays
ctctcctagcttgatatccatctggggctacgccgaagcgagtgctgcagctgatgggggtgggaggactcaccatatctcatgtcaaaagccatctgcagatgtacaggaacatgagaaatgatcttggaatgcaagggacggaggatcaggagcacgtatacgtaggtggaggaggcatgcataccaatatacagcagcagcgggaccatgggtgtggcgatgccccctgctgcatctgctgccgccactcgccaaataagcctgcaaaggaggaggaggaggcgacgctgttccaacgccaactgaaaaggtcgaggacggagacgaggcgtgggcgtggccagcgggaggagatcgatgatgggagcgcgagccccaagaggcggctgctgctgctgcgaggagggcgaggccgcccaggaatatgtgagagcgacggctcaggctcacccagcagcggcacgctcgcaagtggctacgacaactacatgcgcatgatgcaagcggccatgggcgtggctgccgctgccggcgctgctgctgctgctgctcctcatcatcatcatcatcatcacgcggagacggtggagcccggtcgagggccgagaataaagcagcacttggcgcggcccggcgcagacggcggcgaacacgctcctcccagcagcaggcagctcttcacgttcttgggcttcgtggtggcgccggggccgccgcctcctccctgctgcagccgtgaccaccctttcgaggctgagaggctaaatttgcacgcccacagcctggctcccgagcaagccaggcgacacaaacacggcctccagacaccgcccaccaaggccgccgtggcccaacaagtcggtggcgatccctgctggtcgtcggcggccgcttccgaacacgacgaccaccaccacgaccgcgaccgcgacggctgctggctctcgctgtcccttgcgctggagacgagaagcagccgcagcgccgacgagggcggccggctctcgccgacggggagccggatcagcctcgacctatccttgtccacgatatagatcccatccgtccatgttggtgagtggaatagtttgttgggccttgcggc

SEQ ID NO: 81839 - DNA, 1912 bp, Zea Mays
ttcctgcaaaagatcaaagagtagtaaccaagtcataaatcccagcaaaggaatcatcatcaatgtgacacttgaaggtaagatctatgatcaaacatatgacaatagataaaaaggaggcatcaggatactgagagtttcaaaaaaaaaaaaactccacgtcatgtcaggcaaaccaatgaatttcctgtagcaggtacttctcctgttttaatgtctggccatgtttgactgtttgtgatcccccatatgtttaccctagtcagatcataaacataagtatgttccatagagctatttagtgtcatgtcaaatttgtcaacacatccacatgatccagctttcacatgcctagaaacttggcaacatactacttgagattcaaagatggtatgtctacctgccatggtctctcccagtcaagtggcataggccaagcaccgagccacgctcctagcacagctccatggcaaggtgcagagatcatgtagttctcaacatcagttggcgtgaaataactggcatgtacaaagacacagtgaaatatcatgccgcagctgctggacgacacaaaacacaagaaatatatgtccactggatgaacctctaccgttcaaaagtttacagagtccagaacctacatggagtgagaaagcacatcctgccaatcgatcctggatgctccaaagacacatgctgcgggaacaaactgaaagatgataaaattagtctcgcggtctcgcctgcctcaattgctgaagttatgcagtgaacacggtggtaacttttgagtacaggattatgagcacaggacaatactggttgttggagtctctgttgcttagtttcgtacttaccgtaaacagggacatgacaagcgaccagtaaatagtagctatccagtacctacaaacgcacaattcaatcgattttggatgtaaatttaaatataatggtttgcgttactaaaatcagatgcagtagagaattatagagcaaagcactacagacaccaattctagtcatcattcctactcattaagtaaaagataggctaaatcctttctgatttaacttacttgactccaacaggtgccccaagaatgattgctccaaatgcattaaggaacgctcctggcatggatcggaaaaagatgtgcagtaagatcaaagaaataaaaggagtaaaacaaacagaatctcgataactcatactactggttccattaaagagaaccggcatttttactggtagtccaacatgctgataataccagggactggattaattgtatgccagtataatttcgatgcttatgagaaattataatggcatcaggcctattaggttagaagtagtggcgtttgtcagaatcatcaaatttataatggcaaggatctaattaaccccaacactaactacagatcagatctgcagcatggagctgttcttttggggcttcatactcttagagcaatgaatcaaagtaagcatgagtcttagctaagttggtagctaaggcgtgggttcgatcctcacattggagtttatctctggttgcctcccaggttgtgtctgggtctagatatagggtatacacacgcgtgcacattcggtattgcgtgtttccacgcactataggtctaggcctagtgtgtgtaatggacgcgcacacatgtgtggtgtgtagtggtgtgagttcgcggcgtccttgtactctctcaaaaaaaagtaagcctgcaatcaaagtcaagatatagaacaaacccacgggcaagccgatcaatcctcttgcaacagccctgaaaaactgaaagtaaatagaaccccatgaccacatcgctgaatcaaaaatctaaagcgacaattaattgaacaggttgcacacgcagcataccgagcaacttttag

SEQ ID NO: 81840 - DNA, 1452 bp, Zea Mays
gtttgtgccggatgcgggatgaagacgatcaaaaaaaaaaagtggcgtgataacgttaaattatgtttgttaagttcaactgtaattagatacaacactaaaaatggatattggcctatttaaacttgttatagcaggtactatagtgtaaatcattaccattattatttacattacattttgtaaaccaaacaacacctaagttagtttgtgccggaggcggactatataaagtctctgtcaagcaaatccacaatgcgacatggatgacaaagacctcaccgagtaagttcacgagtcgggacgaacgatcaagttttcaccaagtgtacccgcgaggatagaagtatagaaccctagcccgcatcaaaggcgtgccaagtagttgccatcagggcatgtaccgtgtgccccccgcgtatggactgagcccaccaccaccaccactacgtagtggggctaatcaagcccggacgtttttccccgcgcgtcgtcgttcgggcgccgaaggcaccacagggcgcggcgccatgccaactgagacggtgacccccacggtcggtgtcaccatgaccagggcaggatccatggtcggcccacccgtctcggccgggacgttagagcgaactgctgcatcgccacgacacgacgggccacccaccaacgctatgactttcgcccctccgaaagcggtggaagatggtgtggaggacgcaccctctgagtcagaagaggaggcgattccctcgcccaactcgatagggtgcaaggctttcttgcctttcttctgcactcgaaggcgcctctggcgcccccaaggtatcattctcactgaacggcgaccccctcagggagcggtggaagactgggcactagaagtttgatcccctgcaggagccacgaccgaaccacctagaggcagcaagccaagctccctttcggtagaatatgagttcctactgtaaagtcccccttgagttataaaagggtagggcaaccttctttctagacacaagcacacaagttataacacaatctactgcaattctacaaccaacactacacttgactagggccttggtctaaactagtataaccacgtgtcttagatttctcaccgagtcctaatgattcaccatttggagtgagtccgcgcttgcatcccataccgaacacaaatctcattgtccccgagtttctaaaaccacaacaataccataatgcaacgtttaacaattaaattcatcattcacagatagagaaagacgaggaacagagaactcacaatcctgtttactgttcatagacgtggttgtgtggagccgtcgtggagacatgagaggtgtagctgtcagctagccggcgaggggcagaggcactgcacggatccatggcacagaacatggaggcggagtgcggatgcgccgccatgcccaggaccagagctcgtcg

SEQ ID NO: 81841 - DNA, 2992 bp, Zea Mays
gcgcgaactccgcaggactagacaggagacaggatgcgacgtgcccgtgcgtgagcgtggcgccgtccaccagactgtctagttccggtcctcaccccgcccgtccatttccgacttggccgttcctcctccacgccccggcgcgcgttccggcaaaacgggaggcgaggccatccgcgcgcgcgcgatggcgccggacccgtgcggcgacctcgtggtgacgccgaagacggcggccaaggacgaggcgtcctgctccgtgcccacgccgcccaaggtcactcccgacgaggtgcgcgcggtggcgcgcaagttcgcggaccagcctatccaggagacggagcccgacgtttgggccgtcctcaccgccatctccaagaaggcccgcctccggccccaggggatgaacatacttttgagtgctgacgagcactgcctaggacgatctgttgaggagcggtttcggatttttgcccagcagatcagcgggatgcattgcaaaatatacagggacactgtcttaggggagctgaaccgccacgagcctgtgcctgttttcctcaaggacacaagctcaaatggcacattcatcaactggaaaaggctcaagaaaaattcatccccggtcaagcttaatcatggcgacattatatcattatcatcacctcctcatgacgacaattcctttgtatttgtctaccgcgaagttaatgcaatcagtcgtgtagagaatggggctcccattcttaaaaggaagtcagtggagggtggttctggaagcaagaggctaaagggtcttggtattggttctcctgatggtcctgtttcactagatgatgtccgaagactagaaaaatctaatgctgatctcagggaacaacttgaggcacatgttgtgacaattgagactttgagggctgaaataaaaacagcccaagtgcagcatggaaaggaacttgaggagctaagagaaactatatcgagttcttatctggatcaaactaaatctcttcggtcagcacttgaggagaaacagaagcaaatagattcactcagtacatcaaatacagagttacagaactctataaaagatctggatgaaaggcttaatgcatctaaacaatcacgtgcagatgctgacgagataatttcaagccagaaaggaatgatatgtgagcttgagggacagctaaatgaggagagaaatttaagaagagaagagcgtgataaggctgcacatgacatgaaatctgcattgcataaagtgcaagccgaggctcaagaagaaattaagaaacaggcggagtcttaccttaggcaacaaagggagcagaaagaagttattagcaagcttcaggaatcagaaaaagaaacccgtttgtttgtggaaactttgaggtccaagctggaagatgctcgagataatcttgtaacatccgagaaaagagtaagagagctggaagctcagcttcaggacgagcagatggtatcagccaataatcgaaagaagacagaaaatctggaagctgaattgagaaaactgaagaaggaactcgacaatgagaaggctgctcgagaagaagcatgggcaaaggtttcagctcttgagcttgaaatagctgcaacgattagagatctatcaattgagaaacagaggtatcagggagctagagaacggattattctacgggagactcagctgcgtgctttctattcaaccacagaagaaatctcttctctgtttgcgaaacagcaggaacagctgaaagctatgcagagaactttggaggatgaagagaactatgagagcaccttaatgggtgtggatcttaataaagtacctctaaccactgataatgctggtatgaagccagtagactgctcaaaaaatacagtgggagcttcaagtgcttcaccagaaaatactcagcactcaaggtctagaatgcaccagtccagaaaggtcagaggggagattgaagtcaggttttcatggcaatccggtttctacagctcctgagagagaggttacagataccgagcaagttcccgagacagatagccaagctggtaatgctggttgcgatgaccaaagatgtgacaacacgggaggagagactatgccactagaagatgatatgctgctcccagataacgaggaacctactgcattgctgaaagatgtagggcagccacaagcaaatgtggttcctattccaatccccggtgatggcgttgggcactgtttcgaagaaaaacatgagggtgcctgctctgagagcaaacgggaggacacacatgctggagccatcagaacggctgatctgttggcctcagaagtcgctgggagctgggcagtggaaacagctccgtctgtcaatggggagaacgaatctccaaggagcttgggcgatgctacagagcacgatgaagctggaggcagcgtggcaggcgatgctttggtaactctggtgaactcagagggccaggcggctgggagccagaacaatgttgagcgtggcagctccaaaataacccatcatcatcatcatcatcgtcatcaccatcgtgttcttagtgccatgattggaattgttgatcctgagttcaggaagcaaatgtccggcagaagcggagttggaaacgaggaacccatgtctgacgccgagacgggtgagggcatcgaggaaggcgattcagattcaggttcagacggcagtgacagcgaggaggctatggttgaggattctgtcgtttagcttaaacagaagtgactgctcactgtaaatatacctcaattcgttttgtgtacctttcgttgtatcatcatgcgtagcgtaagcccctcgtgtgcgtttgattattttattcgttaagtgtcctcagcagctcgtggtgcatgttgtacgaaatcgaggccttttggtcttcaacacaaataaatatatgtactcacttggtttacaattataaaccgttttggtttttttat

SEQ ID NO: 81842 - DNA, 1492 bp, Zea Mays
cttcattctgttctatacctctccagcacaaacctcccctcctcaagctgtttattctccccaaaacaagccggctagctagcgctcttccgagagatcaagaacacatgcgcacactctttctctgacaagagcttgtgttctgcaactgaccagtatatacatcgaacctctatctaacaaggtgcaggcgcagggtgatcatatggaatcatgcgtgcccccggggttcaggttccaccccaccgacgaggagctcgtcggctactacctccggaagaaggtggcctcccagaagatcgacctcgacgtcatacgcgacatcgacctctaccgcatcgagccgtgggatctccaagaacactgcgggatcggccggtacgaggagcagagcgagtggtacttcttcagctacaaggaccgcaagtacccgacggggacgcggaccaacagggccaccatggcagggttctggaaggccacgggcagggacaaggcggtgcacgacaggagccgcctcatcggcatgaggaagacgctcgtcttctacaaggggagggcgcccaacggccagaagaccgactggatcatgcacgagtaccggctcgagaccgacgagaacgcgcagccacaggaagaaggctgggtggtgtgccgggcgttcaagaagagaacagcctacccagcaaggagcatggcgatggcatgggaccccagctacgcctaccgcgaggccagcgccacgggcgcggccgcgttcgtggaccccaacgcggcgtcgtacacgcagatcaggcgccagcccaacaagagcgagcgcttcaagcaggagctggccgagctggacggcgccgccgcgctgctgcagtactccgccagccacctactcgagctgccgcagctcgaaagcccgtcggcgccgctcgcgccggccaacccgagccaggcgtcagcggctgatgaggcggcggtggacgccgccgacagcggtcggcggccgggaaagaaggcgcgggctgataaggcggccacggactggagggcgctcgacaggttcgtcgcgtcgcagctcagccccgcggcggcgtcgacgaccgccgccgccagcagtgtggcatgctcgcaggtggaccacgttgaggatgacgacatggcggcattgctgttcctcaacagcgacgacgggagggacgaagcggagaggtggacggggctgctcggccccgccgccggcggggacggcgactttggtctttgtgtgttcgagaaatgagtagcggacgctcgcgtgcgcgtgtccaggcctgcagtcctgcacggtgcgtcgcggatgcatgcatacatgggatggtgcatgcgatggttatatagctgaaagctggtcctctctctttttttccttctctactttcctttgtatgtttcccaagagatgtgattgtaattttcatctctctgtgcagactgcagagttataatatgcatgtcattc

SEQ ID NO: 81843 - DNA, 808 bp, Zea Mays
acaacatttgggccttctcagtccagtagcgcgcgctttcccgtatgcgtccggcgctttcgtccacttcgtcctccaggtttcctttccacccccgccggtccagcgccaacaccagtcggcggagcggatctccggtgaggtcgagggatggcgaatggctgcggctacgtgtgggccctcgcggcgggtttcaacgccgcactcgccgccatctccgccaagttcttctccactctgttgctcaaatatggcatggtgatacttttcaacgtgacaatgtgggggtgctatgtcaacagcctcaaagctttgtcatccctccaggcaacagtgacaaacttcgccgccaacttcatttcatctgggcttgcggggtgtttcctgtttgatgagcccttgccttctaaggtgccagtcttatcatttttggcgtctttatcctcagcaagtcaagcatcgaggagaaacagaactcagattaggaggaagttttgaccactagcgttagctgtaacataaggtgaggctgcttatacttagggctagtttgaaaaccccattttctcaagtgatttctatttttctaagggaaattagctcatttttccttaagaaaagtagaaatttcttggaaaaatagacttctcaaactcgcccttgtatatatactaggtacatgcccgtgcgttgccacggaatttaaatattagtataaaatatatatatagagcttagttgatgtttgattgtagtgaacaatgtagccatcaaactgtacttgtacatgctcagccctaaatgattt

SEQ ID NO: 81844 - DNA, 2344 bp, Zea Mays
gcactattcttgctccgatgtagcacgggggaagaagaagaccgtccggttgcccgatctggataagcacgcacgggcacggcacaagacaaacccaatccgcccaggcacccgcgcgtcgccacgcaaaagccccgaccgccagccgcctccgtacgtctcactccacgcgttccctccacaacagaacggaccgggaccaccagcgccgtgtggctttacaaagccgcacgcgcgcggagcggacagcggaggtcaccactcttggcgaagcgaaatccaccgtacaccgctgcctccctctccctgtctcgtctcgtcgaaccagccgaggaagccaacgcagacccagcgatcctcgtcgcgcgccctcctcccccacggagggaaggatggcggagcccaaagcggcggcggcggcgaggaagacgcgggtgggcccgtacgaggtcggcaagaccatcggcgagggcagcttcgccaaggtcaagcacgcgcgcgactcccgcaccggcgccgtccgcgccatcaaggtgctcgaccgcaaccacgtcctccgccacaggatggtcgagcagatcaagcgggagatttcgactatgaagctgatcaaacatcccaatgtggtacagctgcatgaggttatggcgagcaaaacgaagatatacatggttcttgaatttgttgatggaggcgagctattcgataagatcgtcaattctggaaggctaggagaggatgaagctaggatatactttcatcaacttataaatgcagttgattattgccatagccgaggagtgtaccatagagacctgaagccagagaatttgcttctggattcaaatggagctcttaaagtttcagacttcggcctaagtgcatttgcaccacaaacaaatgaggatgggcttctgcatactacctgtggaactccaaactatgtagcacctgagatgtatggtcctgtggcataatcttatttgttcttatggctggatacttaccctttgatgatgccaatctgatgagactgtacaaactgatctgccaagcatatttttcttgcccaccatggttttcttctggagcgaagaagtttattaagcgcattctcgatcctaatcctgatacgaggataacaattgcagaaattttggaagatgaatggttcaaaaaagattataaaccaccacgttttgaacaaggtgaagatgttagccttgacgacattgatgctgcattcaatgattcagaggaccgtcttgtggcagagaaaagagagaaaccggaatccatgaacgcgtttgctcttatttcgaggtcgcagggtttcaaccttggaaatttgtttgagaaggagatgatgggaatggtaaagagggaaacatctttcacgtctcaatgcacagcacaggagatcatgacaaaaatagaggatgcatgtgggccactcggtttcaacgtgcggaaacaaaattacaagatgaaattgaaaggtgacaaatctggaagaaaaggtcacttatctgttgcaactgaggtttttgaggttgccccatcacttcacatggttgagcttcgtaaaaccggaggagacacattggagttccacagcttctacaagaacttctcatcggagctgaaagatatcgtgtggaaagctgaatctgacgcaaataataaacagacgaataagtgatacccagagaatctgtgtagccctcatgaggccacattcagatagatcacctcttcgggtgataccacctgcttggtactgtatgcttttttttttactggtaccacattagcagccaaaatctcttgtaaacgggaactccttctgaatgagcgcaattgtacaaaacacatatgaagaggccctccgtgagatgctccgaacactgcaatgggatgtcaaatagttctgaatggtgagtgctgtttttgcatctataggggcatatatgtttccattccatgtgcatgtaccgttgttgtatgcgcatgggggtacgtgtgcagcaggagagagagaacatctgaacgtgtcctgagaggaaaaaaaaagtctatgtccgtttctaaaatgctttggttgtcaccagggttgagtgcctttgttttatgaaaatggacaatggagaatgatgtatgaagcttaactctagtatttgggagtaaaagtatgtttggttggatgtataatgaggaatggaagggggtcgtcacactttctatagtgtttggatgaaagttaagcggtgaagaggtaaatgccggagtaattttttggtggtgtagggaatgttgagatccacatagttgtacttggttggat

SEQ ID NO: 81845 - DNA, 2377 bp, Zea Mays
gcactattcttgctccgatgtagcacgggggaagaagaagaccgtccggttgcccgatctggataagcacgcacgggcacggcacaagacaaacccaatccgcccaggcacccgcgcgtcgccacgcaaaagccccgaccgccagccgcctccgtacgtctcactccacgcgttccctccacaacagaacggaccgggaccaccagcgccgtgtggctttacaaagccgcacgcgcgcggagcggacagcggaggtcaccactcttggcgaagcgaaatccaccgtacaccgctgcctccctctccctgtctcgtctcgtcgaaccagccgaggaagccaacgcagacccagcgatcctcgtcgcgcgccctcctcccccacggagggaaggatggcggagcccaaagcggcggcggcggcgaggaagacgcgggtgggcccgtacgaggtcggcaagaccatcggcgagggcagcttcgccaaggtcaagcacgcgcgcgactcccgcaccggcgccgtccgcgccatcaaggtgctcgaccgcaaccacgtcctccgccacaggatggtcgagcagatcaagcgggagatttcgactatgaagctgatcaaacatcccaatgtggtacagctgcatgaggttatggcgagcaaaacgaagatatacatggttcttgaatttgttgatggaggcgagctattcgataagatcgtcaattctggaaggctaggagaggatgaagctaggatatactttcatcaacttataaatgcagttgattattgccatagccgaggagtgtaccatagagacctgaagagaatttgcttctggattcaaatggagctcttaaagtttcagacttcggcctaagtgcatttgcaccacaaacaaatgaggatgggcttctgcatactacctgtggaactccaaactatgtagcacctgaggtgcttgctgataaaggttatgatggtatggctgcagatgtatggtcctgtggcataatcttatttgttcttatggctggatacttaccctttgatgatgccaatctgatgagactgtacaaactgatctgccaagcatatttttcttgcccaccatggttttcttctggagcgaagaagtttattaagcgcattctcgatcctaatcctgatacgaggataacaattgcagaaattttggaagatgaatggttcaaaaaagattataaaccaccacgttttgaacaaggtgaagatgttagccttgacgacattgatgctgcattcaatgattcagaggaccgtcttgtggcagagaaaagagagaaaccggaatccatgaacgcgtttgctcttatttcgaggtcgcagggtttcaaccttggaaatttgtttgagaaggagatgatgggaatggtaaagagggaaacatctttcacgtctcaatgcacagcacaggagatcatgacaaaaatagaggatgcatgtgggccactcggtttcaacgtgcggaaacaaaattacaagatgaaattgaaaggtgacaaatctggaagaaaaggtcacttatctgttgcaactgaggtttttgaggttgccccatcacttcacatggttgagcttcgtaaaaccggaggagacacattggagttccacagcttctacaagaacttctcatcggagctgaaagatatcgtgtggaaagctgaatctgacgcaaataataaacagacgaataagtgatacccagagaatctgtgtagccctcatgaggccacattcagatagatcacctcttcgggtgataccacctgcttggtactgtatgcttttttttttactggtaccacattagcagccaaaatctcttgtaaacgggaactccttctgaatgagcgcaattgtacaaaacacatatgaagaggccctccgtgagatgctccgaacactgcaatgggatgtcaaatagttctgaatggtgagtgctgtttttgcatctataggggcatatatgtttccattccatgtgcatgtaccgttgttgtatgcgcatgggggtacgtgtgcagcaggagagagagaacatctgaacgtgtcctgagaggaaaaaaaaagtctatgtccgtttctaaaatgctttggttgtcaccagggttgagtgcctttgttttatgaaaatggacaatggagaatgatgtatgaagcttaactctagtatttgggagtaaaagtatgtttggttggatgtataatgaggaatggaagggggtcgtcacactttctatagtgtttggatgaaagttaagcggtgaagaggtaaatgccggagtaattttttggtggtgtagggaatgttgagatccacatagttgtacttggttggat

SEQ ID NO: 81846 - DNA, 2336 bp, Zea Mays
gcactattcttgctccgatgtagcacgggggaagaagaagaccgtccggttgcccgatctggataagcacgcacgggcacggcacaagacaaacccaatccgcccaggcacccgcgcgtcgccacgcaaaagccccgaccgccagccgcctccgtacgtctcactccacgcgttccctccacaacagaacggaccgggaccaccagcgccgtgtggctttacaaagccgcacgcgcgcggagcggacagcggaggtcaccactcttggcgaagcgaaatccaccgtacaccgctgcctccctctccctgtctcgtctcgtcgaaccagccgaggaagccaacgcagacccagcgatcctcgtcgcgcgccctcctcccccacggagggaaggatggcggagcccaaagcggcggcggcggcgaggaagacgcgggtgggcccgtacgaggtcggcaagaccatcggcgagggcagcttcgccaaggtcaagcacgcgcgcgactcccgcaccggcgccgtccgcgccatcaagatcaagcgggagatttcgactatgaagctgatcaaacatcccaatgtggtacagctgcatgaggttatggcgagcaaaacgaagatatacatggttcttgaatttgttgatggaggcgagctattcgataagatcgtcaattctggaaggctaggagaggatgaagctaggatatactttcatcaacttataaatgcagttgattattgccatagccgaggagtgtaccatagagacctgaagccagagaatttgcttctggattcaaatggagctcttaaagtttcagacttcggcctaagtgcatttgcaccacaaacaaatgaggatgggcttctgcatactacctgtggaactccaaactatgtagcacctgaggtgcttgctgataaaggttatgatggtatggctgcagatgtatggtcctgtggcataatcttatttgttcttatggctggatacttaccctttgatgatgccaatctgatgagactgtacaaactgatctgccaagcatatttttcttgcccaccatggttttcttctggagcgaagaagtttattaagcgcattctcgatcctaatcctgatacgaggataacaattgcagaaattttggaagatgaatggttcaaaaaagattataaaccaccacgttttgaacaaggtgaagatgttagccttgacgacattgatgctgcattcaatgattcagaggaccgtcttgtggcagagaaaagagagaaaccggaatccatgaacgcgtttgctcttatttcgaggtcgcagggtttcaaccttggaaatttgtttgagaaggagatgatgggaatggtaaagagggaaacatctttcacgtctcaatgcacagcacaggagatcatgacaaaaatagaggatgcatgtgggccactcggtttcaacgtgcggaaacaaaattacaagatgaaattgaaaggtgacaaatctggaagaaaaggtcacttatctgttgcaactgaggtttttgaggttgccccatcacttcacatggttgagcttcgtaaaaccggaggagacacattggagttccacagcttctacaagaacttctcatcggagctgaaagatatcgtgtggaaagctgaatctgacgcaaataataaacagacgaataagtgatacccagagaatctgtgtagccctcatgaggccacattcagatagatcacctcttcgggtgataccacctgcttggtactgtatgcttttttttttactggtaccacattagcagccaaaatctcttgtaaacgggaactccttctgaatgagcgcaattgtacaaaacacatatgaagaggccctccgtgagatgctccgaacactgcaatgggatgtcaaatagttctgaatggtgagtgctgtttttgcatctataggggcatatatgtttccattccatgtgcatgtaccgttgttgtatgcgcatgggggtacgtgtgcagcaggagagagagaacatctgaacgtgtcctgagaggaaaaaaaaagtctatgtccgtttctaaaatgctttggttgtcaccagggttgagtgcctttgttttatgaaaatggacaatggagaatgatgtatgaagcttaactctagtatttgggagtaaaagtatgtttggttggatgtataatgaggaatggaagggggtcgtcacactttctatagtgtttggatgaaagttaagcggtgaagaggtaaatgccggagtaattttttggtggtgtagggaatgttgagatccacatagttgtacttggttggat

SEQ ID NO: 81847 - DNA, 2158 bp, Zea Mays
gtccgtccgtgatccgtccctcccctcgcccgcccgcccgctgtggaacatatgatatgtaacctcggggaaatttttaaatatactggagctgccatagaaagatcgcctccgcgactcataatttgttcgcagccagtcacgtgggatggtccccttgacgtctctgtcgtgtcgtggtcgacaggaacgtctgtgatgggaaataatgcgtctgggtatcccagctttgctcaaacttttgatcggtttggagaattaggaaggatgggggcatcgaccaaatcgtgacctttcgatcacaaggaaaaactgcacacgcctagggctcctttttccccccctagagattgagatcaagcgggagatttcgactatgaagctgatcaaacatcccaatgtggtacagctgcatgaggttatggcgagcaaaacgaagatatacatggttcttgaatttgttgatggaggcgagctattcgataagatcgtcaattctggaaggctaggagaggatgaagctaggatatactttcatcaacttataaatgcagttgattattgccatagccgaggagtgtaccatagagacctgaagccagagaatttgcttctggattcaaatggagctcttaaagtttcagacttcggcctaagtgcatttgcaccacaaacaaatgaggatgggcttctgcatactacctgtggaactccaaactatgtagcacctgaggtgcttgctgataaaggttatgatggtatggctgcagatgtatggtcctgtggcataatcttatttgttcttatggctggatacttaccctttgatgatgccaatctgatgagactgtacaaactgatctgccaagcatatttttcttgcccaccatggttttcttctggagcgaagaagtttattaagcgcattctcgatcctaatcctgatacgaggataacaattgcagaaattttggaagatgaatggttcaaaaaagattataaaccaccacgttttgaacaaggtgaagatgttagccttgacgacattgatgctgcattcaatgattcagaggaccgtcttgtggcagagaaaagagagaaaccggaatccatgaacgcgtttgctcttatttcgaggtcgcagggtttcaaccttggaaatttgtttgagaaggagatgatgggaatggtaaagagggaaacatctttcacgtctcaatgcacagcacaggagatcatgacaaaaatagaggatgcatgtgggccactcggtttcaacgtgcggaaacaaaattacaagatgaaattgaaaggtgacaaatctggaagaaaaggtcacttatctgttgcaactgaggtttttgaggttgccccatcacttcacatggttgagcttcgtaaaaccggaggagacacattggagttccacagcttctacaagaacttctcatcggagctgaaagatatcgtgtggaaagctgaatctgacgcaaataataaacagacgaataagtgatacccagagaatctgtgtagccctcatgaggccacattcagatagatcacctcttcgggtgataccacctgcttggtactgtatgcttttttttttactggtaccacattagcagccaaaatctcttgtaaacgggaactccttctgaatgagcgcaattgtacaaaacacatatgaagaggccctccgtgagatgctccgaacactgcaatgggatgtcaaatagttctgaatggtgagtgctgtttttgcatctataggggcatatatgtttccattccatgtgcatgtaccgttgttgtatgcgcatgggggtacgtgtgcagcaggagagagagaacatctgaacgtgtcctgagaggaaaaaaaaagtctatgtccgtttctaaaatgctttggttgtcaccagggttgagtgcctttgttttatgaaaatggacaatggagaatgatgtatgaagcttaactctagtatttgggagtaaaagtatgtttggttggatgtataatgaggaatggaagggggtcgtcacactttctatagtgtttggatgaaagttaagcggtgaagaggtaaatgccggagtaattttttggtggtgtagggaatgttgagatccacatagttgtacttggttggat

SEQ ID NO: 81848 - DNA, 1881 bp, Zea Mays
aaggatgggggcatcgaccaaatcgtgacctttcgatcacaaggaaaaactgcacacgcctagggctcctttttccccccctagagattgagatcaagcgggagatttcgactatgaagctgatcaaacatcccaatgtggtacagctgcatgaggttatggcgagcaaaacgaagatatacatggttcttgaatttgttgatggaggcgagctattcgataagatcgctaggagaggatgaagctaggatatactttcatcaacttataaatgcagttgattattgccatagccgaggagtgtaccatagagacctgaagccagagaatttgcttctggattcaaatggagctcttaaagtttcagacttcggcctaagtgcatttgcaccacaaacaaatgaggatgggcttctgcatactacctgtggaactccaaactatgtagcacctgaggtgcttgctgataaaggttatgatggtatggctgcagatgtatggtcctgtggcataatcttatttgttcttatggctggatacttaccctttgatgatgccaatctgatgagactgtacaaactgatctgccaagcatatttttcttgcccaccatggttttcttctggagcgaagaagtttattaagcgcattctcgatcctaatcctgatacgaggataacaattgcagaaattttggaagatgaatggttcaaaaaagattataaaccaccacgttttgaacaaggtgaagatgttagccttgacgacattgatgctgcattcaatgattcagaggaccgtcttgtggcagagaaaagagagaaaccggaatccatgaacgcgtttgctcttatttcgaggtcgcagggtttcaaccttggaaatttgtttgagaaggagatgatgggaatggtaaagagggaaacatctttcacgtctcaatgcacagcacaggagatcatgacaaaaatagaggatgcatgtgggccactcggtttcaacgtgcggaaacaaaattacaagatgaaattgaaaggtgacaaatctggaagaaaaggtcacttatctgttgcaactgaggtttttgaggttgccccatcacttcacatggttgagcttcgtaaaaccggaggagacacattggagttccacagcttctacaagaacttctcatcggagctgaaagatatcgtgtggaaagctgaatctgacgcaaataataaacagacgaataagtgatacccagagaatctgtgtagccctcatgaggccacattcagatagatcacctcttcgggtgataccacctgcttggtactgtatgcttttttttttactggtaccacattagcagccaaaatctcttgtaaacgggaactccttctgaatgagcgcaattgtacaaaacacatatgaagaggccctccgtgagatgctccgaacactgcaatgggatgtcaaatagttctgaatggtgagtgctgtttttgcatctataggggcatatatgtttccattccatgtgcatgtaccgttgttgtatgcgcatgggggtacgtgtgcagcaggagagagagaacatctgaacgtgtcctgagaggaaaaaaaaagtctatgtccgtttctaaaatgctttggttgtcaccagggttgagtgcctttgttttatgaaaatggacaatggagaatgatgtatgaagcttaactctagtatttgggagtaaaagtatgtttggttggatgtataatgaggaatggaagggggtcgtcacactttctatagtgtttggatgaaagttaagcggtgaagaggtaaatgccggagtaattttttggtggtgtagggaatgttgagatccacatagttgtacttggttggat

SEQ ID NO: 81849 - DNA, 1894 bp, Zea Mays
ctttcgatcacaaggaaaaactgcacacgcctagggctcctttttccccccctagagattgagatcaagcgggagatttcgactatgaagctgatcaaacatcccaatgtggtacagctgcatgaggttatggcgagcaaaacgaagatatacatggttcttgaatttgttgatggaggcgagctattcgataagatcgtcaattctggaaggctaggagaggatgaagctaggatatactttcatcaacttataaatgcagttgattattgccatagccgaggagtgtaccatagagacctgaagccagagaatttgcttctggattcaaatggagctcttaaagtttcagacttcggcctaagtgcatttgcaccacaaacaaatgaggatgggcttctgcatactacctgtggaactccaaactatgtagcacctgagatgtgtaagcatcgcgctcttcctgcaggtgcttgctgataaaggttatgatggtatggctgcagatgtatggtcctgtggcataatcttatttgttcttatggctggatacttaccctttgatgatgccaatctgatgagactgtacaaactgatctgccaagcatatttttcttgcccaccatggttttcttctggagcgaagaagtttattaagcgcattctcgatcctaatcctgatacgaggataacaattgcagaaattttggaagatgaatggttcaaaaaagattataaaccaccacgttttgaacaaggtgaagatgttagccttgacgacattgatgctgcattcaatgattcagaggaccgtcttgtggcagagaaaagagagaaaccggaatccatgaacgcgtttgctcttatttcgaggtcgcagggtttcaaccttggaaatttgtttgagaaggagatgatgggaatggtaaagagggaaacatctttcacgtctcaatgcacagcacaggagatcatgacaaaaatagaggatgcatgtgggccactcggtttcaacgtgcggaaacaaaattacaagatgaaattgaaaggtgacaaatctggaagaaaaggtcacttatctgttgcaactgaggtttttgaggttgccccatcacttcacatggttgagcttcgtaaaaccggaggagacacattggagttccacagcttctacaagaacttctcatcggagctgaaagatatcgtgtggaaagctgaatctgacgcaaataataaacagacgaataagtgatacccagagaatctgtgtagccctcatgaggccacattcagatagatcacctcttcgggtgataccacctgcttggtactgtatgcttttttttttactggtaccacattagcagccaaaatctcttgtaaacgggaactccttctgaatgagcgcaattgtacaaaacacatatgaagaggccctccgtgagatgctccgaacactgcaatgggatgtcaaatagttctgaatggtgagtgctgtttttgcatctataggggcatatatgtttccattccatgtgcatgtaccgttgttgtatgcgcatgggggtacgtgtgcagcaggagagagagaacatctgaacgtgtcctgagaggaaaaaaaaagtctatgtccgtttctaaaatgctttggttgtcaccagggttgagtgcctttgttttatgaaaatggacaatggagaatgatgtatgaagcttaactctagtatttgggagtaaaagtatgtttggttggatgtataatgaggaatggaagggggtcgtcacactttctatagtgtttggatgaaagttaagcggtgaagaggtaaatgccggagtaattttttggtggtgtagggaatgttgagatccacatagttgtacttggttggat

SEQ ID NO: 81850 - DNA, 1713 bp, Zea Mays
gcctagggctcctttttccccccctagagattgagatcaagcgggagatttcgactatgaagctgatcaaacatcccaatgtggtacagctgcatgaggttatggcgagcaaaacgaagatatacatggttcttgaatttgttgatggaggcgagctattcgataagatcgctaggagaggatgaagctaggatatactttcatcaacttataaatgcagttgattattgccatagccgaggagtgtaccatagagacctgaagccagagaatttgcttctggattcaaatggagctcttaaagtttcagacttcggcctaagtgcatttgcaccacaaacaaatgaggatgggcttctgcatactacctgtggaactccaaactatgtagcacctgaggtgcttgctgataaaggttatgatggtatggctgcagatgtatggtcctgtggcataatcttatttgttcttatggctggatacttaccctttgatgatgccaatctgatgagactgtacaaactgatctgccaagcatatttttcttgcccaccatggttttcttctggagcgaagaagtttattaagcgcattctcgatcctaatcctgatacgaggataacaattgcagaaattttggaagatgaatggttcaaaaaagattataaaccaccacgttttgaacaaggtgaagatgttagccttgacgacattgatgctgcattcaatgattcagagggaatggtaaagagggaaacatctttcacgtctcaatgcacagcacaggagatcatgacaaaaatagaggatgcatgtgggccactcggtttcaacgtgcggaaacaaaattacaagatgaaattgaaaggtgacaaatctggaagaaaaggtcacttatctgttgcaactgaggtttttgaggttgccccatcacttcacatggttgagcttcgtaaaaccggaggagacacattggagttccacagcttctacaagaacttctcatcggagctgaaagatatcgtgtggaaagctgaatctgacgcaaataataaacagacgaataagtgatacccagagaatctgtgtagccctcatgaggccacattcagatagatcacctcttcgggtgataccacctgcttggtactgtatgcttttttttttactggtaccacattagcagccaaaatctcttgtaaacgggaactccttctgaatgagcgcaattgtacaaaacacatatgaagaggccctccgtgagatgctccgaacactgcaatgggatgtcaaatagttctgaatggtgagtgctgtttttgcatctataggggcatatatgtttccattccatgtgcatgtaccgttgttgtatgcgcatgggggtacgtgtgcagcaggagagagagaacatctgaacgtgtcctgagaggaaaaaaaaagtctatgtccgtttctaaaatgctttggttgtcaccagggttgagtgcctttgttttatgaaaatggacaatggagaatgatgtatgaagcttaactctagtatttgggagtaaaagtatgtttggttggatgtataatgaggaatggaagggggtcgtcacactttctatagtgtttggatgaaagttaagcggtgaagaggtaaatgccggagtaattttttggtggtgtagggaatgttgagatccacatagttgtacttggttggat

SEQ ID NO: 81851 - DNA, 1854 bp, Zea Mays
ctttttccccccctagagattgagatcaagcgggagatttcgactatgaagctgatcaaacatcccaatgtggtacagctgcatgaggttatggcgagcaaaacgaagatatacatggttcttgaatttgttgatggaggcgagctattcgataagatcgtcaattctggaaggctaggagaggatgaagctaggatatactttcatcaacttataaatgcagttgattattgccatagccgaggagtgtaccatagagacctgaagccagagaatttgcttctggattcaaatggagctcttaaagtttcagacttcggcctaagtgcatttgcaccacaaacaaatgaggatgggcttctgcatactacctgtggaactccaaactatgtagcacctgaggtgagtttctcacctctcatcagttgccagtttatttgtattgttaccttttgtgattaatctgcttcaagatgtgtaagcatcgcgctcttcctgcaggtgcttgctgataaaggttatgatggtatggctgcagatgtatggtcctgtggcataatcttatttgttcttatggctggatacttaccctttgatgatgccaatctgatgagactgtacaaactgatctgccaagcatatttttcttgcccaccatggttttcttctggagcgaagaagtttattaagcgcattctcgatcctaatcctgatacgaggataacaattgcagaaattttggaagatgaatggttcaaaaaagattataaaccaccacgttttgaacaaggtgaagatgttagccttgacgacattgatgctgcattcaatgattcagagggtttcaaccttggaaatttgtttgagaaggagatgatgggaatggtaaagagggaaacatctttcacgtctcaatgcacagcacaggagatcatgacaaaaatagaggatgcatgtgggccactcggtttcaacgtgcggaaacaaaattacaagatgaaattgaaaggtgacaaatctggaagaaaaggtcacttatctgttgcaactgaggtttttgaggttgccccatcacttcacatggttgagcttcgtaaaaccggaggagacacattggagttccacagcttctacaagaacttctcatcggagctgaaagatatcgtgtggaaagctgaatctgacgcaaataataaacagacgaataagtgatacccagagaatctgtgtagccctcatgaggccacattcagatagatcacctcttcgggtgataccacctgcttggtactgtatgcttttttttttactggtaccacattagcagccaaaatctcttgtaaacgggaactccttctgaatgagcgcaattgtacaaaacacatatgaagaggccctccgtgagatgctccgaacactgcaatgggatgtcaaatagttctgaatggtgagtgctgtttttgcatctataggggcatatatgtttccattccatgtgcatgtaccgttgttgtatgcgcatgggggtacgtgtgcagcaggagagagagaacatctgaacgtgtcctgagaggaaaaaaaaagtctatgtccgtttctaaaatgctttggttgtcaccagggttgagtgcctttgttttatgaaaatggacaatggagaatgatgtatgaagcttaactctagtatttgggagtaaaagtatgtttggttggatgtataatgaggaatggaagggggtcgtcacactttctatagtgtttggatgaaagttaagcggtgaagaggtaaatgccggagtaattttttggtggtgtagggaatgttgagatccacatagttgtacttggttggat

SEQ ID NO: 81852 - DNA, 1142 bp, Zea Mays
tatgtatattgggttccgttacaacgcatggccatgtttgctaatacgaactaaaggaccgtcttgtggcagagaaaagagagaaaccggaatccatgaacgcgtttgctcttatttcgaggtcgcagggtttcaaccttggaaatttgtttgagaaggagatgatgggaatggtaaagagggaaacatctttcacgtctcaatgcacagcacaggagatcatgacaaaaatagaggatgcatgtgggccactcggtttcaacgtgcggaaacaaaattacaagatgaaattgaaaggtgacaaatctggaagaaaaggtcacttatctgttgcaactgaggtttttgaggttgccccatcacttcacatggttgagcttcgtaaaaccggaggagacacattggagttccacagcttctacaagaacttctcatcggagctgaaagatatcgtgtggaaagctgaatctgacgcaaataataaacagacgaataagtgatacccagagaatctgtgtagccctcatgaggccacattcagatagatcacctcttcgggtgataccacctgcttggtactgtatgcttttttttttactggtaccacattagcagccaaaatctcttgtaaacgggaactccttctgaatgagcgcaattgtacaaaacacatatgaagaggccctccgtgagatgctccgaacactgcaatgggatgtcaaatagttctgaatggtgagtgctgtttttgcatctataggggcatatatgtttccattccatgtgcatgtaccgttgttgtatgcgcatgggggtacgtgtgcagcaggagagagagaacatctgaacgtgtcctgagaggaaaaaaaaagtctatgtccgtttctaaaatgctttggttgtcaccagggttgagtgcctttgttttatgaaaatggacaatggagaatgatgtatgaagcttaactctagtatttgggagtaaaagtatgtttggttggatgtataatgaggaatggaagggggtcgtcacactttctatagtgtttggatgaaagttaagcggtgaagaggtaaatgccggagtaattttttggtggtgtagggaatgttgagatccacatagttgtacttggttggat

SEQ ID NO: 81853 - DNA, 1563 bp, Zea Mays
ctgccccgtgacctccactgcgcgcgcgggcaccaatggcggccgcgtcgctcaagttcgcctcccccaaacccttggcctccgcaccgtccgcgctcctttgcgggcgtcgcgcccaggcgcggcccctcccagcgacgctgaagctgctcctggacgagaaggacgaggcgcgcatctccgccttcctcgtcctcctcagggccaagggcgagaccttcgaagagatcgtggggcttgcgaaggcgatgttgagctgctgcatccgagtcgatggtctggacgacgccgtcgacattgtcgggacaggcggcgacggcgcagacaccgtcaacatctccaccgggtccaccatcctcgccgccgcggccggcgccaaggtcgctaagcaaggaagcagggctagctcgtcggcgtgcggcagcgccgatgtgctggaggcgctcggggtcaacatcgagcttggacccgagggtattaaacgatgtgtcaatgaggtgggtgttggattcatgatgtctgcaaattatcatcctgcaatgaaaattgtcagacctgtgaggaagaagcttaaaataaagacagttttcaatatccttggtcctctactgaatccagcaagggtgcctcatgctgttattggtgtttaccatgagaatatagttaccaagatggctaaggctgctcagaaatttggaatgaagagagcattggtcgtccattcaaagggtttggatgaaataagcccacttggtcccggatatatccttgatgttactccagagaagattgaaaaaatgttcttcgatccattggattttggcattcctcgctgcacattggaagatctgaaaggaggcgatccagcgtttaatgcaaaagttctccaggatgttcttgctggtcaaaggggggcgattgcagatgcccttgttctaaatgctgcggcgtccctacttgtcagtggtaaagtgaaaaatttacatgacggtgttgctttagcacaggagacacagcggtccgggaaagccatcaatacacttgagtcttggataaaaaaatcaaatagttccagagactgagtgaagttgagtagcaatagatggatttctgcaataagacatgaggaatggtagcaaataagggctccgctgagtccatccatcatccgtgtatgattggctttcttctcgtgttttgttcatgatttgtgtcagaaacctaggtggcatctagtctggtttatgtattgccagtgctgttgtgtagaaaaatctccgtcgatattctaagctttttggttagaaaggtgcgctcttcattgtccttgacggaactcggggtagatgaacataggccatctgttgtgatcttgtgatgctgcattacgtttgcaatggatcatatattatgcaatggcatgggaagattatacccatttgtaatgggggagaatcagggcttaaacatttctacaataacgtgcgaagagttgtccccattggtaacgcatgtcctgaaatatgaataaagctgcaggcagttgatattttgcaactgaaa

SEQ ID NO: 81854 - DNA, 845 bp, Zea Mays
gactctggcttcctctaggaagccagaataaattggtcccggatatatccttgatgttactccagagaagattgaaaaaatgttcttcgatccattggattttggcattcctcgctgcacattggaagatctgaaaggaggcgatccagcgtttaatgcaaaagttctccaggatgttcttgctggtcaaaggggggcgattgcagatgcccttgttctaaatgctgcggcgtccctacttgtcagtggtaaagtgaaaaatttacatgacggtgttgctttagcacaggagacacagcggtccgggaaagccatcaatacacttgagtcttggataaaaaaatcaaatagttccagagactgagtgaagttgagtagcaatagatggatttctgcaataagacatgaggaatggtagcaaataagggctccgctgagtccatccatcatccgtgtatgattggctttcttctcgtgttttgttcatgatttgtgtcagaaacctaggtggcatctagtctggtttatgtattgccagtgctgttgtgtagaaaaatctccgtcgatattctaagctttttggttagaaaggtgcgctcttcattgtccttgacggaactcggggtagatgaacataggccatctgttgtgatcttgtgatgctgcattacgtttgcaatggatcatatattatgcaatggcatgggaagattatacccatttgtaatgggggagaatcagggcttaaacatttctacaataacgtgcgaagagttgtccccattggtaacgcatgtcctgaaatatgaataaagctgcaggcagttgatattttgcaactgaaa

SEQ ID NO: 81855 - DNA, 1874 bp, Zea Mays
cgattttccagtataaaaggaagtgccgctcccgctccctctccggccggcgcacgtctcgcggatgtccatgcgcgcaacttgactcccaccactaccaccatccaccgactgacgactccggcccacttgttcgtcctcgtcctcgtccccgtccagtgcccctcccgtgcgccgaggccgccacacccacacgtatacccaggccggccaaaacgaatcgggtccgtcggaccggacggcttgagagcaaccatggccgtcgcgaggctggtgtccgccccgttccctctcgccccgctccgcgtccgggccccccgcccggccttgccccccggcgcgcacgcgggcccacggccgccggtcctggcgctcgcgcctcccgctgcctcggcggcgccccggcgcgccgtgcccgcgcgcgcggcgccggaggacggcggcagaggggacgcggcggcggctgcggcgcgcgcggcgcggaagcagtcggagcggcggacgtacctcgtggcggccgtcatgtccagcctcgggatcacgtccatggccgccgccgccgtctactaccgcttcgcatggcaaatggagggcggcggcgcgatcccggtgacggagatggtcggcacgttcgcgctctcggtgggcgccgcggtggggatggagttctgggcgcggtgggcgcaccgggcgctgtggcacgcgtcgctgtggcacatgcacgagtcgcaccaccgggcccgcgacgacgggcccttcgagctcaacgacgtgttcgccatcgtcaacgccgtcccggccatgtccctcctcgcctacggcttcttcaaccggggcctcgtcccgggcctctgcttcggcgcggggctggggatcacgctcttcgggatggcctacatgttcgtgcacgacggcctcgtccaccgccgtttccccgtcggccccatcgagaacgtgccctacttccggcgtgtcgccgcagcccatcagatacatcacatggacaagttccagggcgtgccatacggcctgttcctggggcccaaggagctgaaggaggtgggagggaccgaggagctggagaaggagatcaagaggaggatcaggaggagggaggcgctagacgccacccaataagacctgcttgctattgctatacacacagtgctttggctactgaatcccactgtgttctagcgttccctttttttttatgtagcctagatgtatagtatacgagtgctagcgtgtgcacgtaaaaaaccaggttgcgagggtctcaacaggcgacctgcaggaccagcgtcgtcgtggcgctgtttgtcgtcgccggaacagtgaccgtgcagctgccgccgccagtcgccggtggaacaagacacggcacagccgaagcgtgaagacacaagacaagcggctgggggaccttccgaatcagccgctgtcagagtctgcggcggattgtcggtccacctggcgtgctcggcgcaggcggcggcggcggcgaagagctgtgcggggaggcctcctcggaaggagttcagaaccacagccagcaaggggattgaaggcccgggacccaggtgatggtgatatggctcaatggctgtcgtcagcccatgtgcccaacctaagaaaatgtgataatgttagcaattagtaagaggttagaatcatcatgtttttcttatttcattaaattgcatgtaatatcatcatgtttttcttatgtgtcatgtcatttaatgaggataaaacttccataaaaactcacactgagagtgacctaagtaagtaggactcgtgcatcatttggagataacccaagtcttcagcataaacgatccatgatatgtgaggactgaagacggcta

SEQ ID NO: 81856 - DNA, 1936 bp, Zea Mays
attttccagtataaaaggaagtgccgctcccgctccctctccggccggcgcacgtctcgcggatgtccatgcgcgcaacttgactcccaccactaccaccatccaccgactgacgactccggcccacttgttcgtcctcgtcctcgtccccgtccagtgcccctcccgtgcgccgaggccgccacacccacacgtatacccaggccggccaaaacgaatcgggtccgtcggaccggacggcttgagagcaaccatggccgtcgcgaggctggtgtccgccccgttccctctcgccccgctccgcgtccgggccccccgcccggccttgccccccggcgcgcacgcgggcccacggccgccggtcctggcgctcgcgcctcccgctgcctcggcggcgccccggcgcgccgtgcccgcgcgcgcggcgccggaggacggcggcagaggggacgcggcggcggctgcggcgcgcgcggcgcggaagcagtcggagcggcggacgtacctcgtggcggccgtcatgtccagcctcgggatcacgtccatggccgccgccgccgtctactaccgcttcgcatggcaaatggaggtggggatggagttctgggcgcggtgggcgcaccgggcgctgtggcacgcgtcgctgtggcacatgcacgagtcgcaccaccgggcccgcgacgacgggcccttcgagctcaacgacgtgttcgccatcgtcaacgccgtcccggccatgtccctcctcgcctacggcttcttcaaccggggcctcgtcccgggcctctgcttcggcgcggggctggggatcacgctcttcgggatggcctacatgttcgtgcacgacggcctcgtccaccgccgtttccccgtcggccccatcgagaacgtgccctacttccggcgtgtcgccgcagcccatcagatacatcacatggacaagttccagggcgtgccatacggcctgttcctggggcccaaggagctgaaggaggtgggagggaccgaggagctggagaaggagatcaagaggaggatcaggaggagggaggcgctagacgccacccaataagacctgcttgctattgctatacacacagtgctttggctactgaatcccactgtgttctagcgttccctttttttttatgtagcctagatgtatagtatacgagtgctagcgtgtgcacgtaaaaaaccaggttgcgagggtctcaacaggcgacctgcaggaccagcgtcgtcgtggcgctgtttgtcgtcgccggaacagtgaccgtgcagctgccgccgccagtcgccggtggaacaagacacggcacagccgaagcgtgaagacacaagacaagcggctgggggaccttccgaatcaggtccgggacacgcatgtgcatgtgacgagggatcgtcctcgtgatactgtttctccttttttcatgacgatgaacatgggatgggatgggatgggacgggactatgaatcttgtaaaattgtcgcagccgctgtcagagtctgcggcggattgtcggtccacctggcgtgctcggcgcaggcggcggcggcggcgaagagctgtgcggggaggcctcctcggaaggagttcagaaccacagccagcaaggggattgaaggcccgggacccaggtgatggtgatatggctcaatggctgtcgtcagcccatgtgcccaacctaagaaaatgtgataatgttagcaattagtaagaggttagaatcatcatgtttttcttatttcattaaattgcatgtaatatcatcatgtttttcttatgtgtcatgtcatttaatgaggataaaacttccataaaaactcacactgagagtgacctaagtaagtaggactcgtgcatcatttggagataacccaagtcttcagcataaacgatccatgatatgtgaggactgaagacggcta

SEQ ID NO: 81857 - DNA, 2097 bp, Zea Mays
aaacattcctaattgccaattggagccagagcgcagagcgcgaaaggcgagcggcgactccctggcgttgaccagagccccaccccactcgccgtctcgccctaaaccaaatcctccccaaaggcaaatacgaaggtacagtgccccagccccgcgccccctagaccaaagcagaccagaatccgccctaccaatcgcctccccagatcggcggtccacccggaggcggcgatggcgtcgtcgcaggcgaacctcgacaagatgcagctccgccagagctaccgcaacgtctggcacaccgacatgacgaacgccatccaggccgacttccccttggaccttgcgtgtcgtacatgcttcgcaaaagggctctctacaatgacatgtcaagatatgtctgttgcgctggctacatgccatgcagtggaaagtgtggcgagagccggtgcccagagttctgtcttgcaactgaggtgttcctttgctttggcaattcagttgcatcaacccgcttcttgctgcaagatgaatttaacatacagaccactcagtgtgacaactgcatcattggcttcatgttatgccttcaacaagttgcttgcatcttctctatagttgcagctattgttggtagcgaggagctttcagaggcttcccagatccttaattgtctgtctgatttggtctactggacggtttgtgcatgtatgcagacgcagcacaaagtcgaaatggacaagagggatggaaagttcagcccacagcctatggcagtgcccccggtgcaacaaatgtcacgcatcgatcagcctatgccgcctcctgctggatatgcaccgcaaccagcatatgggcagccttatggtggctatccatctcctcctggccaaggttatccgcctcctcctggccaaggttatccgccagctggatactcgcagggcggtgcataccctccacccgctcaaggttacccacatggtggtggatatcctccacctggtcaaggttacccccagggtcagggtggtgcatatcctccgcctggttcttaccctccacaaggttcctaccccccagcagagggctcctacccagcacaaggttcctaccacccagcacagggctcctacccagcacaaggttcctattccccagcacagggctcctacccagcacaaggttcatatcccccacccccagcacaaggttcatatcccccagcacagggctcgtacccagcacaaggttcctaccccccacaggcttaccctggcaagtaaagatgacacgacaggtgaaccaaatatcgtgaacatgtaaacagtaggaccgctttagcgctataggttattttgataaaattcttgttactgttcagggtggcattcggtgaacaatatttctattttatacggtcaacatcttgtgttgatcatgtcgtgttgagtctatcctcttttttcttttcctgaataaggaatggcattcaactggaatgtatttgaatttggtgacaactcacgtggatattgttttggttcagagttgtcactttgctgtgtatgatagtcgcaacttttgatgacgtttgataatggagtgaaggaatggaatgcttatgacttgtgagcacgagcagtccctttcacacacgttactattatcataggacgagatgaatagacagacagcaaccctcagtctgtacgtgattgtcatccttttttcttcgtgtcctctttttttttcttttcctgatgaaccaattatctgtttgattccaggatagcgatgtctcaacggagctgtccttgtagctagctccagcatcaatcgatgggaatatctgacaaagtcgcgtagcagctattatctctttgagacattaatcagagacgatgtatgtatctgaatttcatgcagctgtaggcatgaatacgcgccggaaaaacgttgggattattatgagccttaatttgtcccgtggcgtttgttaggcctaatcgcccaataaatctccaccgggctgtccagtttcagtttggtacacctaatcgatacaaggcccacagcgatagagatttccgatctgat

SEQ ID NO: 81858 - DNA, 3097 bp, Zea Mays
aaacattcctaattgccaattggagccagagcgcagagcgcgaaaggcgagcggcgactccctggcgttgaccagagccccaccccactcgccgtctcgccctaaaccaaatcctccccaaaggcaaatacgaaggtacagtgccccagccccgcgccccctagaccaaagcagaccagaatccgccctaccaatcgcctccccagatcggcggtccacccggaggcggcgatggcgtcgtcgcaggcgaacctcgacaagatgcagctccgccagagctaccgcaacgtctggcacaccgacatgacgaacgccatccaggccgacttcccctactgctgcctcgcgctgtggtggtgagccatccatcgaccctgcctagcagatctcaccgtcaccgtcttctgcgggctttgagtctcgaacccctagccttccgtagatccgaggacacttaatttgtcgctgtggctagggtttttggggattttggtctccaagggttccgcgttgtgcattgccgctttttcgaggagcatatcctgaactaaattgttgcagtataaaagctcattctacattatattatatacattttagattaggggaggctgtaggggctccatggtatccgaagcggtagggggggctcgagccccctgccccaccgctggatccgtccctgatcctgaatttgttattccatctgcgtttaaagtttattccgcggcagcaagacgactaatgaaagtacaaatgaatggatgatgatagcggaatccgctgggcctgccagattgtctctaggattttgacaagtgcacgtagcccatgtagtagctgccgcaaacccacaagaggatagatgtgagatgtcagtttcatcttcctccctggagccagttaatgtataaaccataaacaggaacatggaaatgatcccccacccctacatccctctgttagatgcaccaggttaattgggctaatgagcattgaaagagtgcatcatttttgtttctgatgggtcctgaccaataatgtcggctccctgccttcaagttcattccagagtatgcatagccaaaccatgtaaggatttcatttctgttccaaaaagaagggaccaagtctaataaaaaagatcactgtatttccattgtttctatgataggtctaatttggttccaccgttaccatgtggcgctagtctatcatgcgtgacaaagcttttaatgtgcttgcattggtagacatcgacataggtcaccatttggaaatgtgaacaattttacccgttcgttaatctgctgcattctcctgtttctgttcagtggaccttgcgtgtcgtacatgcttcgcaaaagggctctctacaatgacatgtcaagatatgtctgttgcgctggctacatgccatgcagtggaaagtgtggcgagagccggtgcccagagttctgtcttgcaactgaggtgttcctttgctttggcaattcagttgcatcaacccgcttcttgctgcaagatgaatttaacatacagaccactcagtgtgacaactgcatcattggcttcatgttatgccttcaacaagttgcttgcatcttctctatagttgcagctattgttggtagcgaggagctttcagaggcttcccagatccttaattgtctgtctgatttggtctactggacggtttgtgcatgtatgcagacgcagcacaaagtcgaaatggacaagagggatggaaagttcagcccacagcctatggcagtgcccccggtgcaacaaatgtcacgcatcgatcagcctatgccgcctcctgctggatatgcaccgcaaccagcatatgggcagccttatggtggctatccatctcctcctggccaaggttatccgcctcctcctggccaaggttatccgccagctggatactcgcagggcggtgcataccctccacccgctcaaggttacccacatggtggtggatatcctccacctggtcaaggttacccccagggtcagggtggtgcatatcctccgcctggttcttaccctccacaaggttcctaccccccagcagagggctcctacccagcacaaggttcctaccacccagcacagggctcctacccagcacaaggttcctattccccagcacagggctcctacccagcacaaggttcatatcccccacccccagcacaaggttcatatcccccagcacagggctcgtacccagcacaaggttcctaccccccacaggcttaccctggcaagtaaagatgacacgacaggtgaaccaaatatcgtgaacatgtaaacagtaggaccgctttagcgctataggttattttgataaaattcttgttactgttcagggtggcattcggtgaacaatatttctattttatacggtcaacatcttgtgttgatcatgtcgtgttgagtctatcctcttttttcttttcctgaataaggaatggcattcaactggaatgtatttgaatttggtgacaactcacgtggatattgttttggttcagagttgtcactttgctgtgtatgatagtcgcaacttttgatgacgtttgataatggagtgaaggaatggaatgcttatgacttgtgagcacgagcagtccctttcacacacgttactattatcataggacgagatgaatagacagacagcaaccctcagtctgtacgtgattgtcatccttttttcttcgtgtcctctttttttttcttttcctgatgaaccaattatctgtttgattccaggatagcgatgtctcaacggagctgtccttgtagctagctccagcatcaatcgatgggaatatctgacaaagtcgcgtagcagctattatctctttgagacattaatcagagacgatgtatgtatctgaatttcatgcagctgtaggcatgaatacgcgccggaaaaacgttgggattattatgagccttaatttgtcccgtggcgtttgttaggcctaatcgcccaataaatctccaccgggctgtccagtttcagtttggtacacctaatcgatacaaggcccacagcgatagagatttccgatctgat

SEQ ID NO: 81859 - DNA, 1895 bp, Zea Mays
aaacattcctaattgccaattggagccagagcgcagagcgcgaaaggcgagcggcgactccctggcgttgaccagagccccaccccactcgccgtctcgccctaaaccaaatcctccccaaaggcaaatacgaaggtacagtgccccagccccgcgccccctagaccaaagcagaccagaatccgccctaccaatcgcctccccagatcggcggtccacccggaggcggcgatggcgtcgtcgcaggcgaacctcgacaagatgcagctccgccagagctaccgcaacgtctggcacaccgacatgacgaacgccatccaggccgacttcccctactgctgcctcgcgctgtggtgtggaccttgcgtgtcgtacatgcttcgcaaaagggctctctacaatgacatgtcaagatatgtctgttgcgctggctacatgccatgcagtggaaagtgtggcgagagccggtgcccagagttctgtcttgcaactgaggtgttcctttgctttggcaattcagttgcatcaacccgcttcttgctgcaagatgaatttaacatacagaccactcagtgtgacaactgcatcattggcttcatgttatgccttcaacaagttgcttgcatcttctctatagttgcagctattgttggtagcgaggagctttcagaggcttcccagatccttaattgtctgtctgatttggtctactggacggtttgtgcatgtatgcagacgcagcacaaagtcgaaatggacaagagggatggaaagttcagcccacagcctatggcagtgcccccggtgcaacaaatgtcacgcatcgatcagcctatgccgcctcctgctggatatgcaccgcaaccagcatatgggcagccttatggtggctatccatctcctcctggccaaggttatccgcctcctcctggccaaggttatccgccagctggatactcgcagggcggtgcataccctccacccgctcaaggttacccacatggtggtggatatcctccacctggtcaaggttacccccagggtcagggtggtgcatatcctccgcctggttcttaccctccacaaggttcatatcccccagcacagggctcgtacccagcacaaggttcctaccccccacaggcttaccctggcaagtaaagatgacacgacaggtgaaccaaatatcgtgaacatgtaaacagtaggaccgctttagcgctataggttattttgataaaattcttgttactgttcagggtggcattcggtgaacaatatttctattttatacggtcaacatcttgtgttgatcatgtcgtgttgagtctatcctcttttttcttttcctgaataaggaatggcattcaactggaatgtatttgaatttggtgacaactcacgtggatattgttttggttcagagttgtcactttgctgtgtatgatagtcgcaacttttgatgacgtttgataatggagtgaaggaatggaatgcttatgacttgtgagcacgagcagtccctttcacacacgttactattatcataggacgagatgaatagacagacagcaaccctcagtctgatagcgatgtctcaacggagctgtccttgtagctagctccagcatcaatcgatgggaatatctgacaaagtcgcgtagcagctattatctctttgagacattaatcagagacgatgtatgtatctgaatttcatgcagctgtaggcatgaatacgcgccggaaaaacgttgggattattatgagccttaatttgtcccgtggcgtttgttaggcctaatcgcccaataaatctccaccgggctgtccagtttcagtttggtacacctaatcgatacaaggcccacagcgatagagatttccgatctgat

SEQ ID NO: 81860 - DNA, 1585 bp, Zea Mays
cacccccggccacacctgacccctcccgcgctcttttcttttactctccctatttttttaggtggtggttcgtctccgccccgtccagcaccgcccgcagccggaaacggcacccctaccgaatccgccctcctctttccgttcgttccgcctcgtcgctctcgctctcgctgcaccgcccggccccagcctgccttgttcacggcaacaccggcagggacggaaaaggaaagcccaggtgtgcaaggcaggcacacatagccacaggccacggcacaggcagcgcggcgctggctacggccaaaaaccctacgcggcccctcggcccagctgcttccccctccctcttctctctcccaccaaccaacgccctttcccttgccatttttgccgagccgatccggtagagagagggagagggagggactgagggaggaggagctgggttccggtcccggccgcccggccggctgcgcgattcgattgcagctctcgtccccgggcggcgtccaggatggtgcggggcaagacgcagatgaagcggatagagaacccgaccagccgccaggtcaccttctccaagcgccgcaacggcctgctcaagaaggcgttcgagctctccgtcctctgcgacgccgaggtcgccctcgtcgtcttctccccgcgcggcaagctctacgaattcgccagcggaagtgcgcagaaaacgattgaacgttatagaacatacacaaaggataatgtcagcaacaagacagtgcagcaggatattgagcgagtaaaagctgatgcggatggcctgtcaaagagactcgaagcacttgaagcttacaaaaggaaacttttgggtgagaggttggaagactgctccattgaagagctgcacagtttggaagtcaagcttgagaagagcctgcattgcatcaggggaagaaagctcacgacttcatatcttctgatcttgcatggcagactgagctgctggaggagcaagtccgtaagctgaagcagaaggagatgagtctgcgcaagagcaacgaagatttgcgtgaaaagtgcaagaagcagccgcctgtgccgatggcttcggcgccgcctcgtgcgccggcagtcgacaacgtggaggacggtcaccgggagccgaaggacgacgggatggacgtggagacggagctgtacataggattgcccggcagagactaccgctcaagcaaagacaaggctgcagtggcggtcaggtcaggctagcagctacctcagccacgcacaggcccaatcaacgcaagctagctagctgagaataatcttttagatctctggtagtgtggagatcgagatgcaagccaagcaatgtgatatcgcgttgtgtgttaccaacctgtcagtctgtgtatcatcccgtcccgtccgtcagagtctcagagaacgaacacttcttctccctgtagctagctgctcctgcttgtgtccagatcttctgttcgatcggttttgggagtagctagggagtgggtgtcgtgtccattgggcgacgcttcggccttctgcaaggaggcttctcgagatctctggtggtggtcaaata

SEQ ID NO: 81861 - DNA, 1337 bp, Zea Mays
cgcgtcggggattgacctcgcctcctcttcctctctcaccggcaccgcccggcaacccggcttccaacggccgcgaccgaaacgggacccaccagacgcaattccccaacacggcaacacgtccgcctcgacgaatttcgatcgattccaacttgggatttccgccttccaatcgctccgtttccttcgtattctagaatctagcatttggtttgattccgccgcttggtccggccccgaggaggaggcaagggagggagcggtggccgcgcggccatggcgggctcgtctacggcggcgatggacgcagccgcggcctggtgggacgacgtgaacaactccacgctgtggcaggaccgcaccttccacgccctcgccgcgctatacggcatcgtcgcagtcgtagccctagtccaactgataagaatcgagtgccgggttcctgagtatgggtggacaacgcagaaggtgttccatttcctaaacgtcattgtcaatggcgtgaggtcaaccgagtttgtactgcggcgggatgtgcaacttgtacaccctgagatacttcaacacgtgcttattgatttgccgggcctagcgttcttcacgacctacgctctgctagtgctcttctgggctgagatttactatcagtgtcgactgatgggctccggccagctttctacacaatcaatggaatgatatatgtcattcagatactactgtggctgctcatgtggtggaaaccagttcaagccgtggtaattttgtcaaagatgttctttgcagctacatccttgttcgctgcctttggtttccttctctatggagggaggttattcctgatgttgcagcgtttccctgttgagtcaaaaggccgccggaaaaaattgaatgaggttggctatgtgaccaccatttgctttggttgcttcttgatcagatgcataatgatgtgcttgagtgcttttaacaaagatgctgatcttgatgttctgaaccatccaatcctgaacttcttttactacctgctggccgagattgcaccctcatctttggtgctgttcatcttaaggaaactgccgccaaggcgtgggattgcacaataccatccaatccattagtttgtcttcaacaacatcctctatatcctttttttttacagtatttagagaacgctttagagcaactgctgaaggtatatgggagatagttgtttatagcttcttgcgggagatagtatgtctggcaaatataacttgttaaaaatgtaacctcagggtttgttgtaatcttaactgtcaccaatataacatgtttcacgaattgatttttgcggctgt

SEQ ID NO: 81862 - DNA, 1232 bp, Zea Mays
cgcgtcggggattgacctcgcctcctcttcctctctcaccggcaccgcccggcaacccggcttccaacggccgcgaccgaaacgggacccaccagacgcaattccccaacacggcaacacgtccgcctcgacgaatttcgatcgattccaacttgggatttccgccttccaatcgctccgtttccttcgtattctagaatctagcatttggtttgattccgccgcttggtccggccccgaggaggaggcaagggagggagcggtggccgcgcggccatggcgggctcgtctacggcggcgatggacgcagccgcggcctggtgggacgacgtgaacaactccacgctgtggcaggaccgcaccttccacgccctcgccgcgctatacggcatcgtcgcagtcgtagccctagtccaactgataagaatcgagtgccgggttcctgagtatgggtggacaacgcagaaggtgttccatttcctaaacgtcattgtcaatggcgtgaggtcaaccgagtttgtactgcggcgggatgtgcaacttgtacaccctgagatacttcaacacgtgcttattgatttgccgggcctagcgttcttcacgacctacgctctgctagtgctcttctgggctgagatttactatcaggcacgtgcagtgtcgactgatgggctccggccagctttctacacaatcaatggaatgatatatgtcattcagatactactgtggctgctcatgtggtggaaaccagttcaagccgtggtaattttgtcaaagatgttctttgcagctacatccttgttcgctgcctttggtttccttctctatggagggaggttattcctgatgttgcagcgtttccctgttgagtcaaaaggccgccggaaaaaattgaatgaggttggctatgtgaccaccatttgctttggttgcttcttgatcagatgcataatgatgtgcttgagtgcttttaacaaagatgctgatcttgatgttctgaaccatccaatcctgaacttcttttactacctgctggccgagattgcaccctcatctttggtgctgttcatcttaaggaaactgccgccaaggcgtgggattgcacaataccatccaatccattagatgaatttgagcgccaccctaaaccctacttccaaaattgatctctcaaaatcagcagctacctctggttcagctggcgcagacagaagtatacaggatacgac

SEQ ID NO: 81863 - DNA, 2379 bp, Zea Mays
caaacaaagaaaatgttagtctaaaatactgaaaacccggtgcaagttcatgcatagcagtcaaagtgcaagatatgcgcattcactacccaccgattatctgccgaacacgcagcgacagatggaggaattctttttgtctcgcgaaacaggggcggaaggatccaatccaatccaaccaaacctctccccccaccacctgctgcaatcgctagcgtgcgcataaattaacaaatcccacctccactaatcgcaccacccggtaattgcaaacatcgcaagtccacggcccgcccccaatcggccaatcctcaccccgcatcttaaggttcctgtcgcctcagcggctgcctccagtcctccgccctcccgctccagcggggctcgccattgatggagtacgagcgcatccacgggccgctcccgcgccatcagtccgggggattctctccagctaagctgcgagcaatgcttcgcgggatagagaaacgccagcgcaacaacggcgaggactcgtctccggaggccaacgactccggcgagctcgacgaccggaggagcttggaatgctccacctccaccgagatgtcgagcaacagcggccacaggtcaagaaaccgtgccccggacgacgacagcttcgactcggagagcagctcgtcggggccgccgacggtgaagaggtcggccgcggtggccgcgttgctgccgcccttctctcggccaacgccgtccaagtgggacgacgccgagaagtggatctccagcccgacgtcaaaccgtactggccgtacggggcctaccgctggagctgtgccgaagaagtctgcattggccttccctgactatggaggccgcccgccagccgttgctaaggtggtagcggatgtgcctaccaacgctggaccagatggtctcgcccatcctgatttacttaagcctggacacaatgcttcagtagttgttgacggaacagcacctgcagttaggtctgtctgtatgagagacatgggaacagaaatgactccaattgcgagccaagagccttctcggaccgcgactcctataatcgcatctagtccaacctcctctcggacaccaaccccgcaacgcaccgcagaattcagtgtgagtaatatagatcctaaaaagatcgagatgcctgaagaggaggaggtacagatgagtacgagacaggaaattatggatcttggtgaaaggttagggaagaccactatagccgcatgggcaagcaaggaagagaaatctgccgcacgtttcacggataccacagcctacaaggctgccgatatcggtagggagaatcgagccgcagattggcaggagacggagaaggcgaagtatcttgcaagagggagaccgcggaggcgaggcggaaccaggaagccgcgaggacggaggagcaggcggcccggatccgatacaccgggcatacgccttcgtccttctcctgctggtgctggtgcccgtgacacccagcatggacagtggtagaaaaattccaacggttctatctttccccatgcatgaacatggagaaggaaaccttcccgttatcgcgtcgtcgtcactcacgcggttgcatggagtggactggggtagtagggtggcgccacctgtcctcgtccaccttccacccctctcgcccggggctataaatggttacgagatccggatagcgcgaacccacttggatccaaaccctgacgacggacggctcccccctcgcccccacgacaaattcctcccgttccgttcttcgtcgcagatacaccggccggcagcaaccaccctatggagtcgtcggcggcgatgacgatggaccaccaccgcgcggcgccgtcgctgtcgacggaagagaaacggcggatcgagcgggtggcccggtgcgtggcgcgggaccgggacggcggggacctcacggagaagctgctgctgcggctgctcggcctcacgcgcaacgcccgccgctggggcttcctcgcgccggaccacccgctccacccctactacctccagcacaaggtctccgagcgctgccggatcctccgcccgcgccacgccgccgccgaccggcggtgatcccatgcatatgcatgcggacgtgcagcggatcgaccattgataggactcgatcggccattaaaaaaaaactatgcgcgcaccacctggtctccttctcttttatgacatgagtaattggtaatccaacaatcatgcaacggattcggaaatacattgatgtgcctaattgcagcgtcaattatatgatagcagttggccattgatatttttcagatttgagatcgaaatgtttatgtgccgatctctttctctctatgcataaataggaggcaa

SEQ ID NO: 81864 - DNA, 2358 bp, Zea Mays
gcaaacatcgcaagtccacggcccgcccccaatcggccaatcctcaccccgcatcttaaggttcctgtcgcctcagcggctgcctccagtcctccgccctcccgctccagcggggctcgccattgatggagtacgagcgcatccacgggccgctcccgcgccatcagctttccgtcgctggcggttgtaaggatgggtctcgattgggatgggtcgagcgttccagtgcacatttgactaaaggctgatccgggggattctctccagctaagctgcgagcaatgcttcgcgggatagagaaacgccagcgcaacaacggcgaggactcgtctccggaggccaacgactccggcgagctcgacgaccggaggagcttggaatgctccacctccaccgagatgtcgagcaacagcggccacaggtcaagaaaccgtgccccggacgacgacagcttcgactcggagagcagctcgtcggggccgccgacggtgaagaggtcggccgcggtggccgcgttgctgccgcccttctctcggccaacgccgtccaagtgggacgacgccgagaagtggatctccagcccgacgtcaaaccgtactggccgtacggggcctaccgctggagctgtgccgaagaagtctgcattggccttccctgactatggaggccgcccgccagccgttgctaaggtggtagcggatgtgcctaccaacgctggaccagatggtctcgcccatcctgatttacttaagcctggacacaatgcttcagtagttgttgacggaacagcacctgcagttaggtctgtctgtatgagagacatgggaacagaaatgactccaattgcgagccaagagccttctcggaccgcgactcctataatcgcatctagtccaacctcctctcggacaccaaccccgcaacgcaccgcagaattcagtgtgagtaatatagatcctaaaaagatcgagatgcctgaagaggaggaggtacagatgagtacgagacaggaaattatggatcttggtgaaaggttagggaagaccactatagccgcatgggcaagcaaggaagagaaatctgccgcacgtttcacggataccacagcctacaaggctgccgatatcggtagggagaatcgagccgcagattggcaggagacggagaaggcgaagtatcttgcaaggtttcagagggaggaagcaaagatccaagcttgggaaaatctgcagaaagcgaaaattgaagctgagatgaaagggatagaggccaagatagagcggaaacgggcgcgcgagcaggacaggctcgccagcaagctggcagccgtaagccaccgagcggaggcgaagagggagaccgcggaggcgaggcggaaccaggaagccgcgaggacggaggagcaggcggcccggatccgatacaccgggcatacgccttcgtccttctcctgctggtgctggtgcccgtgacacccagcatggacagtggtagaaaaattccaacggttctatctttccccatgcatgaacatggagaaggaaaccttcccgttatcgcgtcgtcgtcactcacgcggttgcatggagtggactggggtagtagggtggcgccacctgtcctcgtccaccttccacccctctcgcccggggctataaatggttacgagatccggatagcgcgaacccacttggatccaaaccctgacgacggacggctcccccctcgcccccacgacaaattcctcccgttccgttcttcgtcgcagatacaccggccggcagcaaccaccctatggagtcgtcggcggcgatgacgatggaccaccaccgcgcggcgccgtcgctgtcgacggaagagaaacggcggatcgagcgggtggcccggtgcgtggcgcgggaccgggacggcggggacctcacggagaagctgctgctgcggctgctcggcctcacgcgcaacgcccgccgctggggcttcctcgcgccggaccacccgctccacccctactacctccagcacaaggtctccgagcgctgccggatcctccgcccgcgccacgccgccgccgaccggcggtgatcccatgcatatgcatgcggacgtgcagcggatcgaccattgataggactcgatcggccattaaaaaaaaactatgcgcgcaccacctggtctccttctcttttatgacatgagtaattggtaatccaacaatcatgcaacggattcggaaatacattgatgtgcctaattgcagcgtcaattatatgatagcagttggccattgatatttttcagatttgagatcgaaatgtttatgtgccgatctctttctctctatgcataaataggaggcaa

SEQ ID NO: 81865 - DNA, 2270 bp, Zea Mays
gcaaacatcgcaagtccacggcccgcccccaatcggccaatcctcaccccgcatcttaaggttcctgtcgcctcagcggctgcctccagtcctccgccctcccgctccagcggggctcgccattgatggagtacgagcgcatccacgggccgctcccgcgccatcagtccgggggattctctccagctaagctgcgagcaatgcttcgcgggatagagaaacgccagcgcaacaacggcgaggactcgtctccggaggccaacgactccggcgagctcgacgaccggaggagcttggaatgctccacctccaccgagatgtcgagcaacagcggccacaggtcaagaaaccgtgccccggacgacgacagcttcgactcggagagcagctcgtcggggccgccgacggtgaagaggtcggccgcggtggccgcgttgctgccgcccttctctcggccaacgccgtccaagtgggacgacgccgagaagtggatctccagcccgacgtcaaaccgtactggccgtacggggcctaccgctggagctgtgccgaagaagtctgcattggccttccctgactatggaggccgcccgccagccgttgctaaggtggtagcggatgtgcctaccaacgctggaccagatggtctcgcccatcctgatttacttaagcctggacacaatgcttcagtagttgttgacggaacagcacctgcagttaggtctgtctgtatgagagacatgggaacagaaatgactccaattgcgagccaagagccttctcggaccgcgactcctataatcgcatctagtccaacctcctctcggacaccaaccccgcaacgcaccgcagaattcagtgtgagtaatatagatcctaaaaagatcgagatgcctgaagaggaggaggtacagatgagtacgagacaggaaattatggatcttggtgaaaggttagggaagaccactatagccgcatgggcaagcaaggaagagaaatctgccgcacgtttcacggataccacagcctacaaggctgccgatatcggtagggagaatcgagccgcagattggcaggagacggagaaggcgaagtatcttgcaagagggaggaagcaaagatccaagcttgggaaaatctgcagaaagcgaaaattgaagctgagatgaaagggatagaggccaagatagagcggaaacgggcgcgcgagcaggacaggctcgccagcaagctggcagccgtaagccaccgagcggaggcgaagagggagaccgcggaggcgaggcggaaccaggaagccgcgaggacggaggagcaggcggcccggatccgatacaccgggcatacgccttcgtccttctcctgctggtgctggtgcccgtgacacccagcatggacagtggtagaaaaattccaacggttctatctttccccatgcatgaacatggagaaggaaaccttcccgttatcgcgtcgtcgtcactcacgcggttgcatggagtggactggggtagtagggtggcgccacctgtcctcgtccaccttccacccctctcgcccggggctataaatggttacgagatccggatagcgcgaacccacttggatccaaaccctgacgacggacggctcccccctcgcccccacgacaaattcctcccgttccgttcttcgtcgcagatacaccggccggcagcaaccaccctatggagtcgtcggcggcgatgacgatggaccaccaccgcgcggcgccgtcgctgtcgacggaagagaaacggcggatcgagcgggtggcccggtgcgtggcgcgggaccgggacggcggggacctcacggagaagctgctgctgcggctgctcggcctcacgcgcaacgcccgccgctggggcttcctcgcgccggaccacccgctccacccctactacctccagcacaaggtctccgagcgctgccggatcctccgcccgcgccacgccgccgccgaccggcggtgatcccatgcatatgcatgcggacgtgcagcggatcgaccattgataggactcgatcggccattaaaaaaaaactatgcgcgcaccacctggtctccttctcttttatgacatgagtaattggtaatccaacaatcatgcaacggattcggaaatacattgatgtgcctaattgcagcgtcaattatatgatagcagttggccattgatatttttcagatttgagatcgaaatgtttatgtgccgatctctttctctctatgcataaataggaggcaa

SEQ ID NO: 81866 - DNA, 858 bp, Zea Mays
ctttgttgtgccagaaacatgcattgttttatcattaaccagaattgagttagggattatcattaaggcattaaccaaaatggagttaggatgtctttttttgtagtgtagaaaacgttgtgtatactgaaatgtgcatgcttgcaacatgtctgatatggattatatttgagtgatatctttgttgaagaacatgtgaaattagagttctggtggtcttctagaacacacactgctcctcatctttactttctctacataattcttcaatatgttggtatgttcccgtgactccttggtttagctatccttatacatgcatgttgttacataaatcaattagtttttcccttaaggacaggcctggtgcagtggtgagaggcctttccactgagccaaagggcctgggtttgacgcagcctctgcgcaaaaatgtagggttaaggattgcctcggttattacttccccagacccgactcatgcgggagccgtcagcactgggagatatacgtggagcgtcagaattatatgtgcatctacaagaacagttacaacaattctccatcaggttggtgttcatacatatcagatgtaaatatggggagacggtgcctcatcaatgacgagtaggttgattctcatctagcggcaccattgctcatcacaactgatttgcttgagcaacttaatgtcactctcaagaggaccctcctttcgaccgacaccctgaagcaccacacaagctttagaaagtcggaattgtactccgtatacataaattaccatgatattatatgttcatgtaattctatgttgattctttagaaataatatatatgatattgtaatgtgtgttc

SEQ ID NO: 81867 - DNA, 1219 bp, Zea Mays
gcactgtgtccggtcccggatgccgatccgcttctatccctgcggccctccctgcccatctcccgatttccccgcgtgcgctctctctctccgtcggcgacgagcctgggcgaccagcgccgccgcccctagcccaggtctccatcggacgcttcgccaggtcttgtttagacccaccgccggcaacgagcaactcttgatgcatgatttagcagcgacaaacttggagtagtcaaaaccgcaaaagttatcggatcccgcatcgtggaatgcttgccaaagggaggaaggtagctggaaggcgtgaagaaatgtctgcaaattatgcgtttggaccacaggatgatgatgcgattattaaacacaggcttctgactaggacaacgaccaccaggggtgaaccgccactaaagaagcttcagaagaagttcatgtcctttgcaactgagatcgagaaggatgcagataacataagtgactgtgaaagactgtacaaggcctttctacatgaaattaacacctttgagctacctcttctgaaaagcaaggctgtggttgatgcaaacattagggagaaagaaagctttaatgagctgcaggttgagattgagcggcagatcttgcatgctaagactgatattgaggaccttaagaagcaacttgagcagagcaagattgagaggcagcacaaagaagagtgtgaagccatccggaagctgattagtttgcagcctccacggtcagaaactgaaaaactcattgcagaccttgagaaggagataactgatttgaaggcggagaatgtagcatgcataaggactttggaactgaggaagaagcagtttgcccttcttctacatgtggttgaggaattgcagatctcgattgaagatgagcagaagagtatagcagatgagctgagagctattgctggagagcagaagatgagcatggaagaagggagcgtcggtgcttcagattccatggttgttgactgatcgagatacattcacatatgttgcagacctgcttgccaaaatccatcacatggtttttggacaatatggcgatttggtagatgtcttttgcggtgtctttgtacctcatgtaaattgaactgtatgctagtatgaagtgaaattgaagtacacgttgttgtgtaacaaagtcagttcttattgatgaattcagtcaatatatgttacttcacaagcatagt

SEQ ID NO: 81868 - DNA, 924 bp, Zea Mays
actgtgtccggtcccggatgccgatccgcttctatccctgcggccctccctgcccatctcccgatttccccgcgtgcgctctctctctccgtcggcgacgagcctgggcgaccagcgccgccgcccctagcccaggtctccatcggacgcttcgccaggtcttgtttagacccaccgccggcaacgagcaactcttgcactcttttgatttcagttatcggatcccgcatcgtggaatgcttgccaaagggaggaaggtagctggaaggcgtgaagaaatgtctgcaaattatgcgtttggaccacaggatgatgatgcgattattaaacacaggcttctgactaggacaacgaccaccaggggtgaaccgccactaaagaagcttcagaagaagttcatgtcctttgcaactgagatcgagaaggatgcagataacataagtgactgtgaaagactgtacaaggcctttctacatgaaattaacacctttgagctacctcttctgaaaagcaaggctgtggttgatgcaaacattagggagaaagaaagctttaatgagctgcaggttgagattgagcggcagatcttgcatgctaagactgatattgaggaccttaagaagcaacttgagcagagcaagattgagaggcagcacaaagaagagtgtgaagccatccggaagctgattagtttgcagcctccacggtcagaaactgaaaaactcattgcagaccttgagaaggagataactgatttgaaggcggagaatgtagcatgcataaggactttggaactgaggaagaagcagtttgcccttcttctacatgtggattatctacaacatcaattctcttttgttaaatccaccatgaaatgtcttgatagtgcgtttatttggtatttagataattagtactttttat

SEQ ID NO: 81869 - DNA, 726 bp, Zea Mays
ttatgattagttttatttatcggatcccgcatcgtggaatgcttgccaaagggaggaaggtagctggaaggcgtgaagaaatgtctgcaaattatgcgtttggaccacaggatgatgatgcgattattaaacacaggcttctgactaggacaacgaccaccaggggtgaaccgccactaaagaagcttcagaagaagttcatgtcctttgcaactgagatcgagaaggatgcagataacataagtgactgtgaaagactgtacaaggcctttctacatgaaattaacacctttgagctacctcttctgaaaagcaaggctgtggttgatgcaaacattagggagaaagaaagctttaatgagctgcaggttgagattgagcggcagatcttgcatgctaagactgatattgaggaccttaagaagcaacttgagcagagcaagattgagaggcagcacaaagaagagtgtgaagccatccggaagctgattagtttgcagcctccacggtcagaaactgaaaaactcattgcagaccttgagaaggagataactgatttgaaggcggagaatgtagcatgcataaggactttggaactgaggaagaagcagtttgcccttcttctacatgtggattatctacaacatcaattctcttttgttaaatccaccatgaaatgtcttgatagtgcgtttatttggtatttagataattagtactttttat

SEQ ID NO: 81870 - DNA, 2755 bp, Zea Mays
agccttatcccaaaccgcctcctctctgttgattccgtggagcaccagccaagctcctcccctgcggctcgcctccctcacggcgccgcctgctccccattgccgacctccactcgagcacctgagcaagcgctcctgaggtcgtcgtcttccccatccctcccatggcgccctcacctctgctcctcccagcgccctggctctgttcaaccttcacagtgagctcgccctcagccatggcggatgatgcctccacctcccccttggtgctcgccgagctcgccctcagccctgccgcgcccctgctttctgttcccagtgcgccctctgttctgttccaaccgttctccacgccgtgttcccccatggctccccttgcctctccggtcagcactagcccgaacggtacagcagcatactggtgccaaacccgtgtccgcgacgctcgccaagtgctcgatgaaataccgcagtgagctccacctcgacctgtgcagccccaacccgcgacgtcgcaacacccttgccctccgtcgatgtcgcgcttcgcgcattgctcctcgacgaagagccagaaccgtggtagacatgcatgcgcaatccgaactaatttcacctggttgttcgctttatgtgattgtggtttgctctaattacgtgtggtcgatggcgtgaatatgtgtgtgaaaatgtaagcacatactctcatgcttaacaaaacaatccaaaatattaccatatatggttgcaacagcagagtgccaaacaatggaaatcaaaatcgacttacttcttcgtgtgcttcatccactgtggtgctacatgactcttgttttcattcttctcctcgctagcgtctacatctggcctcacctcccaggaaactccagatggaactgcgttgcatggctccatggagtccactgaacatggttcttgtaccttacccagttcaatagttctcttctgctgagattaatttgtggcgttatcatgcataaattatatttaattgaacaattgcaaaataaggttagagaacatcgttaatacaagcaacacatactctatcagaagcttcagttattacagtaggagctgcagtttggataatgttcttggtcccctcagattcatcatcattactatctgtgtgattcaagtctccagatgcggctttgcataaagtatcaagcttctcctgcaagcaaatcagttctcgagcaacagacttcctagcttcccttacacttggatgcaagccctgtgtcaatattaccaaggtcttagaaacaacccagcaagtaccaaaaaagtttaccaaataagaaataagtctatgccactcagagaaaaacaggctggaatgaaaaatatacctggattgcgtcaagcttcaggagtaaattcataatagtttcacctatggccacttgctctttttgtgttggcttactgcaagaatctaaaaggcattgaatctgcttcctcacaacttgcatctgttcatgcacatgcttgatcttccagagcttatccaaaggttgccattttcgaacatcataccctctgtaggcagactgaataccaactgcaacatctgattctgacaaattaactccatatgttctggcatcatctttcgcagtttcactttcaatcactgtcccatcttcattttttcttttgtcacatccattcaagcttcctgcaccagcatcttcttgcacatgatcttcccctatgctcttcagggctgcattttcttgatcaccaactgtagtgctagcagcttggaccttttggccatctttacttgtgggagcttcttcctcctgcagatgttcaacaaaagcagcttccactgtttcatttctgaacccaacttccttcttcatttcataaggcgatttttctttcacttcagacacagtgatatccttacttgtactagactgtttaggctccaggatacttcttgtttgggtgttgaattatactgtcactatcagcattcttgtagataatctttttatcttgcttgtgttaaaatttcatgaccataggtgtagtagtttatgagttatgatttttccaagtccagtttcagaatctgtccaaattctgtacaggtttcgaaaattggattgtttggctaaactaaactgagaatcagcccttagtaattatagaaaaattgtagtatttttcttaagctttccaacaaattttggagcaccatttttggtggtctagagatcaagttacatctgtttgaactagagagtctgaatctgtccaaatttggacagcgaagtctgtttgtagtaactgactttgatatgtattgtattaaccagagatgtttataaatgaattgtagacaattctattagctttctaaaaagtctaggatcacctgatttcgatgcctgaaactccagttatgatttttttgaagtgagtagccgaattctgtccaaatctggacagaattaaagtttagcactgtttgacctttcaaactgtcgaatcatgttgtgatgataatataagagttatagaggactttctaagctttccaaaaagtcctagtttactatttttggatcattggatgcatattttgtgagctatgaataaaacaattaaccgatgcggctgtgctgctgtctaaaaattctgcaagtattaaattgttggcttgaagttactattgtttggctaagtaagtttagctgattcttaattggtg

SEQ ID NO: 81871 - DNA, 687 bp, Zea Mays
cagcactgcagtattttttgttgaattaacctatactcacttcattttatttatataatacagtctatttagctaattttgtttgatgtccagtgacacgaccttgacagtcaagatgttcttttaggttattttctcgtgaaaccacttcttttgccatctcctaatgttatggtcccattacatctccattcattgcaggagatggtcccagttaccttacatggttctgttggacacaatgaagccatccagatatgctattaaaaatcctgctagtcattatggctttaaactgtaccacgtatgttctattttcagctaagcagagcatgttctatttacagcaggccagcagacaccaggcagtaaggtgatgtatgagtcaattatcagaacctttttggacacccaaatgtcgaaagatgcccattcctgaggaatatcaatggagctacaaccttttcccctcacttctgctttgccagtagctgctcaaagaggcaagggtccaatttttgaggaagggtcaggctttgagtcagcattcaagcttttctatggccgagatggaatagttcccctttgagaaagatcatatgtatctgatgaaaaccacaatttagagtacacttatgtatgagttatttgacaatgcttatttatgagatattgaatgttatttat

SEQ ID NO: 81872 - DNA, 2134 bp, Zea Mays
atgaggacccaaagaaacctccttcccctcctcctgctgctgtccgccgcgctgctcgccgtcgccgacgcgcaggagcgcaagaactacgtggttcatctcgagccgagggacgacgacggcggcggcgggtcggtggaggagtggcaccggtctttcttgccggaggccacgctggactcggcggcggatgacgggcccaggatcatccactcgtacagccacgtgctgacggggttcgccgccagcctcactgacgcggaggcgcagacgctgaggcgcaaggaggggtgcttgcggctgtacccggaggagttcctgccgctggctaccacccactcgccgggcttcctcggcctccacatgggcaagcacggcttctggggccgatccgggttcggccgcggcgtcgtgattgggctcctcgacaccggcatcctgcccacccacccgtccttcggcgacgcggggatgccaccgccgcccaagaagtggaagggcgcctgccagttcaggtccgtccaccgcggcgggcaacttcgtgcagaacgccggcgtgcggggcaacgcgcacggcagggcgtccgggatggcgccgcacgcgcacctggccatctacaaggtgtgcacgcggagccggtgctccatcttggacatcgtcgccggcctggacgccgccgtcagggacggcgtggacgtgctctccttctccatcggcgccaccgacggcgcgcagttcaactacgacctcatcgccatcgccacgttcaaggccatggagcacggcatcttcgtcagcgccgcggccggcaacgacggccccgccgcggggtccatcaccaacggcgcgccgtggatgctcacggtcgcggcgggcaccacggaccgcgcgatacgcacaaccgtgaggctcggcaacgggcaggagttccacggcgagtcgctgttccagccccggaacaacaccgcggggcgcccgctgccgctcgtcttcccggagtcccgcgactgcagcgcgctggtggaggccgaggtgaggggcaaggtggtgctgtgcgagagccgctccatcagcgagcacgtcgagcaggggcagacggtggccgcgtacggcggcgccggcatggtcctgatgaacaaggcggcggaggggtacaccaccttcgccgacgcgcacgtgctggccgcgtcgcacgtgagccacgccgcggggtcgaggatcgcggcgtacgccaggtcggcgcccaggcccacggcgtccatcgcgttccggggcacggtgatggggtcgtccccggcgccgtccgtggccttcttctcgtcgcgcgggcccaacagggcgagcccgggcatcctgaagccggacatcacggggcccggcatgaacatcctggcggcgtgggcgcccagcgagatgcacccggagttcgcggacgacgtgagcctgcccttcttcgtggagtccgggacgtccatgtcgacgccgcacctgagcgggatcgcggccgtcatcaagagcctgcacccgagctggtcccccgcggcggtgaagtcggcgatcatgacgtcgtcggacgcggcggaccacgcgggcgtgcccatcaaggacgagcagtaccggcgggcgagcttctacagcatgggcgccgggtacgtgaacccgtcccgcgccgtggacccggggctggtgtacgacctcggcgccggcgactacgtcgcctacctctgcggcctgggcatcggggacggcggcgtgaaggagataacggggcgccgcgtcgcctgcggcggcaagcggctgaaggccatcaccgaggcggagctcaactacccgtcgctggtggtgaagctgctgtcccgcccggtcaccgtccgccgcaccgtgaccaatgtcgggaaggccagctccgtgtacagggccgtggtggacatgcccagcagggccgtgtccgtggtggtgcggcccccgacgctgcggttcgacagggtgaacgagaagcggagcttcaccgtgacggtgcggtggagcgggccgccggccgtcggcggcgtcgagggcaacctgaagtgggtgtcgagggatcacgtagtccgcagcccgatcgtgataccgccggcgaaggccaccgcgtag

SEQ ID NO: 81873 - DNA, 1757 bp, Zea Mays
acgaaccaagtccaaggcacgccaggcaaaagaacacgccgagcacgcacacccacacgcgagtccctttcccttcccttccaggctgcccgcccggctgcctgttgttatcgtcgtcgtcgtcgcatcccccaccccactccgcgtgtcgatctgctccccccaaaccacacggacgcacacacacggacgcacgcacgaatcaatcaggcaccacaccacccccttccctgcgtcccggagacagaaaagtctcctcccatctccgccctggccccctctcaaacatccccgcggcgatggatctccgtctcgcccactagcccgccagcgcgaccgtgggtgtgggtgggtacggggatgggactcctcgggcggaggccgtggctgctgctcctcgccctcgcttccgcggccgtcgccgtcgccgtcgccgtggaagcctccgagggcgacgctgatccgctctacagagcctgtgtggaaggatgccaaaaaacaggctccctgaaggaggcttctattaaacactgtatggtgccaaccgatggccagcctgctgacaaatcgtggtacgcgcacgagccgctgtacttgcaatggaaggactggaactgcaagagcgaatgcagataccactgtatgatggaaagggagggcgaaagagcaaagcttggccttcagcctgagcctttatctgcagctctctccgctcttactctcgttgtgcaatttaatgggtggctatcgttcttcctcttgctttattataagcttcctctacggccagaaactcacaagacatactacgaatacactggcctgtggcacatctatgggctccttgccatgaattcatggttctggagtgccatatatcacagttgtgacacaatttggacagaaaagctatatttttcatcagctgctgcctttctggggtactctctcattttggcgatactgcggacttcaagtttaagagacgaagcttctagagtcatggttgccgctcctattctggcatttgtgacaacccacattctgtacctcaacttctatgagcttgacaaaggcctaaacatgaaggtttgtactgtgataagcattgctcagtgtctcctgtgggcactgtgggctgtcatgagtgggcatcgttcgcggctcaagatcatatctgtcgccgtcggaggtgcggttgcagtacttgtggaagcctacgacattccaccgcgatggggatacgcagatggccgtgctatctgcctcgctgtggctatccccctgtcgtacctttggtggagctttgccaaggaggatgctgagatgcgaacatcagcaatcctaaagaagacacgataacgaggaaatgcgacatgccgcctgtgtgcacccacccagccattgtaaagataaaagtttcacttgtaatcttagcaactgaacacttggtaggctcgtgctcatcaactgcaatctcagaagattgttaccatgcgttagtgaatggccgcttatcataataatgtctgtgggcgcttttgttggctatttcttgtgagatcctgagcaaatttggtgtgcaattgttgtataaaacatgaagaaaaagatgaagttgaaacgcatcgcacgcttagtagtgtttggttccggattgtggtaagaagtgtttggttctggattgtggtagtacacagttgttttgttcatgatttgacgttatttggattggtctcatatagaaagactctaaa

SEQ ID NO: 81874 - DNA, 1805 bp, Zea Mays
acgaaccaagtccaaggcacgccaggcaaaagaacacgccgagcacgcacacccacacgcgagtccctttcccttcccttccaggctgcccgcccggctgcctgttgttatcgtcgtcgtcgtcgcatcccccaccccactccgcgtgtcgatctgctccccccaaaccacacggacgcacacacacggacgcacgcacgaatcaatcaggcaccacaccacccccttccctgcgtcccggagacagaaaagtctcctcccatctccgccctggccccctctcaaacatccccgcggcgatggatctccgtctcgcccactagcccgccagcgcgaccgtgggtgtgggtgggtacggggatgggactcctcgggcggaggccgtggctgctgctcctcgccctcgcttccgcggccgtcgccgtcgccgtcgccgtggaagcctccgagggcgacgctgatccgctctacagagcctgtgtggaaggatgccaaaaaacaggctccctgaaggaggcttctattaaacactgtatggtgccaaccgatggccagcctgctgacaaatcgtggtacgcgcacgagccgctgtacttgcaatggaaggactggaactgcaagagcgaatgcagataccactgtatgatggaaagggagggcgaaagagcaaagcttggccttcagcctgttaagtatcatggcaaatggcctttgaaacgcgcctctgtgtttcaggagcctttatctgcagctctctccgctcttactctcgttgtgcaatttaatgggtggctatcgttcttcctcttgctttattataagcttcctctacggccagaaactcacaagacatactacgaatacactggcctgtggcacatctatgggctccttgccatgaattcatggttctggagtgccatatatcacagttgtgacacaatttggacagaaaagctatatttttcatcagctgctgcctttctggggtactctctcattttggcgatactgcggacttcaagtttaagagacgaagcttctagagtcatggttgccgctcctattctggcatttgtgacaacccacattctgtacctcaacttctatgagcttgacaaaggcctaaacatgaaggtttgtactgtgataagcattgctcagtgtctcctgtgggcactgtgggctgtcatgagtgggcatcgttcgcggctcaagatcatatctgtcgccgtcggaggtgcggttgcagtacttgtggaagcctacgacattccaccgcgatggggatacgcagatggccgtgctatctgcctcgctgtggctatccccctgtcgtacctttggtggagctttgccaaggaggatgctgagatgcgaacatcagcaatcctaaagaagacacgataacgaggaaatgcgacatgccgcctgtgtgcacccacccagccattgtaaagataaaagtttcacttgtaatcttagcaactgaacacttggtaggctcgtgctcatcaactgcaatctcagaagattgttaccatgcgttagtgaatggccgcttatcataataatgtctgtgggcgcttttgttggctatttcttgtgagatcctgagcaaatttggtgtgcaattgttgtataaaacatgaagaaaaagatgaagttgaaacgcatcgcacgcttagtagtgtttggttccggattgtggtaagaagtgtttggttctggattgtggtagtacacagttgttttgttcatgatttgacgttatttggattggtctcatatagaaagactctaaa

SEQ ID NO: 81875 - DNA, 1046 bp, Zea Mays
aataacgtaataatggcaaaatagcaaatgcccctatcaccgcctccgacccatggacgtcgagggcgaggtccccgccgccgctgcagcggcgatggcgaacggcctgggcggcgccgatgaggcctctccggcgccggtctcgcccgagcagctcgacgtggaggcgtacgcggcgcagtactcggggcggacccgcctcgcccgaggcgtcttcgtcgcggaccggtgcggggtggaggcgatacagctcgaggcgctgcggatggcgtacgacgagatcaagcgcggggaggacgtgcagctcgaccgcgacgtcgccgccaagatcggcggccgcctcggcccgcgctacggcctcgaccaggcgtgggtcgacaccatcacccgccgcgccgatcagcgcaatgagaagctcgagaacgagctcaacggatacagaactaacttaatcaaagagagcatcagaatgggctacaatgacattggcgatttcttctatgcccatggccaactttcaaaagctacatcaggactcgggactattgcaccacttccaaacatatagttcagatgtgtatgaatgtgattcaggttagcattgagctggggcaatatgcacacatgtttcaaactatgtcagcaaagcagagcaaaccccggactctctggatcctatcattgttgcaaagctgaaagcagctgcaggcttggccaacatggaaacaaagaaatacaaacttgctgcacgcaaggtatacaaataccttccaagagtaccacccagtgcaggcaacgttctcggtcaaataaagcgccattaaggaatcacttgcataaattgttgccttcgaggtgccatacttgataaagaatggaactggcaaagcttttggatcgtgtgccaatacctgtgaaagagggcttggaggaacccagtgcaaagatcaatggtctgctgcaagcgtatatttctaggttgaaactagaaggcctttctcttagttctgacatcgtctacattagacagtcagtggcgggcttgg

SEQ ID NO: 81876 - DNA, 1592 bp, Zea Mays
tgtttgcaatgcggtatgctactcgctccttcataacttcgaaggtacagtgacacgttttatatagcgcacgcaccttctttcgccacccataccatctgcatcaaaatcaaatgtttgtatagttaaaaacaatatagtaattggattagaatgaatagaatatgtagtagttgatatagagggaatatatagcccctatttgtttcagttttttggaccttctagccaccaaaagctgctgcggactgtcaaacgctaaggttttcagtcagcttctataaaatttgtttgggtaaaaaccattcaaaatcaacataaacacataatcagttaagtcgttacaatagtaggaatccttcactttttagatccagagttctatgaacacctatatcttccttcgcacgtaatccaatgatactcagattctctacacagtcagattcttctcacagccagattatcagaaaagctggtcagaaaaaagctgaaccaaacaggcccatagaggaatatgagtgtggaggattgtaacacagagtaaaaaaatttaatgactaaattataaataaaaatatagagccttaccaccggcctcgtcgatcgcggagtgcgccctagccacatcgccgccaccctcgccctcaacaggtgttgctctctacctacgaggaggaagtggagcagatgggtggtgggtcaggatctcaaggtggcggtagcaacaacgacagggggagcaaatcgatttctgacagaaaaaacagaacgagtgggtaaaccttgcgatttttcattgccgcaagttcttggatctaaacaagcctggaaaaaataaaggaaaataacaaggcgttgttgggatggattgatgaggacaattctcacgaacgattgaactgccgctcagctcacctgacagatctgtctgtgcgtaagtgccggtatacaaataccttccaagagtaccacccagtgcaggcaacgttctcggtcaaataaagcgccattaaggaatcacttgcataaattgttgccttcgaggtgccatacttgataaagaatggaactggcaaagcttttggatcgtgtgccaatacctgtgaaagagggcttggaggaacccagtgcaaagatcaatggtctgctgcaagcgtatatttctaggttgaaactagaaggcctttctcttagttctgacatcgtctacattagacagtcagtggcgggcttggacctaaatcgatcagaggcccatcattaaagaacaagttgatctcttctcttaccaagttatgttctctgaagtcatagctcctcaagaagtcaagatgtggcggtctatggtgccctttgtgcacttgcttcttttgaccgttcagacctgaagaacaaagtcatcgacaatatcaacttccgtaactttctagagctggtgcctgaagtaagggagctggttaatgattttaatgcaagtcgctatggatcttgcttgggtcatctggagaagctaaagcctaacctgctcctggatatccatttgcacgagcatgtagagagtctgtatatggatattcgccacaaagcga

SEQ ID NO: 81877 - DNA, 1875 bp, Zea Mays
ctcgctccttcataacttcgaaggtacagtgacacgttttatatagcgcacgcaccttctttcgccacccataccatctgcatcaaaatcaaatgtttgtatagttaaaaacaatatagtaattggattagaatgaatagaatatgtagtagttgatatagagggaatatatagcccctatttgtttcagttttttggaccttctagccaccaaaagctgctgcggactgtcaaacgctaaggttttcagtcagcttctataaaatttgtttgggtaaaaaccattcaaaatcaacataaacacataatcagttaagtcgttacaatagtaggaatccttcactttttagatccagagttctatgaacacctatatcttccttcgcacgtaatccaatgatactcagattctctacacagtcagattcttctcacagccagattatcagaaaagctggtcagaaaaaagctgaaccaaacaggcccatagaggaatatgagtgtggaggattgtaacacagagtaaaaaaatttaatgactaaattataaataaaaatatagagccttaccaccggcctcgtcgatcgcggagtgcgccctagccacatcgccgccaccctcgccctcaacaggtgttgctctctacctacgaggaggaagtggagcagatgggtggtgggtcaggatctcaaggtggcggtagcaacaacgacagggggagcaaatcgatttctgacagaaaaaacagaacgagtgggtaaaccttgcgatttttcattgccgcaagttcttggatctaaacaagcctggaaaaaataaaggaaaataacaaggcgttgttgggatggattgatgaggacaattctcacgaacgattgaactgccgctcagctcacctgacagatctgtctgtgcgtaagtgccggtaaatctcttctcttccttgctcctccctccgtcacatggattagttgtcgatctcgattcttgttattgcccccttccttgctcctcctccctcctccctcagtcacatttttatagagaggttccaactttcttttttatttcaatcaagattcaattttccattgaatggttgattttatcagctacaacttttatagatgtaaaacattattcggtgtttctggtactattagtttatatgagtttacaatttcacattgtaatctgaatacgatcaagatacttagtttattttcctatgttgaaggtatacaaataccttccaagagtaccacccagtgcaggcaacgttctcggtcaaataaagcgccattaaggaatcacttgcataaattgttgccttcgaggtgccatacttgataaagaatggaactggcaaagcttttggatcgtgtgccaatacctgtgaaagagggcttggaggaacccagtgcaaagatcaatggtctgctgcaagcgtatatttctaggttgaaactagaaggcctttctcttagttctgacatcgtctacattagacaggtataatgatgttttcctacacttgtagtcagtggcgggcttggacctaaatcgatcagaggcccatcattaaagaacaagtcatagctcctcaagaagtcaagatgtggcggtctatggtgccctttgtgcacttgcttcttttgaccgttcagacctgaagaacaaagtcatcgacaatatcaacttccgtaactttctagagctggtgcctgaagtaagggagctggttaatgattttaatgcaagtcgctatggatcttgcttgggtcatctggagaagctaaagcctaacctgctcctggatatccatttgcacgagcatgtagagagtctgtatatggatattcgccacaaagcga

SEQ ID NO: 81878 - DNA, 2401 bp, Zea Mays
cgaaggtacagtgacacgttttatatagcgcacgcaccttctttcgccacccataccatctgcatcaaaatcaaatgtttgtatagttaaaaacaatatagtaattggattagaatgaatagaatatgtagtagttgatatagagggaatatatagcccctatttgtttcagttttttggaccttctagccaccaaaagctgctgcggactgtcaaacgctaaggttttcagtcagcttctataaaatttgtttgggtaaaaaccattcaaaatcaacataaacacataatcagttaagtcgttacaatagtaggaatccttcactttttagatccagagttctatgaacacctatatcttccttcgcacgtaatccaatgatactcagattctctacacagtcagattcttctcacagccagattatcagaaaagctggtcagaaaaaagctgaaccaaacaggcccatagaggaatatgagtgtggaggattgtaacacagagtaaaaaaatttaatgactaaattataaataaaaatatagagccttaccaccggcctcgtcgatcgcggagtgcgccctagccacatcgccgccaccctcgccctcaacaggtgttgctctctacctacgaggaggaagtggagcagatgggtggtgggtcaggatctcaaggtggcggtagcaacaacgacagggggagcaaatcgatttctgacagaaaaaacagaacgagtgggtaaaccttgcgatttttcattgccgcaagttcttggatctaaacaagcctggaaaaaataaaggaaaataacaaggcgttgttgggatggattgatgaggacaattctcacgaacgattgaactgccgctcagctcacctgacagatctgtctgtgcgtaagtgccggtatacaaataccttccaagagtaccacccagtgcaggcaacgttctcggtcaaataaagcgccattaaggaatcacttgcataaattgttgccttcgaggtgccatacttgataaagaatggaactggcaaagcttttggatcgtgtgccaatacctgtgaaagagggcttggaggaacccagtgcaaagatcaatggtctgctgcaagcgtatatttctaggttgaaactagaaggcctttctcttagttctgacatcgtctacattagacaggtagctttgattgctattctcctatcacatggcgctttacttgcttctacagacgctattaactatttctattcagaatgctaacggtctgctattttttcctctctactctacatgtaattcagttctcgggtgttcttgcttggcccttcttagcactattgtctactacactccaaaatgtgcttttaaccagggctgttgtctattgtacctcagttggggatttgccagtagaccaggaatgctgatttaacatttttagtgtttcatgcaaagatggtataggatatatgcaattaattgcaacgatatacggttgctatttccgtatacagttattgtgtccctctctttggatatcgaagaaggtctaccttggagcactttcatggagtttgatggccactattgcggatgataaatatagcgcaacaatctattattattggatctcttgtagttgtcgtatctgatgttgtaagccagaaaatattttcttagaattatcgaattcttcaccgtctttggatagggcgtccgaaggggcgccgcctgatctagtatgatgtaagataagatattttttaagtatttcttgcatgactctgctggtagctggagttgtttacttttaagtgaatttggttataggtataatgatgttttcctacacttgtagtcagtggcgggcttggacctaaatcgatcagaggcccatcattaaagaacaaggttagtatttaatttttttgtcaagccaaatggtcgcaactagcaactaatgtagtttgcacaagttcagggatggtcatgccccaaccactgcctgtaattctatcacatctggatatatatcccattttcagttataacggaatgtccctcactccctgtgtagttgatctcttctcttaccaagttatgttctctgaagtcatagctcctcaagaagtcaagatgtggcggtctatggtgccctttgtgcacttgcttcttttgaccgttcagacctgaagaacaaagtcatcgacaatatcaacttccgtaactttctagagctggtgcctgaagtaagggagctggttaatgattttaatgcaagtcgctatggatcttgcttgggtcatctggagaagctaaagcctaacctgctcctggatatccatttgcacgagcatgtagagagtctgtatatggatattcgccacaaagcga

SEQ ID NO: 81879 - DNA, 3693 bp, Zea Mays
ctaatatatatattggagttcataactccctgcaccacccacacgaggctccagggcctccatcgccacaccggtgcgtgcgagcgcgattaccagaggcgggcggcagggacgatgctgctgcaaaggcgcggcggcctcctctgctgcgggtgcggcgccagcgccgtggccgtggccgtcagtggccgcgttccggaagacgacggcggtgccgtcgtcgatggccagccgcctgacgccaagagcgtgtctggtaccagtgtctccgctgccgtgacgaccgcaaacgcgaggcagctctcgtgggcgcaggtggaggccatgacgggaggcttcacgtcagccatcgtcggcgagggcggcttcagcaccgtttacctcgcccgcctcgctggctccctcgccgccgtgaaggtccatcgtagtagcgagcgtcttcatcgcgcgttccgccaggagctcgacgcgctcctccgcgttcgccatccccacatcgtccgcctcctcgccttctgcgaccagcgagacgaaggcgtgctggtgctagagttcgcgccgaacggcagcctgcacgagcagctccacggcggcggcgcgggcgcggcgccgatgccgtgggcgcggcgggtgccggtggcgctgcaggtggcccgcgccctggagtacctccacgagcggtgcgagccgcaggtggtgcacggcgacgtgaaggcgtcgaacgtgctgctggacgcgggcatgggcgccaggctgtgcgacttcgggtcggcgcgcgcggggttctcggcggccgtggccgttgccgctgcaggcccgcgcccgcgcgccgtgttcgggtccccgggctacgtcgacccgcactacctccgctccggcgtgagtccagcagatagaagcagtcaaccagcagcagcccaagtcaagcctcctcgcgtgtccctcggctcccacgcccacaccgaaatttcccccacggagctcaactgccggtgccggcgcgcgacaggcggcacacacgcccgctcctcgcgtatggcgaccacgttgacgcccacgcagcgctatgcggcggggacgctcctggcgctggcgctccgccaggcgcagatccaccagtccgagcccctcggctccggccccgacgacgaggagcgcgccagcagcgccagcgggagctcctcctccaccatatccagcaccggctccgacactacctcgggcgccggcctctggacgcacgattcccgcggcctcctccgccccgtcttcaggttcctggagatcgagcccaaggcatgggcggggatggaggagacggccgcgtcgccggacgccgccaagcatcacatcggtgcgtttataagcatactctttgaggaagacggcgagagctcttcagacaggctagagcaggagatcgcattggcgaaagcagttgatgtgatggtcatgagcttgggcagcgacactgcaccagatgagaatatcaaagacgagtttaaatactccacggcctgtacctatgcgaccttggagtctacggaggcaggctcatccgagaacttgcttggaatcgtcaagctgtccttggaaaatgttcctgtgaatgagcaccgcaagatggtgttgctgtatgcgcttctctctgcatgtatcgctgataagcctgtatcgcaagaggaagaggacaggaagtcgtctcacttcaggaagggctatgatgctcggcatcgtgttgctcttcggttgatagcagcatggcttgacgtcaagtggatcaaaatggaagctatggaggtgatggtcgcatgctctgccatggctgcggcaaaagaacaagaacaagagcgtgaaaatgcatcaccaagaagcaagtgggagaaatggaagcgtgggggaattattggtgccgctgccttgactggtggagcgttgctggctattactgggggtttagctgcaccagccattgctgcaggatttggtgctctagctccaacactgggcacacttgtccctttcataggggctagtggatttgctgctatggctgctgcggcaggatctgttgctggctctgtggcagttgctgcctcatttggaggttggtataaatgttcctttggaactcttatgatattatctggagctcttatttcttcattatatataacagtcaagatttgttttaagttagcaacggtcacctccattatttgtggtggttagtgtattgcttaggaaacctacacaattaatgaacatacaccactctgtataagcactggcacatttataaattactaaaagtgttcccaaatgcatttcttgtaaaagttaacttgtaatgcagtatccaaaaaagagatagaaagtggtgtacaaatgttgtacttagcttttaatgttcgttgaattgatttccgacaaattagctgctggggctggcttgacgggtaccaaaatggcaagacgaattggtaaagtgaaagaatttgagttcaaacctattggtgataaccataatcaggcgccttgctgttggcatcttggtttctggatttgcttttgatgaggaggatttctggaaaccttgggaaggatggaaggataacctagagaagtacatccttcaatgggagtccaagcacataattgcagtgagtacagcaatacaggattggctgacatcaaggcttgcaatggaattgatgaaacaaggtgctatgagaactgtcttaagtggccttcttgcagcatttgcttggcctgctacgttgcttgccgctacagattttattgatagtaaatggtctgttgctatcgacagatcagataaggcaggaaaaatgcttgcagaagtgcttcttaagggactgcaaggaaacaggcctgtgactcttgttgggttctcgcttggagcgcgagtcatattcaagtgcttacaggagctagctttatcaagcgacaatgagggacttgtcgagagggttgtactccttggtgcacccgtttcagtgaaaggtgagaggtgggagcctgccaggaagatggttgcagggagatttgtgaatgtgtactcgagagatgactggattctcggtgtaaccttccgagcaagcctgcttacccaaggactggctggcatccaggccattgatgtgcctggtgttgagaacgtggatgttaccgggcttgttgatggccattcttcgtacctgtcagctgcccagcagatcctggagcaccttgaactgaatacctactatcctgtttttgttccccttccggaggtcaacaaataacagatgtagataggttgacaatagcagagaaaagatgtaaatatcagggaggaatataccttcgaatttacacaaaaaatgttacagctgtctagatgatgaatgctttgtagtttcttggtgactaatcctaatcgtacagtagctctagttacgtgtagatatctattgtgtacatagtaaaaacaaaacaataccgtctattgtgatcgcaagaaaagcttgaatctagaatagggaagtaagtacttccgtccaacaagagattaatctaataatatttatgttatatatttgatcttgagattgtttggggtttgctgactcgaaaagcgagctggatagagttcgattatcacatcgtcaactgcaaatgaactttaca

SEQ ID NO: 81880 - DNA, 3322 bp, Zea Mays
acacgaggctccagggcctccatcgccacaccggtgcgtgcgagcgcgattaccagaggcgggcggcagggacgatgctgctgcaaaggcgcggcggcctcctctgctgcgggtgcggcgccagcgccgtggccgtggccgtcagtggccgcgttccggaagacgacggcggtgccgtcgtcgatggccagccgcctgacgccaagagcgtgtctggtaccagtgtctccgctgccgtgacgaccgcaaacgcgaggcagctctcgtgggcgcaggtggaggccatgacgggaggcttcacgtcagccatcgtcggcgagggcggcttcagcaccgtttacctcgcccgcctcgctggctccctcgccgccgtgaaggtccatcgtagtagcgagcgtcttcatcgcgcgttccgccaggagctcgacgcgctcctccgcgttcgccatccccacatcgtccgcctcctcgccttctgcgaccagcgagacgaaggcgtgctggtgctagagttcgcgccgaacggcagcctgcacgagcagctccacggcggcggcgcgggcgcggcgccgatgccgtgggcgcggcgggtgccggtggcgctgcaggtggcccgcgccctggagtacctccacgagcggtgcgagccgcaggtggtgcacggcgacgtgaaggcgtcgaacgtgctgctggacgcgggcatgggcgccaggctgtgcgacttcgggtcggcgcgcgcggggttctcggcggccgtggccgttgccgctgcaggcccgcgcccgcgcgccgtgttcgggtccccgggctacgtcgacccgcactacctccgctccggcgtgagtccagcagatagaagcagtcaaccagcagcagcccaagtcaagcctcctcgcgtgtccctcggctcccacgcccacaccgaaatttcccccacggagctcaactgccggtgccggcgcgcgacaggcggcacacacgcccgctcctcgcgtatggcgaccacgttgacgcccacgcagcgctatgcggcggggacgctcctggcgctggcgctccgccaggcgcagatccaccagtccgagcccctcggctccggccccgacgacgaggagcgcgccagcagcgccagcgggagctcctcctccaccatatccagcaccggctccgacactacctcgggcgccggcctctggacgcacgattcccgcggcctcctccgccccgtcttcaggttcctggagatcgagcccaaggcatgggcggggatggaggagacggccgcgtcgccggacgccgccaagcatcacatcggtgcgtttataagcatactctttgaggaagacggcgagagctcttcagacaggctagagcaggagatcgcattggcgaaagcagttgatgtgatggtcatgagcttgggcagcgacactgcaccagatgagaatatcaaagacgagtttaaatactccacggcctgtacctatgcgaccttggagtctacggaggcaggctcatccgagaacttgcttggaatcgtcaagctgtccttggaaaatgttcctgtgaatgagcaccgcaagatggtgttgctgtatgcgcttctctctgcatgtatcgctgataagcctgtatcgcaagaggaagaggacaggaagtcgtctcacttcaggaagggctatgatgctcggcatcgtgttgctcttcggttgatagcagcatggcttgacgtcaagtggatcaaaatggaagctatggaggtgatggtcgcatgctctgccatggctgcggcaaaagaacaagaacaagagcgtgaaaatgcatcaccaagaagcaagtgggagaaatggaagcgtgggggaattattggtgccgctgccttgactggtggagcgttgctggctattactgggggtttagctgcaccagccattgctgcaggatttggtgctctagctccaacactgggcacacttgtccctttcataggggctagtggatttgctgctatggctgctgcggcaggatctgttgctggctctgtggcagttgctgcctcatttggagctgctggggctggcttgacgggtaccaaaatggcaagacgaattggtaaagtgaaagaatttgagttcaaacctattggtgataaccataatcaggcgccttgctgttggcatcttggtttctggatttgcttttgatgaggaggatttctggaaaccttgggaaggatggaaggataacctagagaagtacatccttcaatgggagtccaagcacataattgcagtgagtacagcaatacaggattggctgacatcaaggcttgcaatggaattgatgaaacaaggtgctatgagaactgtcttaagtggccttcttgcagcatttgcttggcctgctacgttgcttgccgctacagattttattgatagtaaatggtctgttgctatcgacagatcagataaggcaggaaaaatgcttgcagaagtgcttcttaagggactgcaaggaaacaggcctgtgactcttgttgggttctcgcttggagcgcgagtcatattcaagtgcttacaggagctagctttatcaagcgacaatgagggacttgtcgagagggttgtactccttggtgcacccgtttcagtgaaaggtgagaggtgggagcctgccaggaagatggttgcagggagatttgtgaatgtgtactcgagagatgactggattctcggtgtaaccttccgagcaagcctgcttacccaaggactggctggcatccaggccattgatgtgcctggtgttgagaacgtggatgttaccgggcttgttgatggccattcttcgtacctgtcagctgcccagcagatcctggagcaccttgaactgaatacctactatcctgtttttgttccccttccggaggtcaacaaataacagatgtagataggttgacaatagcagagaaaagatgtaaatatcagggaggaatataccttcgaatttacacaaaaaatgttacagctgtctagatgatgaatgctttgtagtttcttggtgactaatcctaatcgtacagtagctctagttacgtgtagatatctattgtgtacatagtaaaaacaaaacaataccgtctattgtgatcgcaagaaaagcttgaatctagaatagggaagtaagtacttccgtccaacaagagattaatctaataatatttatgttatatatttgatcttgagattgtttggggtttgctgactcgaaaagcgagctggatagagttcgattatcacatcgtcaactgcaaatgaactttaca

SEQ ID NO: 81881 - DNA, 3655 bp, Zea Mays
acacgaggctccagggcctccatcgccacaccggtgcgtgcgagcgcgattaccagaggcgggcggcagggacgatgctgctgcaaaggcgcggcggcctcctctgctgcgggtgcggcgccagcgccgtggccgtggccgtcagtggccgcgttccggaagacgacggcggtgccgtcgtcgatggccagccgcctgacgccaagagcgtgtctggtaccagtgtctccgctgccgtgacgaccgcaaacgcgaggcagctctcgtgggcgcaggtggaggccatgacgggaggcttcacgtcagccatcgtcggcgagggcggcttcagcaccgtttacctcgcccgcctcgctggctccctcgccgccgtgaaggtccatcgtagtagcgagcgtcttcatcgcgcgttccgccaggagctcgacgcgctcctccgcgttcgccatccccacatcgtccgcctcctcgccttctgcgaccagcgagacgaaggcgtgctggtgctagagttcgcgccgaacggcagcctgcacgagcagctccacggcggcggcgcgggcgcggcgccgatgccgtgggcgcggcgggtgccggtggcgctgcaggtggcccgcgccctggagtacctccacgagcggtgcgagccgcaggtggtgcacggcgacgtgaaggcgtcgaacgtgctgctggacgcgggcatgggcgccaggctgtgcgacttcgggtcggcgcgcgcggggttctcggcggccgtggccgttgccgctgcaggcccgcgcccgcgcgccgtgttcgggtccccgggctacgtcgacccgcactacctccgctccggcgtgagtccagcagatagaagcagtcaaccagcagcagcccaagtcaagcctcctcgcgtgtccctcggctcccacgcccacaccgaaatttcccccacggagctcaactgccggtgccggcgcgcgacaggcggcacacacgcccgctcctcgcgtatggcgaccacgttgacgcccacgcagcgctatgcggcggggacgctcctggcgctggcgctccgccaggcgcagatccaccagtccgagcccctcggctccggccccgacgacgaggagcgcgccagcagcgccagcgggagctcctcctccaccatatccagcaccggctccgacactacctcgggcgccggcctctggacgcacgattcccgcggcctcctccgccccgtcttcaggttcctggagatcgagcccaaggcatgggcggggatggaggagacggccgcgtcgccggacgccgccaagcatcacatcggtgcgtttataagcatactctttgaggaagacggcgagagctcttcagacaggctagagcaggagatcgcattggcgaaagcagttgatgtgatggtcatgagcttgggcagcgacactgcaccagatgagaatatcaaagacgagtttaaatactccacggcctgtacctatgcgaccttggagtctacggaggcaggctcatccgagaacttgcttggaatcgtcaagctgtccttggaaaatgttcctgtgaatgagcaccgcaagatggtgttgctgtatgcgcttctctctgcatgtatcgctgataagcctgtatcgcaagaggaagaggacaggaagtcgtctcacttcaggaagggctatgatgctcggcatcgtgttgctcttcggttgatagcagcatggcttgacgtcaagtggatcaaaatggaagctatggaggtgatggtcgcatgctctgccatggctgcggcaaaagaacaagaacaagagcgtgaaaatgcatcaccaagaagcaagtgggagaaatggaagcgtgggggaattattggtgccgctgccttgactggtggagcgttgctggctattactgggggtttagctgcaccagccattgctgcaggatttggtgctctagctccaacactgggcacacttgtccctttcataggggctagtggatttgctgctatggctgctgcggcaggatctgttgctggctctgtggcagttgctgcctcatttggaggttggtataaatgttcctttggaactcttatgatattatctggagctcttatttcttcattatatataacagtcaagatttgttttaagttagcaacggtcacctccattatttgtggtggttagtgtattgcttaggaaacctacacaattaatgaacatacaccactctgtataagcactggcacatttataaattactaaaagtgttcccaaatgcatttcttgtaaaagttaacttgtaatgcagtatccaaaaaagagatagaaagtggtgtacaaatgttgtacttagcttttaatgttcgttgaattgatttccgacaaattagctgctggggctggcttgacgggtaccaaaatggcaagacgaattggtaaagtgaaagaatttgagttcaaacctattggtgataaccataatcagggtcgccttgctgttggcatcttggtttctggatttgcttttgatgaggaggatttctggaaaccttgggaaggatggaaggataacctagagaagtacatccttcaatgggagtccaagcacataattgcagtgagtacagcaatacaggattggctgacatcaaggcttgcaatggaattgatgaaacaaggtgctatgagaactgtcttaagtggccttcttgcagcatttgcttggcctgctacgttgcttgccgctacagattttattgatagtaaatggtctgttgctatcgacagatcagataaggcaggaaaaatgcttgcagaagtgcttcttaagggactgcaaggaaacaggcctgtgactcttgttgggttctcgcttggagcgcgagtcatattcaagtgcttacaggagctagctttatcaagcgacaatgagggacttgtcgagagggttgtactccttggtgcacccgtttcagtgaaaggtgagaggtgggagcctgccaggaagatggttgcagggagatttgtgaatgtgtactcgagagatgactggattctcggtgtaaccttccgagcaagcctgcttacccaaggactggctggcatccaggccattgatgtgcctggtgttgagaacgtggatgttaccgggcttgttgatggccattcttcgtacctgtcagctgcccagcagatcctggagcaccttgaactgaatacctactatcctgtttttgttccccttccggaggtcaacaaataacagatgtagataggttgacaatagcagagaaaagatgtaaatatcagggaggaatataccttcgaatttacacaaaaaatgttacagctgtctagatgatgaatgctttgtagtttcttggtgactaatcctaatcgtacagtagctctagttacgtgtagatatctattgtgtacatagtaaaaacaaaacaataccgtctattgtgatcgcaagaaaagcttgaatctagaatagggaagtaagtacttccgtccaacaagagattaatctaataatatttatgttatatatttgatcttgagattgtttggggtttgctgactcgaaaagcgagctggatagagttcgattatcacatcgtcaactgcaaatgaactttaca

SEQ ID NO: 81882 - DNA, 3410 bp, Zea Mays
acacgaggctccagggcctccatcgccacaccggtgcgtgcgagcgcgattaccagaggcgggcggcagggacgatgctgctgcaaaggcgcggcggcctcctctgctgcgggtgcggcgccagcgccgtggccgtggccgtcagtggccgcgttccggaagacgacggcggtgccgtcgtcgatggccagccgcctgacgccaagagcgtgtctggtaccagtgtctccgctgccgtgacgaccgcaaacgcgaggcagctctcgtgggcgcaggtggaggccatgacgggaggcttcacgtcagccatcgtcggcgagggcggcttcagcaccgtttacctcgcccgcctcgctggctccctcgccgccgtgaaggtccatcgtagtagcgagcgtcttcatcgcgcgttccgccaggagctcgacgcgctcctccgcgttcgccatccccacatcgtccgcctcctcgccttctgcgaccagcgagacgaaggcgtgctggtgctagagttcgcgccgaacggcagcctgcacgagcagctccacggcggcggcgcgggcgcggcgccgatgccgtgggcgcggcgggtgccggtggcgctgcaggtggcccgcgccctggagtacctccacgagcggtgcgagccgcaggtggtgcacggcgacgtgaaggcgtcgaacgtgctgctggacgcgggcatgggcgccaggctgtgcgacttcgggtcggcgcgcgcggggttctcggcggccgtggccgttgccgctgcaggcccgcgcccgcgcgccgtgttcgggtccccgggctacgtcgacccgcactacctccgctccggcgtgagtccagcagatagaagcagtcaaccagcagcagcccaagtcaagcctcctcgcgtgtccctcggctcccacgcccacaccgaaatttcccccacggagctcaactgccggtgccggcgcgcgacaggcggcacacacgcccgctcctcgcgtatggcgaccacgttgacgcccacgcagcgctatgcggcggggacgctcctggcgctggcgctccgccaggcgcagatccaccagtccgagcccctcggctccggccccgacgacgaggagcgcgccagcagcgccagcgggagctcctcctccaccatatccagcaccggctccgacactacctcgggcgccggcctctggacgcacgattcccgcggcctcctccgccccgtcttcaggttcctggagatcgagcccaaggcatgggcggggatggaggagacggccgcgtcgccggacgccgccaagcatcacatcggtgcgtttataagcatactctttgaggaagacggcgagagctcttcagacaggctagagcaggagatcgcattggcgaaagcagttgatgtgatggtcatgagcttgggcagcgacactgcaccagatgagaatatcaaagacgagtttaaatactccacggcctgtacctatgcgaccttggagtctacggaggcaggctcatccgagaacttgcttggaatcgtcaagctgtccttggaaaatgttcctgtgaatgagcaccgcaagatggtgttgctgtatgcgcttctctctgcatgtatcgctgataagcctgtatcgcaagaggaagaggacaggaagtcgtctcacttcaggaagggctatgatgctcggcatcgtgttgctcttcggttgatagcagcatggcttgacgtcaagtggatcaaaatggaagctatggaggtgatggtcgcatgctctgccatggctgcggcaaaagaacaagaacaagagcgtgaaaatgcatcaccaagaagcaagtgggagaaatggaagcgtgggggaattattggtgccgctgccttgactggtggagcgttgctggctattactgggggtttagctgcaccagccattgctgcaggatttggtgctctagctccaacactgggcacacttgtccctttcataggggctagtggatttgctgctatggctgctgcggcaggatctgttgctggctctgtggcagttgctgcctcatttggagctgctggggctggcttgacgggtaccaaaatggcaagacgaattggtaaagtgaaagaatttgagttcaaacctattggtgataaccataatcaggcgccttgctgttggcatcttggtttctggatttgcttttgatgaggaggatttctggaaaccttgggaaggatggaaggataacctagagaagtacatccttcaatgggagtccaagcacataattgcagtgagtacagcaatacaggattggctgacatcaatgttgttgtttatgcagggcttgcaatggaattgatgaaacaaggtgctatgagaactgtcttaagtggccttcttgcagcatttgcttggcctgctacgttgcttgccgctacagattttattgatagtaaatggtctgttgctatcgacagatcagataaggcaggaaaaatgcttgcagaagtgcttcttaagggactgcaaggaaacaggcctgtgactcttgttgggttctcgcttggagcgcgagtcatattcaagtgcttacaggagctagctttatcaagcgacaatggtatctgttctttagttatagtaacctaaatttcatatgactttgctcttatgcttgatggaatgagtcagagggacttgtcgagagggttgtactccttggtgcacccgtttcagtgaaaggtgagaggtgggagcctgccaggaagatggttgcagggagatttgtgaatgtgtactcgagagatgactggattctcggtgtaaccttccgagcaagcctgcttacccaaggactggctggcatccaggccattgatgtgcctggtgttgagaacgtggatgttaccgggcttgttgatggccattcttcgtacctgtcagctgcccagcagatcctggagcaccttgaactgaatacctactatcctgtttttgttccccttccggaggtcaacaaataacagatgtagataggttgacaatagcagagaaaagatgtaaatatcagggaggaatataccttcgaatttacacaaaaaatgttacagctgtctagatgatgaatgctttgtagtttcttggtgactaatcctaatcgtacagtagctctagttacgtgtagatatctattgtgtacatagtaaaaacaaaacaataccgtctattgtgatcgcaagaaaagcttgaatctagaatagggaagtaagtacttccgtccaacaagagattaatctaataatatttatgttatatatttgatcttgagattgtttggggtttgctgactcgaaaagcgagctggatagagttcgattatcacatcgtcaactgcaaatgaactttaca

SEQ ID NO: 81883 - DNA, 3297 bp, Zea Mays
acacgaggctccagggcctccatcgccacaccggtgcgtgcgagcgcgattaccagaggcgggcggcagggacgatgctgctgcaaaggcgcggcggcctcctctgctgcgggtgcggcgccagcgccgtggccgtggccgtcagtggccgcgttccggaagacgacggcggtgccgtcgtcgatggccagccgcctgacgccaagagcgtgtctggtaccagtgtctccgctgccgtgacgaccgcaaacgcgaggcagctctcgtgggcgcaggtggaggccatgacgggaggcttcacgtcagccatcgtcggcgagggcggcttcagcaccgtttacctcgcccgcctcgctggctccctcgccgccgtgaaggtccatcgtagtagcgagcgtcttcatcgcgcgttccgccaggagctcgacgcgctcctccgcgttcgccatccccacatcgtccgcctcctcgccttctgcgaccagcgagacgaaggcgtgctggtgctagagttcgcgccgaacggcagcctgcacgagcagctccacggcggcggcgcgggcgcggcgccgatgccgtgggcgcggcgggtgccggtggcgctgcaggtggcccgcgccctggagtacctccacgagcggtgcgagccgcaggtggtgcacggcgacgtgaaggcgtcgaacgtgctgctggacgcgggcatgggcgccaggctgtgcgacttcgggtcggcgcgcgcggggttctcggcggccgtggccgttgccgctgcaggcccgcgcccgcgcgccgtgttcgggtccccgggctacgtcgacccgcactacctccgctccggcgtgagtccagcagatagaagcagtcaaccagcagcagcccaagtcaagcctcctcgcgtgtccctcggctcccacgcccacaccgaaatttcccccacggagctcaactgccggtgccggcgcgcgacaggcggcacacacgcccgctcctcgcgtatggcgaccacgttgacgcccacgcagcgctatgcggcggggacgctcctggcgctggcgctccgccaggcgcagatccaccagtccgagcccctcggctccggccccgacgacgaggagcgcgccagcagcgccagcgggagctcctcctccaccatatccagcaccggctccgacactacctcgggcgccggcctctggacgcacgattcccgcggcctcctccgccccgtcttcaggttcctggagatcgagcccaaggcatgggcggggatggaggagacggccgcgtcgccggacgccgccaagcatcacatcggtgcgtttataagcatactctttgaggaagacggcgagagctcttcagacaggctagagcaggagatcgcattggcgaaagcagttgatgtgatggtcatgagcttgggcagcgacactgcaccagatgagaatatcaaagacgagtttaaatactccacggcctgtacctatgcgaccttggagtctacggaggcaggctcatccgagaacttgcttggaatcgtcaagctgtccttggaaaatgttcctgtgaatgagcaccgcaagatggtgttgctgtatgcgcttctctctgcatgtatcgctgataagcctgtatcgcaagaggaagaggacaggaagtcgtctcacttcaggaagggctatgatgctcggcatcgtgttgctcttcggttgatagcagcatggcttgacgtcaagtggatcaaaatggaagctatggaggtgatggtcgcatgctctgccatggctgcggcaaaagaacaagaacaagagcgtgaaaatgcatcaccaagaagcaagtgggagaaatggaagcgtgggggaattattggtgccgctgccttgactggtggagcgttgctggctattactgggggtttagctgcaccagccattgctgcaggatttggtgctctagctccaacactgggcacacttgtccctttcataggggctagtggatttgctgctatggctgctgcggcaggatctgttgctggctctgtggcagttgctgcctcatttggagcgccttgctgttggcatcttggtttctggatttgcttttgatgaggaggatttctggaaaccttgggaaggatggaaggataacctagagaagtacatccttcaatgggagtccaagcacataattgcagtgagtacagcaatacaggattggctgacatcaaggcttgcaatggaattgatgaaacaaggtgctatgagaactgtcttaagtggccttcttgcagcatttgcttggcctgctacgttgcttgccgctacagattttattgatagtaaatggtctgttgctatcgacagatcagataaggcaggaaaaatgcttgcagaagtgcttcttaagggactgcaaggaaacaggcctgtgactcttgttgggttctcgcttggagcgcgagtcatattcaagtgcttacaggagctagctttatcaagcgacaatggtatctgttctttagttatagtaacctaaatttcatatgactttgctcttatgcttgatggaatgagtcagagggacttgtcgagagggttgtactccttggtgcacccgtttcagtgaaaggtgagaggtgggagcctgccaggaagatggttgcagggagatttgtgaatgtgtactcgagagatgactggattctcggtgtaaccttccgagcaagcctgcttacccaaggactggctggcatccaggccattgatgtgcctggtgttgagaacgtggatgttaccgggcttgttgatggccattcttcgtacctgtcagctgcccagcagatcctggagcaccttgaactgaatacctactatcctgtttttgttccccttccggaggtcaacaaataacagatgtagataggttgacaatagcagagaaaagatgtaaatatcagggaggaatataccttcgaatttacacaaaaaatgttacagctgtctagatgatgaatgctttgtagtttcttggtgactaatcctaatcgtacagtagctctagttacgtgtagatatctattgtgtacatagtaaaaacaaaacaataccgtctattgtgatcgcaagaaaagcttgaatctagaatagggaagtaagtacttccgtccaacaagagattaatctaataatatttatgttatatatttgatcttgagattgtttggggtttgctgactcgaaaagcgagctggatagagttcgattatcacatcgtcaactgcaaatgaactttaca

SEQ ID NO: 81884 - DNA, 3690 bp, Zea Mays
acacgaggctccagggcctccatcgccacaccggtgcgtgcgagcgcgattaccagaggcgggcggcagggacgatgctgctgcaaaggcgcggcggcctcctctgctgcgggtgcggcgccagcgccgtggccgtggccgtcagtggccgcgttccggaagacgacggcggtgccgtcgtcgatggccagccgcctgacgccaagagcgtgtctggtaccagtgtctccgctgccgtgacgaccgcaaacgcgaggcagctctcgtgggcgcaggtggaggccatgacgggaggcttcacgtcagccatcgtcggcgagggcggcttcagcaccgtttacctcgcccgcctcgctggctccctcgccgccgtgaaggtccatcgtagtagcgagcgtcttcatcgcgcgttccgccaggagctcgacgcgctcctccgcgttcgccatccccacatcgtccgcctcctcgccttctgcgaccagcgagacgaaggcgtgctggtgctagagttcgcgccgaacggcagcctgcacgagcagctccacggcggcggcgcgggcgcggcgccgatgccgtgggcgcggcgggtgccggtggcgctgcaggtggcccgcgccctggagtacctccacgagcggtgcgagccgcaggtggtgcacggcgacgtgaaggcgtcgaacgtgctgctggacgcgggcatgggcgccaggctgtgcgacttcgggtcggcgcgcgcggggttctcggcggccgtggccgttgccgctgcaggcccgcgcccgcgcgccgtgttcgggtccccgggctacgtcgacccgcactacctccgctccggcgtgagtccagcagatagaagcagtcaaccagcagcagcccaagtcaagcctcctcgcgtgtccctcggctcccacgcccacaccgaaatttcccccacggagctcaactgccggtgccggcgcgcgacaggcggcacacacgcccgctcctcgcgtatggcgaccacgttgacgcccacgcagcgctatgcggcggggacgctcctggcgctggcgctccgccaggcgcagatccaccagtccgagcccctcggctccggccccgacgacgaggagcgcgccagcagcgccagcgggagctcctcctccaccatatccagcaccggctccgacactacctcgggcgccggcctctggacgcacgattcccgcggcctcctccgccccgtcttcaggttcctggagatcgagcccaaggcatgggcggggatggaggagacggccgcgtcgccggacgccgccaagcatcacatcggtgcgtttataagcatactctttgaggaagacggcgagagctcttcagacaggctagagcaggagatcgcattggcgaaagcagttgatgtgatggtcatgagcttgggcagcgacactgcaccagatgagaatatcaaagacgagtttaaatactccacggcctgtacctatgcgaccttggagtctacggaggcaggctcatccgagaacttgcttggaatcgtcaagctgtccttggaaaatgttcctgtgaatgagcaccgcaagatggtgttgctgtatgcgcttctctctgcatgtatcgctgataagcctgtatcgcaagaggaagaggacaggaagtcgtctcacttcaggaagggctatgatgctcggcatcgtgttgctcttcggttgatagcagcatggcttgacgtcaagtggatcaaaatggaagctatggaggtgatggtcgcatgctctgccatggctgcggcaaaagaacaagaacaagagcgtgaaaatgcatcaccaagaagcaagtgggagaaatggaagcgtgggggaattattggtgccgctgccttgactggtggagcgttgctggctattactgggggtttagctgcaccagccattgctgcaggatttggtgctctagctccaacactgggcacacttgtccctttcataggggctagtggatttgctgctatggctgctgcggcaggatctgttgctggctctgtggcagttgctgcctcatttggaggttggtataaatgttcctttggaactcttatgatattatctggagctcttatttcttcattatatataacagtcaagatttgttttaagttagcaacggtcacctccattatttgtggtggttagtgtattgcttaggaaacctacacaattaatgaacatacaccactctgtataagcactggcacatttataaattactaaaagtgttcccaaatgcatttcttgtaaaagttaacttgtaatgcagtatccaaaaaagagatagaaagtggtgtacaaatgttgtacttagcttttaatgttcgttgaattgatttccgacaaattagctgctggggctggcttgacgggtaccaaaatggcaagacgaattggtaaagtgaaagaatttgagttcaaacctattggtgataaccataatcaggcgccttgctgttggcatcttggtttctggatttgcttttgatgaggaggatttctggaaaccttgggaaggatggaaggataacctagagaagtacatccttcaatgggagtccaagcacataattgcaggcttgcaatggaattgatgaaacaaggtgctatgagaactgtcttaagtggccttcttgcagcatttgcttggcctgctacgttgcttgccgctacagattttattgatagtaaatggtctgttgctatcgacagatcagataaggcaggaaaaatgcttgcagaagtgcttcttaagggactgcaaggaaacaggcctgtgactcttgttgggttctcgcttggagcgcgagtcatattcaagtgcttacaggagctagctttatcaagcgacaatggtatctgttctttagttatagtaacctaaatttcatatgactttgctcttatgcttgatggaatgagtcagagggacttgtcgagagggttgtactccttggtgcacccgtttcagtgaaaggtgagaggtgggagcctgccaggaagatggttgcagggagatttgtgaatgtgtactcgagagatgactggattctcggtgtaaccttccgagcaagcctgcttacccaaggactggctggcatccaggccattgatgtgcctggtgttgagaacgtggatgttaccgggcttgttgatggccattcttcgtacctgtcagctgcccagcagatcctggagcaccttgaactgaatacctactatcctgtttttgttccccttccggaggtcaacaaataacagatgtagataggttgacaatagcagagaaaagatgtaaatatcagggaggaatataccttcgaatttacacaaaaaatgttacagctgtctagatgatgaatgctttgtagtttcttggtgactaatcctaatcgtacagtagctctagttacgtgtagatatctattgtgtacatagtaaaaacaaaacaataccgtctattgtgatcgcaagaaaagcttgaatctagaatagggaagtaagtacttccgtccaacaagagattaatctaataatatttatgttatatatttgatcttgagattgtttggggtttgctgactcgaaaagcgagctggatagagttcgattatcacatcgtcaactgcaaatgaactttaca

SEQ ID NO: 81885 - DNA, 2082 bp, Zea Mays
cttccatccctcccacccgatcgtgttatatgtgttcacctactttcacagcagttgggtgagggactggattcgaagtttataagcatactctttgaggaagacggcgagagctcttcagacaggctagagcaggagatcgcattggcgaaagcagttgatgtgatggtcatgagcttgggcagcgacactgcaccagatgagaatatcaaagacgagtttaaatactccacggcctgtacctatgcgaccttggagtctacggaggcaggctcatccgagaacttgcttggaatcgtcaagctgtccttggaaaatgttcctgtgaatgagcaccgcaagatggtgttgctgtatgcgcttctctctgcatgtatcgctgataagcctgtatcgcaagaggaagaggacaggaagtcgtctcacttcaggaagggctatgatgctcggcatcgtgttgctcttcggttgatagcagcatggcttgacgtcaagtggatcaaaatggaagctatggaggtgatggtcgcatgctctgccatggctgcggcaaaagaacaagaacaagagcgtgaaaatgcatcaccaagaagcaagtgggagaaatggaagcgtgggggaattattggtgccgctgccttgactggtggagcgttgctggctattactgggggtaggactgcgttccagatcatgtatctaatgaaatgctgaacatcttggcatcatttggacacactacaccaggggctagtggatttgctgctatggctgctgcggcaggatctgttgctggctctgtggcagttgctgcctcatttggagctgctggggctggcttgacgggtaccaaaatggcaagacgaattggtaaagtgaaagaatttgagttcaaacctattggtgataaccataatcagggtcgccttgctgttggcatcttggtttctggatttgcttttgatgaggaggatttctggaaaccttgggaaggatggaaggataacctagagaagtacatccttcaatgggagtccaagcacataattgcagtgagtacagcaatacaggattggctgacatcaaggcttgcaatggaattgatgaaacaaggtgctatgagaactgtcttaagtggccttcttgcagcatttgcttggcctgctacgttgcttgccgctacagattttattgatagtaaatggtctgttgctatcgacagatcagataaggcaggaaaaatgcttgcagaagtgcttcttaagggactgcaaggaaacaggcctgtgactcttgttgggttctcgcttggagcgcgagtcatattcaagtgcttacaggagctagctttatcaagcgacaatgagggacttgtcgagagggttgtactccttggtgcacccgtttcagtgaaaggtgagaggtgggagcctgccaggaagatggttgcagggagatttgtgaatgtgtactcgagagatgactggattctcggtgtaaccttccgagcaagcctgcttacccaaggactggctggcatccaggccattgatgtgcctggtgttgagaacgtggatgttaccgggcttgttgatggccattcttcgtacctgtcagctgcccagcagatcctggagcaccttgaactgaatacctactatcctgtttttgttccccttccggaggtcaacaaataacagatgtagataggttgacaatagcagagaaaagatgtaaatatcagggaggaatataccttcgaatttacacaaaaaatgttacagctgtctagatgatgaatgctttgtagtttcttggtgactaatcctaatcgtacagtagctctagttacgtgtagatatctattgtgtacatagtaaaaacaaaacaataccgtctattgtgatcgcaagaaaagcttgaatctagaatagggaagtaagtacttccgtccaacaagagattaatctaataatatttatgttatatatttgatcttgagattgtttggggtttgctgactcgaaaagcgagctggatagagttcgattatcacatcgtcaactgcaaatgaactttaca

SEQ ID NO: 81886 - DNA, 2050 bp, Zea Mays
gttcacctactttcacagcagttgggtgagggactggattcgaagtttataagcatactctttgaggaagacggcgagagctcttcagacaggctagagcaggagatcgcattggcgaaagcagttgatgtgatggtcatgagcttgggcagcgacactgcaccagatgagaatatcaaagacgagtttaaatactccacggcctgtacctatgcgaccttggagtctacggaggcaggctcatccgagaacttgcttggaatcgtcaagctgtccttggaaaatgttcctgtgaatgagcaccgcaagatggtgttgctgtatgcgcttctctctgcatgtatcgctgataagcctgtatcgcaagaggaagaggacaggaagtcgtctcacttcaggaagggctatgatgctcggcatcgtgttgctcttcggttgatagcagcatggcttgacgtcaagtggatcaaaatggaagctatggaggtgatggtcgcatgctctgccatggctgcggcaaaagaacaagaacaagagcgtgaaaatgcatcaccaagaagcaagtgggagaaatggaagcgtgggggaattattggtgccgctgccttgactggtggagcgttgctggctattactgggggtttagctgcaccagccattgctgcaggatttggtgctctagctccaacactgggcacacttgtccctttcataggggctagtggatttgctgctatggctgctgcggcaggatctgttgctggctctgtggcagttgctgcctcatttggagctgctggggctggcttgacgggtaccaaaatggcaagacgaattggtaaagtgaaagaatttgagttcaaacctattggtgataaccataatcagggtcgccttgctgttggcatcttggtttctggatttgcttttgatgaggaggatttctggaaaccttgggaaggatggaaggataacctagagaagtacatccttcaatgggagtccaagcacataattgcagtgagtacagcaatacaggattggctgacatcaaggcttgcaatggaattgatgaaacaaggtgctatgagaactgtcttaagtggccttcttgcagcatttgcttggcctgctacgttgcttgccgctacagattttattgatagtaaatggtctgttgctatcgacagatcagataaggcaggaaaaatgcttgcagaagtgcttcttaagggactgcaaggaaacaggcctgtgactcttgttgggttctcgcttggagcgcgagtcatattcaagtgcttacaggagctagctttatcaagcgacaatgagggacttgtcgagagggttgtactccttggtgcacccgtttcagtgaaaggtgagaggtgggagcctgccaggaagatggttgcagggagatttgtgaatgtgtactcgagagatgactggattctcggtgtaaccttccgagcaagcctgcttacccaaggactggctggcatccaggccattgatgtgcctggtgttgagaacgtggatgttaccgggcttgttgatggccattcttcgtacctgtcagctgcccagcagatcctggagcaccttgaactgaatacctactatcctgtttttgttccccttccggaggtcaacaaataacagatgtagataggttgacaatagcagagaaaagatgtaaatatcagggaggaatataccttcgaatttacacaaaaaatgttacagctgtctagatgatgaatgctttgtagtttcttggtgactaatcctaatcgtacagtagctctagttacgtgtagatatctattgtgtacatagtaaaaacaaaacaataccgtctattgtgatcgcaagaaaagcttgaatctagaatagggaagtaagtacttccgtccaacaagagattaatctaataatatttatgttatatatttgatcttgagattgtttggggtttgctgactcgaaaagcgagctggatagagttcgattatcacatcgtcaactgcaaatgaactttaca

SEQ ID NO: 81887 - DNA, 2540 bp, Zea Mays
ctactttcacagcagttgggtgagggactggattcgaagtttataagcatactctttgaggaagacggcgagagctcttcagacaggctagagcaggagatcgcattggcgaaagcagttgatgtgatggtcatgagcttgggcagcgacactgcaccagatgagaatatcaaagacgagtttaaatactccacggcctgtacctatgcgaccttggagtctacggaggcaggctcatccgagaacttgcttggaatcgtcaagctgtccttggaaaatgttcctgtgaatgagcaccgcaagatggtgttgctgtatgcgcttctctctgcatgtatcgctgataagcctgtatcgcaagaggaagaggacaggaagtcgtctcacttcaggaagggctatgatgctcggcatcgtgttgctcttcggttgatagcagcatggcttgacgtcaagtggatcaaaatggaagctatggaggtgatggtcgcatgctctgccatggctgcggcaaaagaacaagaacaagagcgtgaaaatgcatcaccaagaagcaagtgggagaaatggaagcgtgggggaattattggtgccgctgccttgactggtggagcgttgctggctattactgggggtaggactgcgttccagatcatgtatctaatgaaatgctgaacatcttggcatcatttggacacactacaccaggggctagtggatttgctgctatggctgctgcggcaggatctgttgctggctctgtggcagttgctgcctcatttggaggttggtataaatgttcctttggaactcttatgatattatctggagctcttatttcttcattatatataacagtcaagatttgttttaagttagcaacggtcacctccattatttgtggtggttagtgtattgcttaggaaacctacacaattaatgaacatacaccactctgtataagcactggcacatttataaattactaaaagtgttcccaaatgcatttcttgtaaaagttaacttgtaatgcagtatccaaaaaagagatagaaagtggtgtacaaatgttgtacttagcttttaatgttcgttgaattgatttccgacaaattagctgctggggctggcttgacgggtaccaaaatggcaagacgaattggtaaagtgaaagaatttgagttcaaacctattggtgataaccataatcagggtgtgagtcccttttttctctctctctgacaaaaatgctactcacccattttggaatgaaattgatctcgtctttgtaaatgttgctaattcttcagcgccttgctgttggcatcttggtttctggatttgcttttgatgaggaggatttctggaaaccttgggaaggatggaaggataacctagagaagtacatccttcaatgggagtccaagcacataattgcagtgagtacagcaatacaggattggctgacatcaaggcttgcaatggaattgatgaaacaaggtgctatgagaactgtcttaagtggccttcttgcagcatttgcttggcctgctacgttgcttgccgctacagattttattgatagtaaatggtctgttgctatcgacagatcagataaggcaggaaaaatgcttgcagaagtgcttcttaagggactgcaaggaaacaggcctgtgactcttgttgggttctcgcttggagcgcgagtcatattcaagtgcttacaggagctagctttatcaagcgacaatggtatctgttctttagttatagtaacctaaatttcatatgactttgctcttatgcttgatggaatgagtcagagggacttgtcgagagggttgtactccttggtgcacccgtttcagtgaaaggtgagaggtgggagcctgccaggaagatggttgcagggagatttgtgaatgtgtactcgagagatgactggattctcggtgtaaccttccgagcaagcctgcttacccaaggactggctggcatccaggccattgatgtgcctggtgttgagaacgtggatgttaccgggcttgttgatggccattcttcgtacctgtcagctgcccagcagatcctggagcaccttgaactgaatacctactatcctgtttttgttccccttccggaggtcaacaaataacagatgtagataggttgacaatagcagagaaaagatgtaaatatcagggaggaatataccttcgaatttacacaaaaaatgttacagctgtctagatgatgaatgctttgtagtttcttggtgactaatcctaatcgtacagtagctctagttacgtgtagatatctattgtgtacatagtaaaaacaaaacaataccgtctattgtgatcgcaagaaaagcttgaatctagaatagggaagtaagtacttccgtccaacaagagattaatctaataatatttatgttatatatttgatcttgagattgtttggggtttgctgactcgaaaagcgagctggatagagttcgattatcacatcgtcaactgcaaatgaactttaca

SEQ ID NO: 81888 - DNA, 605 bp, Zea Mays
ctgactccacgcgcatgtgcatcgaaggtggtgctccggatctccaccatgaccgacgacaggacgaagcagaaggccatggaggccgtcgcggacatctacggcatcgactcgatcgcggcggacgtgaaggagaacaagatgacggtgatcggcgacatggacacggtggccgtcgccaagaagctgaagaagctcggcaaggtcgacatcgtctcggtgggcccagccaaggaggagaagaagcccgacaagaaacccgaggagaagaagccggaggcggcggcggggaagaaggacgacaagaagtgagcgccgaggccgtctgaatacgtttccggctgatttggatttggatggactctctaataataatgggcccaatacatgatatagaacattacagcccacaagggcacgtggttgcctctctaattagagtagtaccaacccaatacactacttagagggtgtttaggagtgaagttttttacagtagtttttaaaaaataatgtattattcttaaatactgcagtattatatatagaatagcgtttgacaagctatctaaaactatgttttcaaaactagagtattgcaaaaa

SEQ ID NO: 81889 - DNA, 2088 bp, Zea Mays
ccacctaatctggtaataaagaagaatcagccccccaccagttggaacctgtctgtatgcggcactgcggcgcccgtggggcccaccacggcgccgccggcagcgtcaccaacccccacctccgccctcccaccggcactcccctcgcctgctccacgacgcttatgcgctcgcgtcccgctctcgccgcccacctccggcgcctgctcctcctctctccctccgcccacctcatcatcatccgccgcgccatggcctccgccgccgccgcgcaggcgcagccaggtggcgccccaccggcgaccgcggagtacgaggaggtgctggggcggctctcctcgctcatcacgcagaaggtgcgcgcgaacagcgccaaccgcggcaaccagtgggacctcatggagcactacgtcaagattctggagctggaggagtcgatcgcgcggatgaaagtgattcacgtcgcggggaccaaggggaagggttccacatgcacattcaccgagtcaatcctgcgatcgtgtggcttccatactgggctgttcacctcaccacatttgatggatgttagagagcgatttcagctagatggggttaatatttctgaagagaaatttttgaagtacttctggtggtgctggaacaagttgaaggagaagactgatgatgatattcccatgccagcctatttcaggttcctcgcgttgctcgcattcaagatattttctgctgagcaggtagatgttgctgttcttgaggttggcctaggagggaagtttgatgcaactaatgtggttaaagcacctgtagtttgtggcatatcttcccttggatatgatcatatggaaatccttgggaatacacttggagaaatcgcaggagagaaggctgggattttcaagaaaggagttccggcctatactgctccacaaccagaagaggcaatgactgctctcaaacaaagagcttcggaattgggtgtctctctccaagtcgttgatcctctggagccccatcacctaaaagatcagcatcttgggctgcatggagaacatcaatatataaatgctggccttgcagttgctttggctagtacgtggcttgagaagcagggacataaagatacgttaccactcaatcgtactgatcccttaccagatcattttattagagggctatcaagtgcttctttgcaaggccgagcacagattgttccagattcacaagtgaattcagaagaggacaaagattgttctcttgttttttatttggatggagcgcacagtcctgaaagcatggaagtatgtggcaagtggttttcccatgtcacaaaggatgatacaaggctaccatcttctttggagcagtctcatacatctaggtctcaaaagatccttctgttcaactgcatgtctgtgagagatccgatgagattgcttccttgtctcctggatgcatcaactcaaaatggagtccactttgacctggccctatttgtgccgaaccaatcacaacacacgaagcttggttctaacacttcagcaccagcggagcctgagcaaatcgatttgtcatggcagctgtcacttcaaacagtgtgggagaagttacttcaggataaaggtataaatactacaaaatccagcgacactagtaaagtttttgattcgcttccggtcgcaatcgagtggctaaggagaaatgcccgagaaaaccaatctacttctttccagagcagagaggcctcttctgccacggccgacgggttccggaatccgacgccgaggggacgtcgtctttcaggcagcacggtcaacagaaacttggctggaggcgagtcgtgcaggtgcaggatctgtccgaggctaagagaagggtgccgcaggggtcaaacccgctgcacaactgaactctcaagagggacctcaactcggtcggtgctcagcatctatctgtctatctatctatctgagctcctgagcgacaagggaggctattttctcttgttttttttgttttttttttgccgtgatgtaatgtaaccgagcactggcacttgttgaccctatcggtatcctctatattacc

SEQ ID NO: 81890 - DNA, 2867 bp, Zea Mays
ccacctaatctggtaataaagaagaatcagccccccaccagttggaacctgtctgtatgcggcactgcggcgcccgtggggcccaccacggcgccgccggcagcgtcaccaacccccacctccgccctcccaccggcactcccctcgcctgctccacgacgcttatgcgctcgcgtcccgctctcgccgcccacctccggcgcctgctcctcctctctccctccgcccacctcatcatcatccgccgcgccatggcctccgccgccgccgcgcaggcgcagccaggtggcgccccaccggcgaccgcggagtacgaggaggtgctggggcggctctcctcgctcatcacgcagaaggtgcgcgcgaacagcgccaaccgcggcaaccagtgggacctcatggagcactacgtcaagattctggagctggaggagtcgatcgcgcggatgaaagtgattcacgtcgcggggaccaaggggaagggttccacatgcacattcaccgagtcaatcctgcgatcgtgtggcttccatactgggctgttcacctcaccacatttgatggatgttagagagcgatttcagctagatggggttaatatttctgaagagaaatttttgaagtacttctggtggtgctggaacaagttgaaggagaagactgatgatgatattcccatgccagcctatttcaggttcctcgcgttgctcgcattcaagatattttctgctgagcaggtagatgttgctgttcttgaggttggcctaggagggaagtttgatgcaactaatgtggttaaagcacctgtagtttgtggcatatcttcccttggatatgatcatatggaaatccttgggaatacacttggagaaatcgcaggagagaaggctgggattttcaaggagttccggcctatactgctccacaaccagaagaggcaatgactgctctcaaacaaagagcttcggaattgggtgtctctctccaagtcgttgatcctctggagccccatcacctaaaagatcagcatcttgggctgcatggagaacatcaatatataaatgctggccttgcagttgctttggctagtacgtggcttgagaagcagggacataaagatacgttaccactcaatcgtactgatcccttaccagatcattttattagagggctatcaagtgcttctttgcaaggccgagcacagattgttccagattcacaagtgaattcagaagaggacaaagattgttctcttgttttttatttggatggagcgcacagtcctgaaagcatggaagtatgtggcaagtggttttcccatgtcacaaaggatgatacaaggctaccatcttctttggagcagtctcatacatctaggtctcaaaagatccttctgttcaactgcatgtctgtgagagatccgatgagattgcttccttgtctcctggatgcatcaactcaaaatggagtccactttgacctggccctatttgtgccgaaccaatcacaacacacgaagcttggttctaacacttcagcaccagcggagcctgagcaaatcgatttgtcatggcagctgtcacttcaaacagtgtgggagaagttacttcaggataaaggtataaatactacaaaatccagcgacactagtaaagtttttgattcgcttccggtcgcaatcgagtggctaaggagaaatgcccgagaaaaccaatctacttctttccaggtgctggttactggctccctgcatctcgttggggatgtcttgagaataatcaagaagtgatacgccgctcgaaatccaaactggaactggactatgatctatggtctctcccaaggctaacatgattagcaaggggagacatttgaacggtgcttgcttattggtgccaaccaagctgcgagcttcttgtgtttttttttgtggccacggtcgccttccactcgggaaaccaccgcgcccgttcttgtgaaggcatggaataggatgatcgtgccaccatagaacataactgggaaatgaatttgacatggaactgggacagtctgtatactcacaaaataagatcgcgtggggttttcttgttcaagtgcaaagaaaccagtcaattcttctccagagtagcaagaattcattcatgttgtgactttgatgatgtatccttgttctttctcccaaaccgaaacctgatgaaaatgcatgcatcgctgtccgccgcaccaaaccaaaattggtgaggcaagcgcacgcctgccccggtgtctggtatcaccgccacgggtctccagatggccgagctggatttactttctgtgccgcccttgttgtctgcgtatataaaatctttattccgttgcttgtgcgtgatgtattacaaactaccgtcccttgccatctccaacttgtgctgttgaaaccctgcctgaaaaagcatgggattgccgcaacaaagcttggtcaggctcatggtagtagtagtgctcacagtctcgctcctgggagcagagcagagaggcctcttctgccacggccgacgggttccggaatccgacgccgaggggacgtcgtctttcaggcagcacggtcaacagaaacttggctggaggcgagtcgtgcaggtgcaggatctgtccgaggctaagagaagggtgccgcaggggtcaaacccgctgcacaactgaactctcaagagggacctcaactcggtcggtgctcagcatctatctgtctatctatctatctgagctcctgagcgacaagggaggctattttctcttgttttttttgttttttttttgccgtgatgtaatgtaaccgagcactggcacttgttgaccctatcggtatcctctatattacc

SEQ ID NO: 81891 - DNA, 2810 bp, Zea Mays
ccacctaatctggtaataaagaagaatcagccccccaccagttggaacctgtctgtatgcggcactgcggcgcccgtggggcccaccacggcgccgccggcagcgtcaccaacccccacctccgccctcccaccggcactcccctcgcctgctccacgacgcttatgcgctcgcgtcccgctctcgccgcccacctccggcgcctgctcctcctctctccctccgcccacctcatcatcatccgccgcgccatggcctccgccgccgccgcgcaggcgcagccaggtggcgccccaccggcgaccgcggagtacgaggaggtgctggggcggctctcctcgctcatcacgcagaaggtgcgcgcgaacagcgccaaccgcggcaaccagtgggacctcatggagcactacgtcaagattctggagctggaggagtcgatcgcgcggatgaaagtgattcacgtcgcggggaccaaggggaagggttccacatgcacattcaccgagtcaatcctgcgatcgtgtggcttccatactgggctgttcacctcaccacatttgatggatgttagagagcgatttcagctagatggggttaatatttctgaagagaaatttttgaagtacttctggtggtgctggaacaagttgaaggagaagactgatgatgatattcccatgccagcctatttcaggttcctcgcgttgctcgcattcaagatattttctgctgagcaggtagatgttgctgttcttgaggttggcctaggagggaagtttgatgcaactaatgtgggaatacacttggagaaatcgcaggagagaaggctgggattttcaagaaaggagttccggcctatactgctccacaaccagaagaggcaatgactgctctcaaacaaagagcttcggaattgggtgtctctctccaagtcgttgatcctctggagccccatcacctaaaagatcagcatcttgggctgcatggagaacatcaatatataaatgctggccttgcagttgctttggctagtacgtggcttgagaagcagggacataaagatacgttaccactcaatcgtactgatcccttaccagatcattttattagagggctatcaagtgcttctttgcaaggccgagcacagattgttccagattcacaagtgaattcagaagaggacaaagattgttctcttgttttttatttggatggagcgcacagtcctgaaagcatggaagtatgtggcaagtggttttcccatgtcacaaaggatgatacaaggctaccatcttctttggagcagtctcatacatctaggtctcaaaagatccttctgttcaactgcatgtctgtgagagatccgatgagattgcttccttgtctcctggatgcatcaactcaaaatggagtccactttgacctggccctatttgtgccgaaccaatcacaacacacgaagcttggttctaacacttcagcaccagcggagcctgagcaaatcgatttgtcatggcagctgtcacttcaaacagtgtgggagaagttacttcaggataaaggtataaatactacaaaatccagcgacactagtaaagtttttgattcgcttccggtcgcaatcgagtggctaaggagaaatgcccgagaaaaccaatctacttctttccaggtgctggttactggctccctgcatctcgttggggatgtcttgagaataatcaagaagtgatacgccgctcgaaatccaaactggaactggactatgatctatggtctctcccaaggctaacatgattagcaaggggagacatttgaacggtgcttgcttattggtgccaaccaagctgcgagcttcttgtgtttttttttgtggccacggtcgccttccactcgggaaaccaccgcgcccgttcttgtgaaggcatggaataggatgatcgtgccaccatagaacataactgggaaatgaatttgacatggaactgggacagtctgtatactcacaaaataagatcgcgtggggttttcttgttcaagtgcaaagaaaccagtcaattcttctccagagtagcaagaattcattcatgttgtgactttgatgatgtatccttgttctttctcccaaaccgaaacctgatgaaaatgcatgcatcgctgtccgccgcaccaaaccaaaattggtgaggcaagcgcacgcctgccccggtgtctggtatcaccgccacgggtctccagatggccgagctggatttactttctgtgccgcccttgttgtctgcgtatataaaatctttattccgttgcttgtgcgtgatgtattacaaactaccgtcccttgccatctccaacttgtgctgttgaaaccctgcctgaaaaagcatgggattgccgcaacaaagcttggtcaggctcatggtagtagtagtgctcacagtctcgctcctgggagcagagcagagaggcctcttctgccacggccgacgggttccggaatccgacgccgaggggacgtcgtctttcaggcagcacggtcaacagaaacttggctggaggcgagtcgtgcaggtgcaggatctgtccgaggctaagagaagggtgccgcaggggtcaaacccgctgcacaactgaactctcaagagggacctcaactcggtcggtgctcagcatctatctgtctatctatctatctgagctcctgagcgacaagggaggctattttctcttgttttttttgttttttttttgccgtgatgtaatgtaaccgagcactggcacttgttgaccctatcggtatcctctatattacc

SEQ ID NO: 81892 - DNA, 2030 bp, Zea Mays
ccacctaatctggtaataaagaagaatcagccccccaccagttggaacctgtctgtatgcggcactgcggcgcccgtggggcccaccacggcgccgccggcagcgtcaccaacccccacctccgccctcccaccggcactcccctcgcctgctccacgacgcttatgcgctcgcgtcccgctctcgccgcccacctccggcgcctgctcctcctctctccctccgcccacctcatcatcatccgccgcgccatggcctccgccgccgccgcgcaggcgcagccaggtggcgccccaccggcgaccgcggagtacgaggaggtgctggggcggctctcctcgctcatcacgcagaaggtgcgcgcgaacagcgccaaccgcggcaaccagtgggacctcatggagcactacgtcaagattctggagctggaggagtcgatcgcgcggatgaaagtgattcacgtcgcggggaccaaggggaagggttccacatgcacattcaccgagtcaatcctgcgatcgtgtggcttccatactgggctgttcacctcaccacatttgatggatgttagagagcgatttcagctagatggggttaatatttctgaagagaaatttttgaagtacttctggtggtgctggaacaagttgaaggagaagactgatgatgatattcccatgccagcctatttcaggttcctcgcgttgctcgcattcaagatattttctgctgagcaggtagatgttgctgttcttgaggttggcctaggagggaagtttgatgcaactaatgtggttaaagcacctgtagtttgtggcatatcttcccttggatatgatcatatggaaatccttgggaatacacttggagaaatcgcaggagagaaggctgggattttcaagaaaggagttccggcctatactgctccacaaccagaagaggcaatgactgctctcaaacaaagagcttcggaattgggtgtctctctccaagtcgttgatcctctggagccccatcacctaaaagatcagcatcttgggctgcatggagaacatcaatatataaatgctggccttgcagttgctttggctagtacgtggcttgagaagcagggacataaagatacgttaccactcaatcgtactgatcccttaccagatcattttattagagggctatcaagtgcttctttgcaaggccgagcacagattgttccagattcacaagtgaattcagaagaggacaaagattgttctcttgttttttatttggatggagcgcacagtcctgaaagcatggaagtatgtggcaagtggttttcccatgtcacaaaggatgatacaaggctaccatcttctttggagcagtctcatacatctaggtctcaaaaggagtccactttgacctggccctatttgtgccgaaccaatcacaacacacgaagcttggttctaacacttcagcaccagcggagcctgagcaaatcgatttgtcatggcagctgtcacttcaaacagtgtgggagaagttacttcaggataaaggtataaatactacaaaatccagcgacactagtaaagtttttgattcgcttccggtcgcaatcgagtggctaaggagaaatgcccgagaaaaccaatctacttctttccaggtgctggttactggctccctgcatctcgttggggatgtcttgagaataatcaagaagtgatacgccgctcgaaatccaaactggaactggactatgatctatggtctctcccaaggctaacatgattagcaaggggagacatttgaacggtgcttgcttattggtgccaaccaagctgcgagcttcttgtgtttttttttgtggccacggtcgccttccactcgggaaaccaccgcgcccgttcttgtgaaggcatggaataggatgatcgtgccaccatagaacataactgggaaatgaatttgacatggaactgggacagtctgtatactcacaaaataagatcgcgtggggttttcttgttcaaaaaaaagaa

SEQ ID NO: 81893 - DNA, 2152 bp, Zea Mays
caaatatgtggttttaaggtagatgttgctgttcttgaggttggcctaggagggaagtttgatgcaactaatgtggttaaagcacctgtagtttgtggcatatcttcccttggatatgatcatatggaaatccttgggaatacacttggagaaatcgcaggagagaaggctgggattttcaagaaaggagttccggcctatactgctccacaaccagaagaggcaatgactgctctcaaacaaagagcttcggaattgggtgtctctctccaagtcgttgatcctctggagccccatcacctaaaagatcagcatcttgggctgcatggagaacatcaatatataaatgctggccttgcagttgctttggctagtacgtggcttgagaagcagggacataaagatacgttaccactcaatcgtactgatcccttaccagatcattttattagagggctatcaagtgcttctttgcaaggccgagcacagattgttccagattcacaagtgaattcagaagaggacaaagattgttctcttgttttttatttggatggagcgcacagtcctgaaagcatggaagtatgtggcaagtggttttcccatgtcacaaaggatgatacaaggctaccatcttctttggagcagtctcatacatctaggtctcaaaagatccttctgttcaactgcatgtctgtgagagatccgatgagattgcttccttgtctcctggatgcatcaactcaaaatggagtccactttgacctggccctatttgtgccgaaccaatcacaacacacgaagcttggttctaacacttcagcaccagcggagcctgagcaaatcgatttgtcatggcagctgtcacttcaaacagtgtgggagaagttacttcaggataaaggtataaatactacaaaatccagcgacactagtaaagtttttgattcgcttccggtcgcaatcgagtggctaaggagaaatgcccgagaaaaccaatctacttctttccaggtgctggttactggctccctgcatctcgttggggatgtcttgagaataatcaagaagtgatacgccgctcgaaatccaaactggaactggactatgatctatggtctctcccaaggctaacatgattagcaaggggagacatttgaacggtgcttgcttattggtgccaaccaagctgcgagcttcttgtgtttttttttgtggccacggtcgccttccactcgggaaaccaccgcgcccgttcttgtgaaggcatggaataggatgatcgtgccaccatagaacataactgggaaatgaatttgacatggaactgggacagtctgtatactcacaaaataagatcgcgtggggttttcttgttcaagtgcaaagaaaccagtcaattcttctccagagtagcaagaattcattcatgttgtgactttgatgatgtatccttgttctttctcccaaaccgaaacctgatgaaaatgcatgcatcgctgtccgccgcaccaaaccaaaattggtgaggcaagcgcacgcctgccccggtgtctggtatcaccgccacgggtctccagatggccgagctggatttactttctgtgccgcccttgttgtctgcgtatataaaatctttattccgttgcttgtgcgtgatgtattacaaactaccgtcccttgccatctccaacttgtgctgttgaaaccctgcctgaaaaagcatgggattgccgcaacaaagcttggtcaggctcatggtagtagtagtgctcacagtctcgctcctgggagcagagcagagaggcctcttctgccacggccgacgggttccggaatccgacgccgaggggacgtcgtctttcaggcagcacggtcaacagaaacttggctggaggcgagtcgtgcaggtgcaggatctgtccgaggctaagagaagggtgccgcaggggtcaaacccgctgcacaactgaactctcaagagggacctcaactcggtcggtgctcagcatctatctgtctatctatctatctgagctcctgagcgacaagggaggctattttctcttgttttttttgttttttttttgccgtgatgtaatgtaaccgagcactggcacttgttgaccctatcggtatcctctatattacc

SEQ ID NO: 81894 - DNA, 846 bp, Zea Mays
ggacaagttactgattgctgaaatctgttgtctgtttctattataatacatggaacatttgcaaattggtggatcatctcataacctataatccatattgggtgtttttatgacaaattacatggtctttgaggtagggttttgcagatgcattgagagggtggatacagtgcatatcccatcttttccactgctcttctatttaatcttcttctttggcatgttctgtttatgggattcttagcttatctgacatttgagttgaactattgaagttgatgctgatagattaaaggttcctgatattctattgaatcttaaacgaggctgaaaccacaactgctaatacgtaaggatgaacaagccattttctttattagcacatgggaatatcacacatgctgcttaggtgtgtttgccttcattcctataagtatacatacaaacaaaaagaaaaagaaaagaataccccacaaagggtgctcatgtcctagctcccagcttgaaatcatctgcttctgctttggctcagcagattcagtacagcatgtatgtgtaacagtgtaagcaatgtgtcacggtatccatcatcccatttcagcagcatgtctggccgttcgtgccttctttttttggctggggactgggggggaggtacagtgcaaaccaacttctccaggccccggccggccctttgtttcccgcactccaactaaattacccaagaagaagaagaaggaacaagtataggaaacgaagctatggacctacctcttgctaatctttggccgccttgtttcgccaagcagcgatggagttgggaatgttgtcgaggagaggcttggg

SEQ ID NO: 81895 - DNA, 1443 bp, Zea Mays
gtcagcaccatctccatgttcgctgctcgataagcttctagccttcctatgatgacctggaggtggtgcaaaacccagaaattcagtaggccaatagaagaatataacgcaagcgaatggtactagcggatttaccttgagcgtacgtcgccatctcagtgccttcgtaggtgaggttctcctgtggagtcggtggaaggccatagtatccctgcagaaggctcatggacggcgaaactgtgctccgtggtggtttaagaaatgggtccatggaagcggcatttttgggagggcggcgtgttgtccattctctgaaagaaaccatattgataatgaagtgtacatagccaagagggggcaccgacattgaacactagtttagtcagcatggtgagaaggcgtcaaatggcagcactattaagctattattattgaaggctgcagcatatgcagagcatccattaaataatataagtatgatgtccttctacatcaaaatccctccataagaaaaggaaaagggaaaaaaatacttctgtactttgtgtatggactcttctataatgtttctgcaccagttcaaggttcggtatctgtcaagaagagagtgtgtgtagtgatgtagagacagacgtcagaggagagtgcaagcccaagcatgtggaggccgctgcacatttgttgccaggcaggcgtggatcatggtttctctttggaagttgttgcatcatttggaagtttaggaggaaggaacacagcttagctgccattaggcgtcaggttagtgctcaacacactcaagggcagttgcgtctgtgagtgtggagtggtgggaagtcagtttcacaccggtggaacactgccctacctacgtccccagttctcaacggtgtgtggccaaacctgccaacctcaaggctagtgatttgacctgtaaacgggctgtggcaatgcaacgtggtgcggtgcttactatcaatcactgccggtgtgtttcgatgcaatcacgttataagcgaagggaagaaacaaaacgattctttaatggatcatcaggcgatatggtactgcactgtattgcgcgcagcataagccacccacaggcgattaaaggtgtgactgatctattgttagcatgtaatgagtagtaataatgatagatggaagaggaaattaagcgcgcggtgttgtgttcaggatgattgtgcgtggagagagagagagagagagagagagagagagagagagagagagtaaacctggcgacgcgatcggcgtggttccttggggaataggagggaagagacggtggtgcggcggcgggctggtggctcccgtggagcgggacccggagagtcttgtgcgcgaacatctgcaggtcggcgttgaggccgttggcgcgcttcacgtccgccacctgtatggagcagcagtaggcacagg

SEQ ID NO: 81896 - DNA, 5344 bp, Zea Mays
agaggaacccagcgtccacaccacagcccacggctgagactcaggtgaggtccgccgcgtccccccgctgccacaacccacaaccactacctgagtacctgaccaccaccggataggatgaagccgccggtgagcagggccgccttcgcgtccgtgctgatagggccgcgcacgctcggggcctctctggtggccgcccgctgcgcctcctcctctgccgccgctgccgtcactgcctatggaaatcgccgcaaccgatcctccagagcatctcaactctctcctcaatgtgcttcaagcacgaggtgaaaagattgtttctcctggagcaaaaagagggttgattccatgtgttgttcccttatcagaaagtccagcaggtgatttgacatctctccttagatggccaaccgctccaactgggatggaaatgcctgttgtggaagttcgtaaacatgggctgtggcttttggctaaaaatgtgaaacagtatatccacagaatacttgttgaggctgacttcagtgctggaactggtgatgatttatgggctgctgtgggcgaagctggtaaaaacctttacgctaaaggcgaattcaaagagtcgcaggtggcagaccttgatgtctatttgttgaagaaggttggacttttccctgatgttatagagaggaaaacattgcgccatctcgaaaaaggagataatgtctcagctctcattactggagaattctatactagagatcaatttccaggatttggaagaccctttgtgttcaatgcagagatttttaaaagagttggacgtacatctgaagccaaagattcagctcgagtggctctgaaatcaccatggtggacacttggctgcagttacgaagaggctgctgaactagctgggtgggaggatgagcagctagagtttataagagagaaggtaactgaggagggtaagcgcgaggacctgaagagaggaaaggctccagaacaggtgattcttgacgaggcggcattcttaatggatttagcgtccgtggatggtaactgggacgaggttgtggatcggattgctgaatgttacagagaggctgggcttcatgacattgcgaatttcattgcctacagggaatagatgttagattccctatggtctagaatgttattcaagaaattttgattcatttgtgctctgctaatatatattcttatatacgggaagaacgcacaaccgttatatcgcagcagtccttttttgttttgttttgacatcagctagtgaccatagtttctttcctgtatagctctgaatgtacttgttttttccatttaaatttccatgcttattcatggttagtaagtgtcagattgagtgcattttattctcttgatcgatggctgatttgctgattgttctcgcgatacatagagaggacccgagcaatagatacatcaaagttggttgtgtggataatgtcatgacactggcagtcatggcaagcttggactggaaagagattattgtttggttgtgtgcatgcaaaatggttgaagaggcggctggtttgtaatgctggtgataacaaaatgaagaggttcaggaaagcaaataaagatatagagtgctaaattatcagcatgagcgtggagagaattcaggagagtgtggttgggagagaagctgccatgtcaaccgtcgagtcatcaggatcagctttatcccggcaaaggccagaaaccgttacgagtggtccacgagggtggctgctgtgcggcctatcttctccctgtccaatctctgcttctccctcctctcccacccagaatcagaagcatcgcgagtcgtcgccgggacaccgacgactgggcgagtgctgccgccggcctttctccaggtctttgccggacgccctcctgaccttcatgagctgttccgcggtcgcctccgatggcattgcgctgcacttccctaccccgtcgagggcaggaccctccgcggaggaggaggtgtctgcgcgtgcggggtgctcgctctcggttcccacaggagtactaggagagcgaggcgcaggcagtcaggcaccgagacacgcgccagggcagaaccaagtatgctatgcagattgtattacatgcattacctaataaagacaggcgtgtccagaaggtgtcacttgcagctgagctactcgattcgaaaaaggcaagatactgtcttgaagtagagattggcaaatctcctccgctttctgatgacgacgtctggttgcgatgctgaagttcacaggatttaagttgctaaacaacatttcagacagtgggaaggccttcctaatgattctagtatcagacatccttctagggttactgttccaggatgtccagagcttcatgtattttagaactgaaacgtgtcgacatcagaagagggaggcataatgagttgcagggttcagtatgcagtaaaaggaatcgccatgcccacatctacctgggccttttagccgggccgaatcccggcaaaggcccactgtagacccagaagaaaccgctagagttgtccatgaggtgtgaggcccatgagggttgctggtgtggcgcgtccgtggatttctctctagcaggctatgcctgcctggatcatcccgactcttcgtctccagctggcagctgctgcttctccgggtgcatctgcccctgcgttccaagtaccgctggggccagctatcttgctacttgctaggcagcatatggtccgcgtttcatgaccttcatgagctgttccgcggccgtctccaacaggaccctctgcgggggccacggcgctgtctgcgcgcgcggggtgctcgctctcggttcccacagtagtaggaggagggcgaggcgcagacacgcggtggtcttcgctaagaggaggcggcggcgtctcagcaaatggcagcggccgtggtggaagaccttcttttctgactggaacgaagacgacgagagcctggccgggtggagggaggaggacgagctcttggaggagattggcgccaaccaggagctgtcggacaatgaaaagttcaaggtgtggatgagtaaggccgaggcaatcgttgaaatgcgcgaggcccagcaggatgcgatgaacgccgaggagcgatcgtgggaggattggatcagtggtggcggcacgtcagggactggaggaggtggggactggaatcgggaggacagcttgttggaccagataactgatgatcctgcagagattgtgagggacaagagcattattcagattttcagagattccatcaatgaggattacgaggacatgctgttcgaagatcgagtgtttatgtatgcctcgacaaactcggccaaatttctagcattgttgattgtggttccatgggtgatagattttctagtgcatgactatgttatgatgccctttttagagaggtatgtccagaaggtgccacttgcagctgagctactcgatgtaaggcgcagccaaaagctgcagatggttaaagacctaaatattgaaaaggatagagttgagggatgattggaggctagaaaatcgaaatgctttcgcaaatatatggtccgatactgtttatggaattgtgctatttcttcttatgtgcttcaaccagagcaaagttgcaatgctgaagttcacgggatataaggtgctaaataacatttcagacagtgggaaagcctttcttattattttagtatcggacatccttctaggctaccattcagagtcaggttggcatacattggtagaagttattctcgagcattatgggcttgaagctgatgaagcggcggtcacattttttgtttgtctggttccagtggctttcgatgtgtacataaaatattgggtatacaaataccttccaagattatcacccagtgtgggaaacgttttggatgaaataaagcgccattagagaactttttttagtttccttattgggaaattgcttgagaatttgtcgccttccaggtatgtactgggctctggattcctactcgcttaattttcggagtttgaacagttagtggagaatctattcactaactgtgttacactgtgcctaaggttagtcgttcgaattgaagaactaaccttagacataaaagttaggcaaagtgtaacaaattaggtagcgaatcaaacaggcagtccttgaacaataaggatgcatatttctgtacgttaggaattaccaggttcattcttttggcaagaaaaaaataacaatgttcatttgaaaggtgctgtgtgaaatatttttctcagatgacagtgtaaaatgttatgaaacattttttttttgtgtattcaactttttttttcttgtattatgcttgagatgatgaatacataaattttccccatcactcaagaatgaacatataactgccccaacgccaaaagccataaattatcctgactagataatttgattttttttgtgtgcttaggctgggaaactaattacaatttgcaggtagtcaatggcttggcatataaagttttaaaatctgaacgatgtcttcgtctgaaaggccttgcctagaatgtctgtctggtgatcaatcagagtctcaggctgttcgagaagactgggaatttggagaagtaacctaggtagtccttattctaaaagaaaggttccatgactcggaatcaacgtcaggcaaaaatctcttctctcttatttacatggtgttatctacttgtaaaataagaaatcgaatgattttgcgcgaaatgagacagccgtgctgacggacgtctgttctgaccaacaagcaattgtttttcctttgcttttgagatctgaactgacggttagcttcacgtttcaaatttgcttcgctaaaaaaagatagacccagtgttagcggcttccacataaatgaggtctagtgaaggaataatcgagtcttgctcctgtatttttgcagagactcagaacaaggaggatgcactgttgctttatggacaaattgcacttctctattttttcctttgactttgccattattggacttgtgacttttttatggggtttcatgcatgctatggttaattccctcgcaagcttattcaccatattttcatgattatgcggaggaagttgagtattccactttctcttccattgaataagtcccttcctagcctatcaccctcttctttgacctctttactttgttttataatggtatcatcgcaaggtcctacaagtgttagcacatgatgtaataaattgagcttatgtacatgtgcacttgtgaggtactgaggttggaatgattttaatgttgt

SEQ ID NO: 81897 - DNA, 5125 bp, Zea Mays
agaggaacccagcgtccacaccacagcccacggctgagactcaggtgaggtccgccgcgtccccccgctgccacaacccacaaccactacctgagtacctgaccaccaccggataggatgaagccgccggtgagcagggccgccttcgcgtccgtgctgatagggccgcgcacgctcggggcctctctggtggccgcccgctgcgcctcctcctctgccgccgctgccgtcactgcctatgatcatgcatcgtttgtcaaggaaatcgccgcaaccgatcctccagagcatctcaactctctcctcaatgtgcttcaagcacgaggtgaaaagattgtttctcctggagcaaaaagagggttgattccatgtgttgttcccttatcagaaagtccagcaggtgatttgacatctctccttagatggccaaccgctccaactgggatggaaatgcctgttgtggaagttcgtaaacatgggctgtggcttttggctaaaaatgtgaaacagtatatccacagaatacttgttgaggctgacttcagtgctggaactggtgatgatttatgggctgctgtgggcgaagctggtaaaaacctttacgctaaaggcgaattcaaagagtcgcaggtggcagaccttgatgtctatttgttgaagaaggttggacttttccctgatgttatagagaggaaaacattgcgccatctcgaaaaaggagataatgtctcagctctcattactggagaattctatactagagatcaatttccaggatttggaagaccctttgtgttcaatgcagagatttttaaaagagttggacgtacatctgaagccaaagattcagctcgagtggctctgaaatcaccatggtggacacttggctgcagttacgaagaggctgctgaactagctgggtgggaggatgagcagctagagtttataagagagaaggtaactgaggagggtaagcgcgaggacctgaagagaggaaaggctccagaacaggtgattcttgacgaggcggcattcttaatggatttagcgtccgtggatggtaactgggacgaggttgtggatcggattgctgaatgttacagagaggctgggcttcatgacattgcgaatttcattgcctacagggaatagatgttagattccctatggtctagaatgttattcaagaaattttgattcatttgtgctctgctaatatatattcttatatacgggaagaacgcacaaccgttatatcgcagcagtccttttttgttttgttttgacatcagctagtgaccatagtttctttcctgtatagctctgaatgtacttgttttttccatttaaatttccatgcttattcatggttagtaagtgtcagattgagtgcattttattctcttgatcgatggctgatttgctgattgttctcgcgatacatagagaggacccgagcaatagatacatcaaagttggttgtgtggataatgtcatgacactggcagtcatggcaagcttggactggaaagagattattgtttggttgtgtgcatgcaaaatggttgaagaggcggctggtttgtaatgctggtgataacaaaatgaagaggttcaggaaagcaaataaagatatagagtgctaaattatcagcatgagcgtggagagaattcaggagagtgtggttgggagagaagctgccatgtcaaccgtcgagtcatcaggatcagctttatcccggcaaaggccagaaaccgttacgagtggtccacgagggtggctgctgtgcggcctatcttctccctgtccaatctctgcttctccctcctctcccacccagaatcagaagcatcgcgagtcgtcgccgggacaccgacgactgggcgagtgctgccgccggcctttctccaggtctttgccggacgccctcctgaccttcatgagctgttccgcggtcgcctccgatggcattgcgctgcacttccctaccccgtcgagggcaggaccctccgcggaggaggaggtgtctgcgcgtgcggggtgctcgctctcggttcccacaggagtactaggagagcgaggcgcaggcagtcaggcaccgagacacgcgccagggcagaaccaagtatgctatgcagattgtattacatgcattacctaataaagacaggcgtgtccagaaggtgtcacttgcagctgagctactcgattcgaaaaaggcaagatactgtcttgaagtagagattggcaaatctcctccgctttctgatgacgacgtctggtatgagctgcgggaaaaaaaatgctgaatacaatagctttcttgtcaagtcattactttttgtaaaatcaccatccatcagaatcattacttttatagcacctactttggaccaaagatgtgtcatccagttagcgtaactagcagacagctttctgtaataatgtataggcaatgtaaatttgtctgattgattatcatggccttttgtttctccaaatgaatgtatagggttatgttgttatcatacatcttacttttactccctcctcacattcaggttgcgatgctgaagttcacaggatttaagttgctaaacaacatttcagacagtgggaaggccttcctaatgattctagtatcagacatccttctagggttactgttccaggatgtccagagcttcatgtattttagaactgaaacgtgtcgacatcagaagagggaggcataatgagttgcagggttcagtatgcagtaaaaggaatcgccatgcccacatctacctgggccttttagccgggccgaatcccggcaaaggcccactgtagacccagaagaaaccgctagagttgtccatgaggtgtgaggcccatgagggttgctggtgtggcgcgtccgtggatttctctctagcaggctatgcctgcctggatcatcccgactcttcgtctccagctggcagctgctgcttctccgggtgcatctgcccctgcgttccaagtaccgctggggccagctatcttgctacttgctaggcagcatatggtccgcgtttcatgaccttcatgagctgttccgcggccgtctccaacaggaccctctgcgggggccacggcgctgtctgcgcgcgcggggtgctcgctctcggttcccacagtagtaggaggagggcgaggcgcagacacgcggtggtcttcgctaagaggaggcggcggcgtctcagcaaatggcagcggccgtggtggaagaccttcttttctgactggaacgaagacgacgagagcctggccgggtggagggaggaggacgagctcttggaggagattggcgccaaccaggagctgtcggacaatgaaaagttcaaggtgtggatgagtaaggccgaggcaatcgttgaaatgcgcgaggcccagcaggatgcgatgaacgccgaggagcgatcgtgggaggattggatcagtggtggcggcacgtcagggactggaggaggtggggactggaatcgggaggacagcttgttggaccagataactgatgatcctgcagagattgtgagggacaagagcattattcagattttcagagattccatcaatgaggattacgaggacatgctgttcgaagatcgagtgtttatgtatgcctcgacaaactcggccaaatttctagcattgttgattgtggttccatgggtgatagattttctagtgcatgactatgttatgatgccctttttagagaggtatgtccagaaggtgccacttgcagctgagctactcgatgtaaggcgcagccaaaagctgcagatggttaaagacctaaatattgaaaaggatagagttgagggatgattggaggctagaaaatcgaaatgctttcgcaaatatatggtccgatactgtttatggaattgtgctatttcttcttatgtgcttcaaccagagcaaagttgcaatgctgaagttcacgggatataaggtgctaaataacatttcagacagtgggaaagcctttcttattattttagtatcggacatccttctaggagtcaggttggcatacattggtagaagttattctcgagcattatgggcttgaagctgatgaagcggcggtcacattttttgtttgtctggttccagtggctttcgatgtgtacataaaatattgggtatacaaataccttccaagattatcacccagtgtgggaaacgttttggatgaaataaagcgccattagagaactttttttagtttccttattgggaaattgcttgagaatttgtcgccttccaggtagtcaatggcttggcatataaagttttaaaatctgaacgatgtcttcgtctgaaaggccttgcctagaatgtctgtctggtgatcaatcagagtctcaggctgttcgagaagactgggaatttggagaagtaacctaggtagtccttattctaaaagaaaggttccatgactcggaatcaacgtcaggcaaaaatctcttctctcttatttacatggtgttatctacttgtaaaataagaaatcgaatgattttgcgcgaaatgagacagccgtgctgacggacgtctgttctgaccaacaagcaattgtttttcctttgcttttgagatctgaactgacggttagcttcacgtttcaaatttgcttcgctaaaaaaagatagacccagtgttagcggcttccacataaatgaggtctagtgaaggaataatcgagtcttgctcctgtatttttgcagagactcagaacaaggaggatgcactgttgctttatggacaaattgcacttctctattttttcctttgactttgccattattggacttgtgacttttttatggggtttcatgcatgctatggttaattccctcgcaagcttattcaccatattttcatgattatgcggaggaagttgagtattccactttctcttccattgaataagtcccttcctagcctatcaccctcttctttgacctctttactttgttttataatggtatcatcgcaaggtcctacaagtgttagcacatgatgtaataaattgagcttatgtacatgtgcacttgtgaggtactgaggttggaatgattttaatgttgt

SEQ ID NO: 81898 - DNA, 3778 bp, Zea Mays
agaggaacccagcgtccacaccacagcccacggctgagactcaggtgaggtccgccgcgtccccccgctgccacaacccacaaccactacctgagtacctgaccaccaccggataggatgaagccgccggtgagcagggccgccttcgcgtccgtgctgatagggccgcgcacgctcggggcctctctggtggccgcccgctgcgcctcctcctctgccgccgctgccgtcactgcctatgatcatgcatcgtttgtcaaggaaatcgccgcaaccgatcctccagagcatctcaactctctcctcaatgtgcttcaagcacgaggtgaaaagattgtttctcctggagcaaaaagagggttgattccatgtgttgttcccttatcagaaagtccagcaggtgatttgacatctctccttagatggccaaccgctccaactgggtacactaaatatactgctatttttatatccatgtatatccacagaatacttgttgaggctgacttcagtgctggaactggtgatgatttatgggctgctgtgggcgaagctggtaaaaacctttacgctaaaggcgaattcaaagagtcgcaggtggcagaccttgatgtctatttgttgaagaaggttggacttttccctgatgttatagagaggaaaacattgcgccatctcgaaaaaggagataatgtctcagctctcattactggagaattctatactagagatcaatttccaggatttggaagaccctttgtgttcaatgcagagatttttaaaagagttggacgtacatctgaagccaaagattcagctcgagtggctctgaaatcaccatggtggacacttggctgcagttacgaagaggctgctgaactagctgggtgggaggatgagcagctagagtttataagagagaaggtaactgaggagggtaagcgcgaggacctgaagagaggaaaggctccagaacaggtgattcttgacgaggcggcattcttaatggatttagcgtccgtggatggtaactgggacgaggttgtggatcggattgctgaatgttacagagaggctgggcttcatgacattgcgaatttcattgcctacagggaatagatgttgcgatgctgaagttcacaggatttaagttgctaaacaacatttcagacagtgggaaggccttcctaatgattctagtatcagacatccttctagggttactgttccaggatgtccagagcttcatgtattttagaactgaaacgtgtcgacatcagaagagggaggcataatgagttgcagggttcagtatgcagtaaaaggaatcgccatgcccacatctacctgggccttttagccgggccgaatcccggcaaaggcccactgtagacccagaagaaaccgctagagttgtccatgaggtgtgaggcccatgagggttgctggtgtggcgcgtccgtggatttctctctagcaggctatgcctgcctggatcatcccgactcttcgtctccagctggcagctgctgcttctccgggtgcatctgcccctgcgttccaagtaccgctggggccagctatcttgctacttgctaggcagcatatggtccgcgtttcatgaccttcatgagctgttccgcggccgtctccaacaggaccctctgcgggggccacggcgctgtctgcgcgcgcggggtgctcgctctcggttcccacagtagtaggaggagggcgaggcgcagacacgcggtggtcttcgctaagaggaggcggcggcgtctcagcaaatggcagcggccgtggtggaagaccttcttttctgactggaacgaagacgacgagagcctggccgggtggagggaggaggacgagctcttggaggagattggcgccaaccaggagctgtcggacaatgaaaagttcaaggtgtggatgagtaaggccgaggcaatcgttgaaatgcgcgaggcccagcaggatgcgatgaacgccgaggagcgatcgtgggaggattggatcagtggtggcggcacgtcagggactggaggaggtggggactggaatcgggaggacagcttgttggaccagataactgatgatcctgcagagattgtgagggacaagagcattattcagattttcagagattccatcaatgaggattacgaggacatgctgttcgaagatcgagtgtttatgtatgcctcgacaaactcggccaaatttctagcattgttgattgtggttccatgggtgatagattttctagtgcatgactatgttatgatgccctttttagagaggtatgtccagaaggtgccacttgcagctgagctactcgatgtaaggcgcagccaaaagctgcagatggttaaagacctaaatattgaaaaggcaagatatcgtcttgaagtagagattggcaaatctcctccactttctgatgaggaggtctggcatgagttgcgggaaaaagcgatagagttgagggatgattggaggctagaaaatcgaaatgctttcgcaaatatatggtccgatactgtttatggaattgtgctatttcttcttatgtgcttcaaccagagcaaagttgcaatgctgaagttcacgggatataaggtgctaaataacatttcagacagtgggaaagcctttcttattattttagtatcggacatccttctaggctaccattcagagtcaggttggcatacattggtagaagttattctcgagcattatgggcttgaagctgatgaagcggcggtcacattttttgtttgtctggttccagtggctttcgatgtgtacataaaatattgggtatacaaataccttccaagattatcacccagtgtgggaaacgttttggatgaaataaagcgccattagagaactttttttagtttccttattgggaaattgcttgagaatttgtcgccttccaggtagtcaatggcttggcatataaagttttaaaatctgaacgatgtcttcgtctgaaaggccttgcctagaatgtctgtctggtgatcaatcagagtctcaggctgttcgagaagactgggaatttggagaagtaacctaggtagtccttattctaaaagaaaggttccatgactcggaatcaacgtcaggcaaaaatctcttctctcttatttacatggtgttatctacttgtaaaataagaaatcgaatgattttgcgcgaaatgagacagccgtgctgacggacgtctgttctgaccaacaagcaattgtttttcctttgcttttgagatctgaactgacggttagcttcacgtttcaaatttgcttcgctaaaaaaagatagacccagtgttagcggcttccacataaatgaggtctagtgaaggaataatcgagtcttgctcctgtatttttgcagagactcagaacaaggaggatgcactgttgctttatggacaaattgcacttctctattttttcctttgactttgccattattggacttgtgacttttttatggggtttcatgcatgctatggttaattccctcgcaagcttattcaccatattttcatgattatgcggaggaagttgagtattccactttctcttccattgaataagtcccttcctagcctatcaccctcttctttgacctctttactttgttttataatggtatcatcgcaaggtcctacaagtgttagcacatgatgtaataaattgagcttatgtacatgtgcacttgtgaggtactgaggttggaatgattttaatgttgt

SEQ ID NO: 81899 - DNA, 2994 bp, Zea Mays
agaggaacccagcgtccacaccacagcccacggctgagactcaggtgaggtccgccgcgtccccccgctgccacaacccacaaccactacctgagtacctgaccaccaccggataggatgaagccgccggtgagcagggccgccttcgcgtccgtgctgatagggccgcgcacgctcggggcctctctggtggccgcccgctgcgcctcctcctctgccgccgctgccgtcactgcctatgatcatgcatcgtttgtcaaggaaatcgccgcaaccgatcctccagagcatctcaactctctcctcaatgtgcttcaagcacgaggtgaaaagattgtttctcctggagcaaaaagagggttgattccatgtgttgttcccttatcagaaagtccagcaggtgatttgacatctctccttagatggccaaccgctccaactgggatggaaatgcctgttgtggaagttcgtaaacatgggctgtggcttttggctaaaaattatatccacagaatacttgttgaggctgacttcagtgctggaactggtgatgatttatgggctgctgtgggcgaagctggtaaaaacctttacgctaaaggcgaattcaaagagtcgcaggtggcagaccttgatgtctatttgttgaagaaggttggacttttccctgatgttatagagaggaaaacattgcgccatctcgaaaaaggagataatgtctcagctctcattactggagaattctatactagagatcaatttccaggatttggaagaccctttgtgttcaatgcagagatttttaaaagagttggacgtacatctgaagccaaagattcagctcgagtggctctgaaatcaccatggtggacacttggctgcagttacgaagaggctgctgaactagctgggtgggaggatgagcagctagagtttataagagagaaggtaactgaggagggtaagcgcgaggacctgaagagaggaaaggctccagaacaggtagctgacgagagcctccttaacttgtcacatgatagggttcaattatttcttggctggctccattgcctttgctgctctggtgcactgcaggtgattcttgacgaggcggcattcttaatggatttagcgtccgtggatggtaactgggacgaggttgtggatcggattgctgaatgttacagagaggctgggcttcatgacattgcgaatttcattgcctacagggaatagatgttgcgatgctgaagttcacaggatttaagttgctaaacaacatttcagacagtgggaaggccttcctaatgattctagtatcagacatccttctagggttactgttccaggatgtccagagcttcatgtattttagaactgaaacgtgtcgacatcagaagagggaggcataatgagttgcagggttcagtatgcaggccaaatttctagcattgttgattgtggttccatgggtgatagattttctagtgcatgactatgttatgatgccctttttagagaggtatgtccagaaggtgccacttgcagctgagctactcgatgtaaggcgcagccaaaagctgcagatggttaaagacctaaatattgaaaaggcaagatatcgtcttgaagtagagattggcaaatctcctccactttctgatgaggaggtctggcatgagttgcgggaaaaagcgatagagttgagggatgattggaggctagaaaatcgaaatgctttcgcaaatatatggtccgatactgtttatggaattgtgctatttcttcttatgtgcttcaaccagagcaaagttgcaatgctgaagttcacgggatataaggtgctaaataacatttcagacagtgggaaagcctttcttattattttagtatcggacatccttctaggctaccattcagagtcaggttggcatacattggtagaagttattctcgagcattatgggcttgaagctgatgaagcggcggtcacattttttgtttgtctggttccagtggctttcgatgtgtacataaaatattgggtatacaaataccttccaagattatcacccagtgtgggaaacgttttggatgaaataaagcgccattagagaactttttttagtttccttattgggaaattgcttgagaatttgtcgccttccaggtagtcaatggcttggcatataaagttttaaaatctgaacgatgtcttcgtctgaaaggccttgcctagaatgtctgtctggtgatcaatcagagtctcaggctgttcgagaagactgggaatttggagaagtaacctaggtagtccttattctaaaagaaaggttccatgactcggaatcaacgtcaggcaaaaatctcttctctcttatttacatggtgttatctacttgtaaaataagaaatcgaatgattttgcgcgaaatgagacagccgtgctgacggacgtctgttctgaccaacaagcaattgtttttcctttgcttttgagatctgaactgacggttagcttcacgtttcaaatttgcttcgctaaaaaaagatagacccagtgttagcggcttccacataaatgaggtctagtgaaggaataatcgagtcttgctcctgtatttttgcagagactcagaacaaggaggatgcactgttgctttatggacaaattgcacttctctattttttcctttgactttgccattattggacttgtgacttttttatggggtttcatgcatgctatggttaattccctcgcaagcttattcaccatattttcatgattatgcggaggaagttgagtattccactttctcttccattgaataagtcccttcctagcctatcaccctcttctttgacctctttactttgttttataatggtatcatcgcaaggtcctacaagtgttagcacatgatgtaataaattgagcttatgtacatgtgcacttgtgaggtactgaggttggaatgattttaatgttgt

SEQ ID NO: 81900 - DNA, 5135 bp, Zea Mays
agaggaacccagcgtccacaccacagcccacggctgagactcaggtgaggtccgccgcgtccccccgctgccacaacccacaaccactacctgagtacctgaccaccaccggataggatgaagccgccggtgagcagggccgccttcgcgtccgtgctgatagggccgcgcacgctcggggcctctctggtggccgcccgctgcgcctcctcctctgccgccgctgccgtcactgcctatgatcatgcatcgtttgtcaaggaaatcgccgcaaccgatcctccagagcatctcaactctctcctcaatgtgcttcaagcacgaggtgaaaagattgtttctcctggagcaaaaagagggttgattccatgtgttgttcccttatcagaaagtccagcaggtgatttgacatctctccttagatggccaaccgctccaactgggtacactaaatatactgctatttttatatccatgtatatccacagaatacttgttgaggctgacttcagtgctggaactggtgatgatttatgggctgctgtgggcgaagctggtaaaaacctttacgctaaaggcgaattcaaagagtcgcaggtggcagaccttgatgtctatttgttgaagaaggttggacttttccctgatgttatagagaggaaaacattgcgccatctcgaaaaaggagataatgtctcagctctcattactggagaattctatactagagatcaatttccaggatttggaagaccctttgtgttcaatgcagagatttttaaaagagttggacgtacatctgaagccaaagattcagctcgagtggctctgaaatcaccatggtggacacttggctgcagttacgaagaggctgctgaactagctgggtgggaggatgagcagctagagtttataagagagaaggtaactgaggagggtaagcgcgaggacctgaagagaggaaaggctccagaacaggtgattcttgacgaggcggcattcttaatggatttagcgtccgtggatggtaactgggacgaggttgtggatcggattgctgaatgttacagagaggctgggcttcatgacattgcgaatttcattgcctacagggaatagatgttagattccctatggtctagaatgttattcaagaaattttgattcatttgtgctctgctaatatatattcttatatacgggaagaacgcacaaccgttatatcgcagcagtccttttttgttttgttttgacatcagctagtgaccatagtttctttcctgtatagctctgaatgtacttgttttttccatttaaatttccatgcttattcatggttagtaagtgtcagattgagtgcattttattctcttgatcgatggctgatttgctgattgttctcgcgatacatagagaggacccgagcaatagatacatcaaagttggttgtgtggataatgtcatgacactggcagtcatggcaagcttggactggaaagagattattgtttggttgtgtgcatgcaaaatggttgaagaggcggctggtttgtaatgctggtgataacaaaatgaagaggttcaggaaagcaaataaagatatagagtgctaaattatcagcatgagcgtggagagaattcaggagagtgtggttgggagagaagctgccatgtcaaccgtcgagtcatcaggatcagctttatcccggcaaaggccagaaaccgttacgagtggtccacgagggtggctgctgtgcggcctatcttctccctgtccaatctctgcttctccctcctctcccacccagaatcagaagcatcgcgagtcgtcgccgggacaccgacgactgggcgagtgctgccgccggcctttctccaggtctttgccggacgccctcctgaccttcatgagctgttccgcggtcgcctccgatggcattgcgctgcacttccctaccccgtcgagggcaggaccctccgcggaggaggaggtgtctgcgcgtgcggggtgctcgctctcggttcccacaggagtactaggagagcgaggcgcaggcagtcaggcaccgagacacgcgccagggcagaaccaagttgcgatgctgaagttcacaggatttaagttgctaaacaacatttcagacagtgggaaggccttcctaatgattctagtatcagacatccttctagggttactgttccaggatgtccagagcttcatgtattttagaactgaaacgtgtcgacatcagaagagggaggcataatgagttgcagggttcagtatgcagtaaaaggaatcgccatgcccacatctacctgggccttttagccgggccgaatcccggcaaaggcccactgtagacccagaagaaaccgctagagttgtccatgaggtgtgaggcccatgagggttgctggtgtggcgcgtccgtggatttctctctagcaggctatgcctgcctggatcatcccgactcttcgtctccagctggcagctgctgcttctccgggtgcatctgcccctgcgttccaagtaccgctggggccagctatcttgctacttgctaggcagcatatggtccgcgtttcatgaccttcatgagctgttccgcggccgtctccaacaggaccctctgcgggggccacggcgctgtctgcgcgcgcggggtgctcgctctcggttcccacagtagtaggaggagggcgaggcgcagacacgcggtggtcttcgctaagaggaggcggcggcgtctcagcaaatggcagcggccgtggtggaagaccttcttttctgactggaacgaagacgacgagagcctggccgggtggagggaggaggacgagctcttggaggagattggcgccaaccaggagctgtcggacaatgaaaagttcaaggtgtggatgagtaaggccgaggcaatcgttgaaatgcgcgaggcccagcaggatgcgatgaacgccgaggagcgatcgtgggaggattggatcagtggtggcggcacgtcagggactggaggaggtggggactggaatcgggaggacagcttgttggaccagataactgatgatcctgcagagattgtgagggacaagagcattattcagattttcagagattccatcaatgaggattacgaggacatgctgttcgaagatcgagtgtttatgtatgcctcgacaaactcggtatgtccagaaggtgccacttgcagctgagctactcgatgtaaggcgcagccaaaagctgcagatggttaaagacctaaatattgaaaaggcaagatatcgtcttgaagtagagattggcaaatctcctccactttctgatgaggaggatagagttgagggatgattggaggctagaaaatcgaaatgctttcgcaaatatatggtccgatactgtttatggaattgtgctatttcttcttatgtgcttcaaccagagcaaagttgcaatgctgaagttcacgggatataaggtgctaaataacatttcagacagtgggaaagcctttcttattattttagtatcggacatccttctaggagtcaggttggcatacattggtagaagttattctcgagcattatgggcttgaagctgatgaagcggcggtcacattttttgtttgtctggttccagtggctttcgatgtgtacataaaatattgggtatacaaataccttccaagattatcacccagtgtgggaaacgttttggatgaaataaagcgccattagagaactttttttagtttccttattgggaaattgcttgagaatttgtcgccttccaggtatgtactgggctctggattcctactcgcttaattttcggagtttgaacagttagtggagaatctattcactaactgtgttacactgtgcctaaggttagtcgttcgaattgaagaactaaccttagacataaaagttaggcaaagtgtaacaaattaggtagcgaatcaaacaggcagtccttgaacaataaggatgcatatttctgtacgttaggaattaccaggttcattcttttggcaagaaaaaaataacaatgttcatttgaaaggtgctgtgtgaaatatttttctcagatgacagtgtaaaatgttatgaaacattttttttttgtgtattcaactttttttttcttgtattatgcttgagatgatgaatacataaattttccccatcactcaagaatgaacatataactgccccaacgccaaaagccataaattatcctgactagataatttgattttttttgtgtgcttaggctgggaaactaattacaatttgcaggtagtcaatggcttggcatataaagttttaaaatctgaacgatgtcttcgtctgaaaggccttgcctagaatgtctgtctggtgatcaatcagagtctcaggctgttcgagaagactgggaatttggagaagtaacctaggtagtccttattctaaaagaaaggttccatgactcggaatcaacgtcaggcaaaaatctcttctctcttatttacatggtgttatctacttgtaaaataagaaatcgaatgattttgcgcgaaatgagacagccgtgctgacggacgtctgttctgaccaacaagcaattgtttttcctttgcttttgagatctgaactgacggttagcttcacgtttcaaatttgcttcgctaaaaaaagatagacccagtgttagcggcttccacataaatgaggtctagtgaaggaataatcgagtcttgctcctgtatttttgcagagactcagaacaaggaggatgcactgttgctttatggacaaattgcacttctctattttttcctttgactttgccattattggacttgtgacttttttatggggtttcatgcatgctatggttaattccctcgcaagcttattcaccatattttcatgattatgcggaggaagttgagtattccactttctcttccattgaataagtcccttcctagcctatcaccctcttctttgacctctttactttgttttataatggtatcatcgcaaggtcctacaagtgttagcacatgatgtaataaattgagcttatgtacatgtgcacttgtgaggtactgaggttggaatgattttaatgttgt

SEQ ID NO: 81901 - DNA, 5219 bp, Zea Mays
agaggaacccagcgtccacaccacagcccacggctgagactcaggtgaggtccgccgcgtccccccgctgccacaacccacaaccactacctgagtacctgaccaccaccggataggatgaagccgccggtgagcagggccgccttcgcgtccgtgctgatagggccgcgcacgctcggggcctctctggtggccgcccgctgcgcctcctcctctgccgccgctgccgtcactgcctatgatcatgcatcgtttgtcaaggaaatcgccgcaaccgatcctccagagcatctcaactctctcctcaatgtgcttcaagcacgaggtgaaaagattgtttctcctggagcaaaaagagggttgattccatgtgttgttcccttatcagaaagtccagcaggtgatttgacatctctccttagatggccaaccgctccaactgggatggaaatgcctgttgtggaagttcgtaaacatgggctgtggcttttggctaaaaatgtgaaacagtatatccacagaatacttgttgaggctgacttcagtgctggaactggtgatgatttatgggctgctgtgggcgaagctggtaaaaacctttacgctaaaggcgaattcaaagagtcgcaggtggcagaccttgatgtctatttgttgaagaaggttggacttttccctgatgttatagagaggaaaacattgcgccatctcgaaaaaggagataatgtctcagctctcattactggagaattctatactagagatcaatttccaggatttggaagaccctttgtgttcaatgcagagatttttaaaagagttggacgtacatctgaagccaaagattcagctcgagtggctctgaaatcaccatggtggacacttggctgcagttacgaagaggctgctgaactagctgggtgggaggatgagcagctagagtttataagagagaaggtaactgaggagggtaagcgcgaggacctgaagagaggaaaggctccagaacaggtgattcttgacgaggcggcattcttaatggatttagcgtccgtggatggtaactgggacgaggttgtggatcggattgctgaatgttacagagaggctgggcttcatgacattgcgaatttcattgcctacagggaatagatgttagattccctatggtctagaatgttattcaagaaattttgattcatttgtgctctgctaatatatattcttatatacgggaagaacgcacaaccgttatatcgcagcagtccttttttgttttgttttgacatcagctagtgaccatagtttctttcctgtatagctctgaatgtacttgttttttccatttaaatttccatgcttattcatggttagtaagtgtcagattgagtgcattttattctcttgatcgatggctgatttgctgattgttctcgcgatacatagagaggacccgagcaatagatacatcaaagttggttgtgtggataatgtcatgacactggcagtcatggcaagcttggactggaaagagattattgtttggttgtgtgcatgcaaaatggttgaagaggcggctggtttgtaatgctggtgataacaaaatgaagaggttcaggaaagcaaataaagatatagagtgctaaattatcagcatgagcgtggagagaattcaggagagtgtggttgggagagaagctgccatgtcaaccgtcgagtcatcaggatcagctttatcccggcaaaggccagaaaccgttacgagtggtccacgagggtggctgctgtgcggcctatcttctccctgtccaatctctgcttctccctcctctcccacccagaatcagaagcatcgcgagtcgtcgccgggacaccgacgactgggcgagtgctgccgccggcctttctccaggtctttgccggacgccctcctgaccttcatgagctgttccgcggtcgcctccgatggcattgcgctgcacttccctaccccgtcgagggcaggaccctccgcggaggaggaggtgtctgcgcgtgcggggtgctcgctctcggttcccacaggagtactaggagagcgaggcgcaggcagtcaggcaccgagacacgcgccagggcagaaccaagtatgctatgcagattgtattacatgcattacctaataaagacaggcgtgtccagaaggtgtcacttgcagctgagctactcgattcgaaaaaggcaagatactgtcttgaagtagagattggcaaatctcctccgctttctgatgacgacgtctggtatgagctgcgggaaaaaaaatgctgaatacaatagctttcttgtcaagtcattactttttgtaaaatcaccatccatcagaatcattacttttatagcacctactttggaccaaagatgtgtcatccagttagcgtaactagcagacagctttctgtaataatgtataggcaatgtaaatttgtctgattgattatcatggccttttgtttctccaaatgaatgtatagggttatgttgttatcatacatcttacttttactccctcctcacattcaggttgcgatgctgaagttcacaggatttaagttgctaaacaacatttcagacagtgggaaggccttcctaatgattctagtatcagacatccttctagggttactgttccaggatgtccagagcttcatgtattttagaactgaaacgtgtcgacatcagaagagggaggcataatgagttgcagggttcagtatgcagtaaaaggaatcgccatgcccacatctacctgggccttttagccgggccgaatcccggcaaaggcccactgtagacccagaagaaaccgctagagttgtccatgaggtgtgaggcccatgagggttgctggtgtggcgcgtccgtggatttctctctagcaggctatgcctgcctggatcatcccgactcttcgtctccagctggcagctgctgcttctccgggtgcatctgcccctgcgttccaagtaccgctggggccagctatcttgctacttgctaggcagcatatggtccgcgtttcatgaccttcatgagctgttccgcggccgtctccaacaggaccctctgcgggggccacggcgctgtctgcgcgcgcggggtgctcgctctcggttcccacagtagtaggaggagggcgaggcgcagacacgcggtggtcttcgctaagaggaggcggcggcgtctcagcaaatggcagcggccgtggtggaagaccttcttttctgactggaacgaagacgacgagagcctggccgggtggagggaggaggacgagctcttggaggagattggcgccaaccaggagctgtcggacaatgaaaagttcaaggtgtggatgagtaaggccgaggcaatcgttgaaatgcgcgaggcccagcaggatgcgatgaacgccgaggagcgatcgtgggaggattggatcagtggtggcggcacgtcagggactggaggaggtggggactggaatcgggaggacagcttgttggaccagataactgatgatcctgcagagattgtgagggacaagagcattattcagattttcagagattccatcaatgaggattacgaggacatgctgttcgaagatcgagtgtttatgtatgcctcgacaaactcggccaaatttctagcattgttgattgtggttccatgggtgatagattttctagtgcatgactatgttatgatgccctttttagagaggtatgtccagaaggtgccacttgcagctgagctactcgatgtaaggcgcagccaaaagctgcagatggttaaagacctaaatattgaaaaggcaagatatcgtcttgaagtagagattggcaaatctcctccactttctgatgaggaggtctggcatgagttgcgggaaaaagcgatagagttgagggatgattggaggctagaaaatcgaaatgctttcgcaaatatatggtccgatactgtttatggaattgtgctatttcttcttatgtgcttcaaccagagcaaagttgcaatgctgaagttcacgggatataaggtgctaaataacatttcagacagtgggaaagcctttcttattattttagtatcggacatccttctaggctaccattcagagtcaggttggcatacattggtagaagttattctcgagcattatgggcttgaagctgatgaagcggcggtcacattttttgtttgtctggttccagtggctttcgatgtgtacataaaatattgggtatacaaataccttccaagattatcacccagtgtgggaaacgttttggatgaaataaagcgccattagagaactttttttagtttccttattgggaaattgcttgagaatttgtcgccttccaggtagtcaatggcttggcatataaagttttaaaatctgaacgatgtcttcgtctgaaaggccttgcctagaatgtctgtctggtgatcaatcagagtctcaggctgttcgagaagactgggaatttggagaagtaacctaggtagtccttattctaaaagaaaggttccatgactcggaatcaacgtcaggcaaaaatctcttctctcttatttacatggtgttatctacttgtaaaataagaaatcgaatgattttgcgcgaaatgagacagccgtgctgacggacgtctgttctgaccaacaagcaattgtttttcctttgcttttgagatctgaactgacggttagcttcacgtttcaaatttgcttcgctaaaaaaagatagacccagtgttagcggcttccacataaatgaggtctagtgaaggaataatcgagtcttgctcctgtatttttgcagagactcagaacaaggaggatgcactgttgctttatggacaaattgcacttctctattttttcctttgactttgccattattggacttgtgacttttttatggggtttcatgcatgctatggttaattccctcgcaagcttattcaccatattttcatgattatgcggaggaagttgagtattccactttctcttccattgaataagtcccttcctagcctatcaccctcttctttgacctctttactttgttttataatggtatcatcgcaaggtcctacaagtgttagcacatgatgtaataaattgagcttatgtacatgtgcacttgtgaggtactgaggttggaatgattttaatgttgt

SEQ ID NO: 81902 - DNA, 5385 bp, Zea Mays
agaggaacccagcgtccacaccacagcccacggctgagactcaggtgaggtccgccgcgtccccccgctgccacaacccacaaccactacctgagtacctgaccaccaccggataggatgaagccgccggtgagcagggccgccttcgcgtccgtgctgatagggccgcgcacgctcggggcctctctggtggccgcccgctgcgcctcctcctctgccgccgctgccgtcactgcctatgatcatgcatcgtttgtcaaggaaatcgccgcaaccgatcctccagagcatctcaactctctcctcaatgtgcttcaagcacgaggtgaaaagattgtttctcctggagcaaaaagagggttgattccatgtgttgttcccttatcagaaagtccagcaggtgatttgacatctctccttagatggccaaccgctccaactgggatggaaatgcctgttgtggaagttcgtaaacatgggctgtggcttttggctaaaaatgtgaaacagtatatccacagaatacttgttgaggctgacttcagtgctggaactggtgatgatttatgggctgctgtgggcgaagctggtaaaaacctttacgctaaaggcgaattcaaagagtcgcaggtggcagaccttgatgtctatttgttgaagaaggttggacttttccctgatgttatagagaggaaaacattgcgccatctcgaaaaaggagataatgtctcagctctcattactggagaattctatactagagatcaatttccaggatttggaagaccctttgtgttcaatgcagagatttttaaaagagttggacgtacatctgaagccaaagattcagctcgagtggctctgaaatcaccatggtggacacttggctgcagttacgaagaggctgctgaactagctgggtgggaggatgagcagctagagtttataagagagaaggtaactgaggagggtaagcgcgaggacctgaagagaggaaaggctccagaacaggtgattcttgacgaggcggcattcttaatggatttagcgtccgtggatggtaactgggacgaggttgtggatcggattgctgaatgttacagagaggctgggcttcatgacattgcgaatttcattgcctacagggaatagatgttagattccctatggtctagaatgttattcaagaaattttgattcatttgtgctctgctaatatatattcttatatacgggaagaacgcacaaccgttatatcgcagcagtccttttttgttttgttttgacatcagctagtgaccatagtttctttcctgtatagctctgaatgtacttgttttttccatttaaatttccatgcttattcatggttagtaagtgtcagattgagtgcattttattctcttgatcgatggctgatttgctgattgttctcgcgatacatagagaggacccgagcaatagatacatcaaagttggttgtgtggataatgtcatgacactggcagtcatggcaagcttggactggaaagagattattgtttggttgtgtgcatgcaaaatggttgaagaggcggctggtttgtaatgctggtgataacaaaatgaagaggttcaggaaagcaaataaagatatagagtgctaaattatcagcatgagcgtggagagaattcaggagagtgtggttgggagagaagctgccatgtcaaccgtcgagtcatcaggatcagctttatcccggcaaaggccagaaaccgttacgagtggtccacgagggtggctgctgtgcggcctatcttctccctgtccaatctctgcttctccctcctctcccacccagaatcagaagcatcgcgagtcgtcgccgggacaccgacgactgggcgagtgctgccgccggcctttctccaggtctttgccggacgccctcctgaccttcatgagctgttccgcggtcgcctccgatggcattgcgctgcacttccctaccccgtcgagggcaggaccctccgcggaggaggaggtgtctgcgcgtgcggggtgctcgctctcggttcccacaggagtactaggagagcgaggcgcaggcagtcaggcaccgagacacgcgccagggcagaaccaagtatgctatgcagattgtattacatgcattacctaataaagacaggcgtgtccagaaggtgtcacttgcagctgagctactcgattcgaaaaaggttgcgatgctgaagttcacaggatttaagttgctaaacaacatttcagacagtgggaaggccttcctaatgattctagtatcagacatccttctagggttactgttccaggatgtccagagcttcatgtattttagaactgaaacgtgtcgacatcagaagagggaggcataatgagttgcagggttcagtatgcagtaaaaggaatcgccatgcccacatctacctgggccttttagccgggccgaatcccggcaaaggcccactgtagacccagaagaaaccgctagagttgtccatgaggtgtgaggcccatgagggttgctggtgtggcgcgtccgtggatttctctctagcaggctatgcctgcctggatcatcccgactcttcgtctccagctggcagctgctgcttctccgggtgcatctgcccctgcgttccaagtaccgctggggccagctatcttgctacttgctaggcagcatatggtccgcgtttcatgaccttcatgagctgttccgcggccgtctccaacaggaccctctgcgggggccacggcgctgtctgcgcgcgcggggtgctcgctctcggttcccacagtagtaggaggagggcgaggcgcagacacgcggtggtcttcgctaagaggaggcggcggcgtctcagcaaatggcagcggccgtggtggaagaccttcttttctgactggaacgaagacgacgagagcctggccgggtggagggaggaggacgagctcttggaggagattggcgccaaccaggagctgtcggacaatgaaaagttcaaggtgtggatgagtaaggccgaggcaatcgttgaaatgcgcgaggcccagcaggatgcgatgaacgccgaggagcgatcgtgggaggattggatcagtggtggcggcacgtcagggactggaggaggtggggactggaatcgggaggacagcttgttggaccagataactgatgatcctgcagagattgtgagggacaagagcattattcagattttcagagattccatcaatgaggattacgaggacatgctgttcgaagatcgagtgtttatgtatgcctcgacaaactcggccaaatttctagcattgttgattgtggttccatgggtgatagattttctagtgcatgactatgttatgatgccctttttagagaggtatgtccagaaggtgccacttgcagctgagctactcgatgtaaggcgcagccaaaagctgcagatggttaaagacctaaatattgaaaaggcaagatatcgtcttgaagtagagattggcaaatctcctccactttctgatgaggaggtctggcatgagttgcgggaaaaagcgatagagttgagggatgattggaggctagaaaatcgaaatgctttcgcaaatatatggtccgatactgtttatggaattgtgctatttcttcttatgtgcttcaaccagagcaaagttgcaatgctgaagttcacgggatataaggtgctaaataacatttcagacagtgggaaagcctttcttattattttagtatcggacatccttctaggctaccattcagagtcaggttggcatacattggtagaagttattctcgagcattatgggcttgaagctgatgaagcggcggtcacattttttgtttgtctggttccagtggctttcgatgtgtacataaaatattgggtatacaaataccttccaagattatcacccagtgtgggaaacgttttggatgaaataaagcgccattagagaactttttttagtttccttattgggaaattgcttgagaatttgtcgccttccaggtatgtactgggctctggattcctactcgcttaattttcggagtttgaacagttagtggagaatctattcactaactgtgttacactgtgcctaaggttagtcgttcgaattgaagaactaaccttagacataaaagttaggcaaagtgtaacaaattaggtagcgaatcaaacaggcagtccttgaacaataaggatgcatatttctgtacgttaggaattaccaggttcattcttttggcaagaaaaaaataacaatgttcatttgaaaggtgctgtgtgaaatatttttctcagatgacagtgtaaaatgttatgaaacattttttttttgtgtattcaactttttttttcttgtattatgcttgagatgatgaatacataaattttccccatcactcaagaatgaacatataactgccccaacgccaaaagccataaattatcctgactagataatttgattttttttgtgtgcttaggctgggaaactaattacaatttgcaggtagtcaatggcttggcatataaagttttaaaatctgaacgatgtcttcgtctgaaaggccttgcctagaatgtctgtctggtgatcaatcagagtctcaggctgttcgagaagactgggaatttggagaagtaacctaggtagtccttattctaaaagaaaggttccatgactcggaatcaacgtcaggcaaaaatctcttctctcttatttacatggtgttatctacttgtaaaataagaaatcgaatgattttgcgcgaaatgagacagccgtgctgacggacgtctgttctgaccaacaagcaattgtttttcctttgcttttgagatctgaactgacggttagcttcacgtttcaaatttgcttcgctaaaaaaagatagacccagtgttagcggcttccacataaatgaggtctagtgaaggaataatcgagtcttgctcctgtatttttgcagagactcagaacaaggaggatgcactgttgctttatggacaaattgcacttctctattttttcctttgactttgccattattggacttgtgacttttttatggggtttcatgcatgctatggttaattccctcgcaagcttattcaccatattttcatgattatgcggaggaagttgagtattccactttctcttccattgaataagtcccttcctagcctatcaccctcttctttgacctctttactttgttttataatggtatcatcgcaaggtcctacaagtgttagcacatgatgtaataaattgagcttatgtacatgtgcacttgtgaggtactgaggttggaatgattttaatgttgt

SEQ ID NO: 81903 - DNA, 4298 bp, Zea Mays
agaggaacccagcgtccacaccacagcccacggctgagactcaggtgaggtccgccgcgtccccccgctgccacaacccacaaccactacctgagtacctgaccaccaccggataggatgaagccgccggtgagcagggccgccttcgcgtccgtgctgatagggccgcgcacgctcggggcctctctggtggccgcccgctgcgcctcctcctctgccgccgctgccgtcactgcctatggaaatcgccgcaaccgatcctccagagcatctcaactctctcctcaatgtgcttcaagcacgaggtgaaaagattgtttctcctggagcaaaaagagggttgattccatgtgttgttcccttatcagaaagtccagcaggtgatttgacatctctccttagatggccaaccgctccaactgggatggaaatgcctgttgtggaagttcgtaaacatgggctgtggcttttggctaaaaatgtgaaacagtatatccacagaatacttgttgaggctgacttcagtgctggaactggtgatgatttatgggctgctgtgggcgaagctggtaaaaacctttacgctaaaggcgaattcaaagagtcgcaggtggcagaccttgatgtctatttgttgaagaaggttggacttttccctgatgttatagagaggaaaacattgcgccatctcgaaaaaggagataatgtctcagctctcattactggagaattctatactagagatcaatttccaggatttggaagaccctttgtgttcaatgcagagatttttaaaagagttggacgtacatctgaagccaaagattcagctcgagtggctctgaaatcaccatggtggacacttggctgcagttacgaagaggctgctgaactagctgggtgggaggatgagcagctagagtttataagagagaaggtaactgaggagggtaagcgcgaggacctgaagagaggaaaggctccagaacaggtgattcttgacgaggcggcattcttaatggatttagcgtccgtggatggtaactgggacgaggttgtggatcggattgctgaatgttacagagaggctgggcttcatgacattgcgaatttcattgcctacagggaatagatgttagattccctatggtctagaatgttattcaagaaattttgattcatttgtgctctgctaatatatattcttatatacgggaagaacgcacaaccgttatatcgcagcagtccttttttgttttgttttgacatcagctagtgaccatagtttctttcctgtatagctctgaatgtacttgttttttccatttaaatttccatgcttattcatggttagtaagtgtcagattgagtgcattttattctcttgatcgatggctgatttgctgattgttctcgcgatacatagagaggacccgagcaatagatacatcaaagttggttgtgtggataatgtcatgacactggcagtcatggcaagcttggactggaaagagattattgtttggttgtgtgcatgcaaaatggttgaagaggcggctggtttgtaatgctggtgataacaaaatgaagaggttcaggaaagcaaataaagatatagagtgctaaattatcagcatgagcgtggagagaattcaggagagtgtggttgggagagaagctgccatgtcaaccgtcgagtcatcaggatcagctttatcccggcaaaggccagaaaccgttacgagtggtccacgagggtggctgctgtgcggcctatcttctccctgtccaatctctgcttctccctcctctcccacccagaatcagaagcatcgcgagtcgtcgccgggacaccgacgactgggcgagtgctgccgccggcctttctccaggtctttgccggacgccctcctgaccttcatgagctgttccgcggtcgcctccgatggcattgcgctgcacttccctaccccgtcgagggcaggaccctccgcggaggaggaggtgtctgcgcgtgcggggtgctcgctctcggttcccacaggagtactaggagagcgaggcgcaggcagtcaggcaccgagacacgcgccagggcagaaccaagtatgctatgcagattgtattacatgcattacctaataaagacaggcgtgtccagaaggtgtcacttgcagctgagctactcgattcgaaaaaggcaagatactgtcttgaagtagagattggcaaatctcctccgctttctgatgacgacgtctggtatgagctgcgggaaaaaaaatgctgaatacaatagctttcttgtcaagtcattactttttgtaaaatcaccatccatcagaatcattacttttatagcacctactttggaccaaagatgtgtcatccagttagcgtaactagcagacagctttctgtaataatgtataggcaatgtaaatttgtctgattgattatcatggccttttgtttctccaaatgaatgtatagggttatgttgttatcatacatcttacttttactccctcctcacattcaggttgcgatgctgaagttcacaggatttaagttgctaaacaacatttcagacagtgggaaggccttcctaatgattctagtatcagacatccttctagggttactgttccaggatgtccagagcttcatgtattttagaactgaaacgtgtcgacatcagaagagggaggcataatgagttgcagggttcagtatgcaggccaaatttctagcattgttgattgtggttccatgggtgatagattttctagtgcatgactatgttatgatgccctttttagagaggtatgtccagaaggtgccacttgcagctgagctactcgatgtaaggcgcagccaaaagctgcagatggttaaagacctaaatattgaaaaggcaagatatcgtcttgaagtagagattggcaaatctcctccactttctgatgaggaggtctggcatgagttgcgggaaaaagcgatagagttgagggatgattggaggctagaaaatcgaaatgctttcgcaaatatatggtccgatactgtttatggaattgtgctatttcttcttatgtgcttcaaccagagcaaagttgcaatgctgaagttcacgggatataaggtgctaaataacatttcagacagtgggaaagcctttcttattattttagtatcggacatccttctaggctaccattcagagtcaggttggcatacattggtagaagttattctcgagcattatgggcttgaagctgatgaagcggcggtcacattttttgtttgtctggttccagtggctttcgatgtgtacataaaatattgggtatacaaataccttccaagattatcacccagtgtgggaaacgttttggatgaaataaagcgccattagagaactttttttagtttccttattgggaaattgcttgagaatttgtcgccttccaggtagtcaatggcttggcatataaagttttaaaatctgaacgatgtcttcgtctgaaaggccttgcctagaatgtctgtctggtgatcaatcagagtctcaggctgttcgagaagactgggaatttggagaagtaacctaggtagtccttattctaaaagaaaggttccatgactcggaatcaacgtcaggcaaaaatctcttctctcttatttacatggtgttatctacttgtaaaataagaaatcgaatgattttgcgcgaaatgagacagccgtgctgacggacgtctgttctgaccaacaagcaattgtttttcctttgcttttgagatctgaactgacggttagcttcacgtttcaaatttgcttcgctaaaaaaagatagacccagtgttagcggcttccacataaatgaggtctagtgaaggaataatcgagtcttgctcctgtatttttgcagagactcagaacaaggaggatgcactgttgctttatggacaaattgcacttctctattttttcctttgactttgccattattggacttgtgacttttttatggggtttcatgcatgctatggttaattccctcgcaagcttattcaccatattttcatgattatgcggaggaagttgagtattccactttctcttccattgaataagtcccttcctagcctatcaccctcttctttgacctctttactttgttttataatggtatcatcgcaaggtcctacaagtgttagcacatgatgtaataaattgagcttatgtacatgtgcacttgtgaggtactgaggttggaatgattttaatgttgt

SEQ ID NO: 81904 - DNA, 4235 bp, Zea Mays
agaggaacccagcgtccacaccacagcccacggctgagactcaggtgaggtccgccgcgtccccccgctgccacaacccacaaccactacctgagtacctgaccaccaccggataggatgaagccgccggtgagcagggccgccttcgcgtccgtgctgatagggccgcgcacgctcggggcctctctggtggccgcccgctgcgcctcctcctctgccgccgctgccgtcactgcctatgatcatgcatcgtttgtcaaggaaatcgccgcaaccgatcctccagagcatctcaactctctcctcaatgtgcttcaagcacgaggtgaaaagattgtttctcctggagcaaaaagagggttgattccatgtgttgttcccttatcagaaagtccagcaggtgatttgacatctctccttagatggccaaccgctccaactgggatggaaatgcctgttgtggaagttcgtaaacatgggctgtggcttttggctaaaaatgtgaaacagtatatccacagaatacttgttgaggctgacttcagtgctggaactggtgatgatttatgggctgctgtgggcgaagctggtaaaaacctttacgctaaaggcgaattcaaagagtcgcaggtggcagaccttgatgtctatttgttgaagaaggttggacttttccctgatgttatagagaggaaaacattgcgccatctcgaaaaaggagataatgtctcagctctcattactggagaattctatactagagatcaatttccaggatttggaagaccctttgtgttcaatgcagagatttttaaaagagttggacgtacatctgaagccaaagattcagctcgagtggctctgaaatcaccatggtggacacttggctgcagttacgaagaggctgctgaactagctgggtgggaggatgagcagctagagtttataagagagaaggtaactgaggagggtaagcgcgaggacctgaagagaggaaaggctccagaacaggtgattcttgacgaggcggcattcttaatggatttagcgtccgtggatggtaactgggacgaggttgtggatcggattgctgaatgttacagagaggctgggcttcatgacattgcgaatttcattgcctacagggaatagatgttagattccctatggtctagaatgttattcaagaaattttgattcatttgtgctctgctaatatatattcttatatacgggaagaacgcacaaccgttatatcgcagcagtccttttttgttttgttttgacatcagctagtgaccatagtttctttcctgtatagctctgaatgtacttgttttttccatttaaatttccatgcttattcatggttagtaagtgtcagattgagtgcattttattctcttgatcgatggctgatttgctgattgttctcgcgatacatagagaggacccgagcaatagatacatcaaagttggttgtgtggataatgtcatgacactggcagtcatggcaagcttggactggaaagagattattgtttggttgtgtgcatgcaaaatggttgaagaggcggctggtttgtaatgctggtgataacaaaatgaagaggttcaggaaagcaaataaagatatagagtgctaaattatcagcatgagcgtggagagaattcaggagagtgtggttgggagagaagctgccatgtcaaccgtcgagtcatcaggatcagctttatcccggcaaaggccagaaaccgttacgagtggtccacgagggtggctgctgtgcggcctatcttctccctgtccaatctctgcttctccctcctctcccacccagaatcagaagcatcgcgagtcgtcgccgggacaccgacgactgggcgagtgctgccgccggcctttctccaggtctttgccggacgccctcctgaccttcatgagctgttccgcggtcgcctccgatggcattgcgctgcacttccctaccccgtcgagggcaggaccctccgcggaggaggaggtgtctgcgcgtgcggggtgctcgctctcggttcccacaggagtactaggagagcgaggcgcaggcagtcaggcaccgagacacgcgccagggcagaaccaagtatgctatgcagattgtattacatgcattacctaataaagacaggcgtgtccagaaggtgtcacttgcagctgagctactcgattcgaaaaaggcaagatactgtcttgaagtagagattggcaaatctcctccgctttctgatgacgacgtctggtatgagctgcgggaaaaaaaatgctgaatacaatagctttcttgtcaagtcattactttttgtaaaatcaccatccatcagaatcattacttttatagcacctactttggaccaaagatgtgtcatccagttagcgtaactagcagacagctttctgtaataatgtataggcaatgtaaatttgtctgattgattatcatggccttttgtttctccaaatgaatgtatagggttatgttgttatcatacatcttacttttactccctcctcacattcaggttgcgatgctgaagttcacaggatttaagttgctaaacaacatttcagacagtgggaaggccttcctaatgattctagtatcagacatccttctagggttactgttccaggatgtccagagcttcatgtattttagaactgaaacgtgtcgacatcagaagagggaggcataatgagttgcagggttcagtatgcaggccaaatttctagcattgttgattgtggttccatgggtgatagattttctagtgcatgactatgttatgatgccctttttagagaggtatgtccagaaggtgccacttgcagctgagctactcgatgtaaggcgcagccaaaagctgcagatggttaaagacctaaatattgaaaaggatagagttgagggatgattggaggctagaaaatcgaaatgctttcgcaaatatatggtccgatactgtttatggaattgtgctatttcttcttatgtgcttcaaccagagcaaagttgcaatgctgaagttcacgggatataaggtgctaaataacatttcagacagtgggaaagcctttcttattattttagtatcggacatccttctaggctaccattcagagtcaggttggcatacattggtagaagttattctcgagcattatgggcttgaagctgatgaagcggcggtcacattttttgtttgtctggttccagtggctttcgatgtgtacataaaatattgggtatacaaataccttccaagattatcacccagtgtgggaaacgttttggatgaaataaagcgccattagagaactttttttagtttccttattgggaaattgcttgagaatttgtcgccttccaggtagtcaatggcttggcatataaagttttaaaatctgaacgatgtcttcgtctgaaaggccttgcctagaatgtctgtctggtgatcaatcagagtctcaggctgttcgagaagactgggaatttggagaagtaacctaggtagtccttattctaaaagaaaggttccatgactcggaatcaacgtcaggcaaaaatctcttctctcttatttacatggtgttatctacttgtaaaataagaaatcgaatgattttgcgcgaaatgagacagccgtgctgacggacgtctgttctgaccaacaagcaattgtttttcctttgcttttgagatctgaactgacggttagcttcacgtttcaaatttgcttcgctaaaaaaagatagacccagtgttagcggcttccacataaatgaggtctagtgaaggaataatcgagtcttgctcctgtatttttgcagagactcagaacaaggaggatgcactgttgctttatggacaaattgcacttctctattttttcctttgactttgccattattggacttgtgacttttttatggggtttcatgcatgctatggttaattccctcgcaagcttattcaccatattttcatgattatgcggaggaagttgagtattccactttctcttccattgaataagtcccttcctagcctatcaccctcttctttgacctctttactttgttttataatggtatcatcgcaaggtcctacaagtgttagcacatgatgtaataaattgagcttatgtacatgtgcacttgtgaggtactgaggttggaatgattttaatgttgt

SEQ ID NO: 81905 - DNA, 2407 bp, Zea Mays
agaggcggctggtttgtaatgctggtgataacaaaatgaagaggttcaggaaagcaaataaagatatagagtgctaaattatcagcatgagcgtggagagaattcaggagagtgtggttgggagagaagctgccatgtcaaccgtcgagtcatcaggatcagctttatcccggcaaaggccagaaaccgttacgagtggtccacgagggtggctgctgtgcggcctatcttctccctgtccaatctctgcttctccctcctctcccacccagaatcagaagcatcgcgagtcgtcgccgggacaccgacgactgggcgagtgctgccgccggcctttctccaggtctttgccggacgccctcctgaccttcatgagctgttccgcggtcgcctccgatggcattgcgctgcacttccctaccccgtcgagggcaggaccctccgcggaggaggaggtgtctgcgcgtgcggggtgctcgctctcggttcccacaggagtactaggagagcgaggcgcaggcagtcaggcaccgagacacgcgccagggcagaaccaagtatgctatgcagattgtattacatgcattacctaataaagacaggcgtgtccagaaggtgtcacttgcagctgagctactcgattcgaaaaaggttgcgatgctgaagttcacaggatttaagttgctaaacaacatttcagacagtgggaaggccttcctaatgattctagtatcagacatccttctagggttactgttccaggatgtccagagcttcatgtattttagaactgaaacgtgtcgacatcagaagagggaggcataatgagttgcagggttcagtatgcaggccaaatttctagcattgttgattgtggttccatgggtgatagattttctagtgcatgactatgttatgatgccctttttagagaggtatgtccagaaggtgccacttgcagctgagctactcgatgtaaggcgcagccaaaagctgcagatggttaaagacctaaatattgaaaaggcaagatatcgtcttgaagtagagattggcaaatctcctccactttctgatgaggaggtctggcatgagttgcgggaaaaagcgatagagttgagggatgattggaggctagaaaatcgaaatgctttcgcaaatatatggtccgatactgtttatggaattgtgctatttcttcttatgtgcttcaaccagagcaaagttgcaatgctgaagttcacgggatataaggtgctaaataacatttcagacagtgggaaagcctttcttattattttagtatcggacatccttctaggctaccattcagagtcaggttggcatacattggtagaagttattctcgagcattatgggcttgaagctgatgaagcggcggtcacattttttgtttgtctggttccagtggctttcgatgtgtacataaaatattgggtatacaaataccttccaagattatcacccagtgtgggaaacgttttggatgaaataaagcgccattagagaactttttttagtttccttattgggaaattgcttgagaatttgtcgccttccaggtagtcaatggcttggcatataaagttttaaaatctgaacgatgtcttcgtctgaaaggccttgcctagaatgtctgtctggtgatcaatcagagtctcaggctgttcgagaagactgggaatttggagaagtaacctaggtagtccttattctaaaagaaaggttccatgactcggaatcaacgtcaggcaaaaatctcttctctcttatttacatggtgttatctacttgtaaaataagaaatcgaatgattttgcgcgaaatgagacagccgtgctgacggacgtctgttctgaccaacaagcaattgtttttcctttgcttttgagatctgaactgacggttagcttcacgtttcaaatttgcttcgctaaaaaaagatagacccagtgttagcggcttccacataaatgaggtctagtgaaggaataatcgagtcttgctcctgtatttttgcagagactcagaacaaggaggatgcactgttgctttatggacaaattgcacttctctattttttcctttgactttgccattattggacttgtgacttttttatggggtttcatgcatgctatggttaattccctcgcaagcttattcaccatattttcatgattatgcggaggaagttgagtattccactttctcttccattgaataagtcccttcctagcctatcaccctcttctttgacctctttactttgttttataatggtatcatcgcaaggtcctacaagtgttagcacatgatgtaataaattgagcttatgtacatgtgcacttgtgaggtactgaggttggaatgattttaatgttgt

SEQ ID NO: 81906 - DNA, 2409 bp, Zea Mays
agccgggccgaatcccggcaaaggcccactgtagacccagaagaaaccgctagagttgtccatgaggtgtgaggcccatgagggttgctggtgtggcgcgtccgtggatttctctctagcaggctatgcctgcctggatcatcccgactcttcgtctccagctggcagctgctgcttctccgggtgcatctgcccctgcgttccaagtaccgctggggccagctatcttgctacttgctaggcagcatatggtccgcgtttcatgaccttcatgagctgttccgcggccgtctccaacaggaccctctgcgggggccacggcgctgtctgcgcgcgcggggtgctcgctctcggttcccacagtagtaggaggagggcgaggcgcagacacgcggtggtcttcgctaagaggaggcggcggcgtctcagcaaatggcagcggccgtggtggaagaccttcttttctgactggaacgaagacgacgagagcctggccgggtggagggaggaggacgagctcttggaggagattggcgccaaccaggagctgtcggacaatgaaaagttcaaggtgtggatgagtaaggccgaggcaatcgttgaaatgcgcgaggcccagcaggatgcgatgaacgccgaggagcgatcgtgggaggattggatcagtggtggcggcacgtcagggactggaggaggtggggactggaatcgggaggacagcttgttggaccagataactgatgatcctgcagagattgtgagggacaagagcattattcagattttcagagattccatcaatgaggattacgaggacatgctgttcgaagatcgagtgtttatgtatgcctcgacaaactcggccaaatttctagcattgttgattgtggttccatgggtgatagattttctagtgcatgactatgttatgatgccctttttagagaggtatgtccagaaggtgccacttgcagctgagctactcgatgtaaggcgcagccaaaagctgcagatggttaaagacctaaatattgaaaaggcaagatatcgtcttgaagtagagattggcaaatctcctccactttctgatgaggaggtctggcatgagttgcgggaaaaagcgatagagttgagggatgattggaggctagaaaatcgaaatgctttcgcaaatatatggtccgatactgtttatggaattgtgctatttcttcttatgtgcttcaaccagagcaaagttgcaatgctgaagttcacgggatataaggtgctaaataacatttcagacagtgggaaagcctttcttattattttagtatcggacatccttctaggagtcaggttggcatacattggtagaagttattctcgagcattatgggcttgaagctgatgaagcggcggtcacattttttgtttgtctggttccagtggctttcgatgtgtacataaaatattgggtatacaaataccttccaagattatcacccagtgtgggaaacgttttggatgaaataaagcgccattagagaactttttttagtttccttattgggaaattgcttgagaatttgtcgccttccaggtagtcaatggcttggcatataaagttttaaaatctgaacgatgtcttcgtctgaaaggccttgcctagaatgtctgtctggtgatcaatcagagtctcaggctgttcgagaagactgggaatttggagaagtaacctaggtagtccttattctaaaagaaaggttccatgactcggaatcaacgtcaggcaaaaatctcttctctcttatttacatggtgttatctacttgtaaaataagaaatcgaatgattttgcgcgaaatgagacagccgtgctgacggacgtctgttctgaccaacaagcaattgtttttcctttgcttttgagatctgaactgacggttagcttcacgtttcaaatttgcttcgctaaaaaaagatagacccagtgttagcggcttccacataaatgaggtctagtgaaggaataatcgagtcttgctcctgtatttttgcagagactcagaacaaggaggatgcactgttgctttatggacaaattgcacttctctattttttcctttgactttgccattattggacttgtgacttttttatggggtttcatgcatgctatggttaattccctcgcaagcttattcaccatattttcatgattatgcggaggaagttgagtattccactttctcttccattgaataagtcccttcctagcctatcaccctcttctttgacctctttactttgttttataatggtatcatcgcaaggtcctacaagtgttagcacatgatgtaataaattgagcttatgtacatgtgcacttgtgaggtactgaggttggaatgattttaatgttgt

SEQ ID NO: 81907 - DNA, 2334 bp, Zea Mays
agccgggccgaatcccggcaaaggcccactgtagacccagaagaaaccgctagagttgtccatgaggtgtgaggcccatgagggttgctggtgtggcgcgtccgtggatttctctctagcaggctatgcctgcctggatcatcccgactcttcgtctccagctggcagctgctgcttctccgggtgcatctgcccctgcgttccaagtaccgctggggccagctatcttgctacttgctaggcagcatatggtccgcgtttcatgaccttcatgagctgttccgcggccgtctccaacaggaccctctgcgggggccacggcgctgtctgcgcgcgcggggtgctcgctctcggttcccacagtagtaggaggagggcgaggcgcagacacgcggtggtcttcgctaagaggaggcggcggcgtctcagcaaatggcagcggccgtggtggaagaccttcttttctgactggaacgaagacgacgagagcctggccgggtggagggaggaggacgagctcttggaggagattggcgccaaccaggagctgtcggacaatgaaaagttcaaggtgtggatgagtaaggccgaggcaatcgttgaaatgcgcgaggcccagcaggatgcgatgaacgccgaggagcgatcgtgggaggattggatcagtggtggcggcacgtcagggactggaggaggtggggactggaatcgggaggacagcttgttggaccagataactgatgatcctgcagagattgtgagggacaagagcattattcagattttcagagattccatcaatgaggattacgaggacatgctgttcgaagatcgagtgtttatgtatgcctcgacaaactcggtatgtccagaaggtgccacttgcagctgagctactcgatgtaaggcgcagccaaaagctgcagatggttaaagacctaaatattgaaaaggcaagatatcgtcttgaagtagagattggcaaatctcctccactttctgatgaggaggtctggcatgagttgcgggaaaaagcgatagagttgagggatgattggaggctagaaaatcgaaatgctttcgcaaatatatggtccgatactgtttatggaattgtgctatttcttcttatgtgcttcaaccagagcaaagttgcaatgctgaagttcacgggatataaggtgctaaataacatttcagacagtgggaaagcctttcttattattttagtatcggacatccttctaggctaccattcagagtcaggttggcatacattggtagaagttattctcgagcattatgggcttgaagctgatgaagcggcggtcacattttttgtttgtctggttccagtggctttcgatgtgtacataaaatattgggtatacaaataccttccaagattatcacccagtgtgggaaacgttttggatgaaataaagcgccattagagaactttttttagtttccttattgggaaattgcttgagaatttgtcgccttccaggtagtcaatggcttggcatataaagttttaaaatctgaacgatgtcttcgtctgaaaggccttgcctagaatgtctgtctggtgatcaatcagagtctcaggctgttcgagaagactgggaatttggagaagtaacctaggtagtccttattctaaaagaaaggttccatgactcggaatcaacgtcaggcaaaaatctcttctctcttatttacatggtgttatctacttgtaaaataagaaatcgaatgattttgcgcgaaatgagacagccgtgctgacggacgtctgttctgaccaacaagcaattgtttttcctttgcttttgagatctgaactgacggttagcttcacgtttcaaatttgcttcgctaaaaaaagatagacccagtgttagcggcttccacataaatgaggtctagtgaaggaataatcgagtcttgctcctgtatttttgcagagactcagaacaaggaggatgcactgttgctttatggacaaattgcacttctctattttttcctttgactttgccattattggacttgtgacttttttatggggtttcatgcatgctatggttaattccctcgcaagcttattcaccatattttcatgattatgcggaggaagttgagtattccactttctcttccattgaataagtcccttcctagcctatcaccctcttctttgacctctttactttgttttataatggtatcatcgcaaggtcctacaagtgttagcacatgatgtaataaattgagcttatgtacatgtgcacttgtgaggtactgaggttggaatgattttaatgttgt

SEQ ID NO: 81908 - DNA, 2160 bp, Zea Mays
agccgggccgaatcccggcaaaggcccactgtagacccagaagaaaccgctagagttgtccatgaggtgtgaggcccatgagggttgctggtgtggcgcgtccgtggatttctctctagcaggctatgcctgcctggatcatcccgactcttcgtctccagctggcagctgctgcttctccgggtgcatctgcccctgcgttccaagtaccgctggggccagctatcttgctacttgctaggcagcatatggtccgcgtttcatgaccttcatgagctgttccgcggccgtctccaacaggaccctctgcgggggccacggcgctgtctgcgcgcgcggggtgctcgctctcggttcccacagtagtaggaggagggcgaggcgcagacacgcggtggtcttcgctaagaggaggcggcggcgtctcagcaaatggcagcggccgtggtggaagaccttcttttctgactggaacgaagacgacgagagcctggccgggtggagggaggaggacgagctcttggaggagattggcgccaaccaggagctgtcggacaatgaaaagttcaaggtgtggatgagtaaggccgaggcaatcgttgaaatgcgcgaggcccagcaggatgcgatgaacgccgaggagcgatcgtgggaggattggatcagtggtggcggcacgtcagggactggaggaggtggggactggaatcgggaggacagcttgttggaccagataactgatgatcctgcagagattgtgagggacaagagcattattcagattttcagagattccatcaatgaggattacgaggacatgctgttcgaagatcgagtgtttatgtatgcctcgacaaactcggatagagttgagggatgattggaggctagaaaatcgaaatgctttcgcaaatatatggtccgatactgtttatggaattgtgctatttcttcttatgtgcttcaaccagagcaaagttgcaatgctgaagttcacgggatataaggtgctaaataacatttcagacagtgggaaagcctttcttattattttagtatcggacatccttctaggctaccattcagagtcaggttggcatacattggtagaagttattctcgagcattatgggcttgaagctgatgaagcggcggtcacattttttgtttgtctggttccagtggctttcgatgtgtacataaaatattgggtatacaaataccttccaagattatcacccagtgtgggaaacgttttggatgaaataaagcgccattagagaactttttttagtttccttattgggaaattgcttgagaatttgtcgccttccaggtagtcaatggcttggcatataaagttttaaaatctgaacgatgtcttcgtctgaaaggccttgcctagaatgtctgtctggtgatcaatcagagtctcaggctgttcgagaagactgggaatttggagaagtaacctaggtagtccttattctaaaagaaaggttccatgactcggaatcaacgtcaggcaaaaatctcttctctcttatttacatggtgttatctacttgtaaaataagaaatcgaatgattttgcgcgaaatgagacagccgtgctgacggacgtctgttctgaccaacaagcaattgtttttcctttgcttttgagatctgaactgacggttagcttcacgtttcaaatttgcttcgctaaaaaaagatagacccagtgttagcggcttccacataaatgaggtctagtgaaggaataatcgagtcttgctcctgtatttttgcagagactcagaacaaggaggatgcactgttgctttatggacaaattgcacttctctattttttcctttgactttgccattattggacttgtgacttttttatggggtttcatgcatgctatggttaattccctcgcaagcttattcaccatattttcatgattatgcggaggaagttgagtattccactttctcttccattgaataagtcccttcctagcctatcaccctcttctttgacctctttactttgttttataatggtatcatcgcaaggtcctacaagtgttagcacatgatgtaataaattgagcttatgtacatgtgcacttgtgaggtactgaggttggaatgattttaatgttgt

SEQ ID NO: 81909 - DNA, 2149 bp, Zea Mays
agccgggccgaatcccggcaaaggcccactgtagacccagaagaaaccgctagagttgtccatgaggtgtgaggcccatgagggttgctggtgtggcgcgtccgtggatttctctctagcaggctatgcctgcctggatcatcccgactcttcgtctccagctggcagctgctgcttctccgggtgcatctgcccctgcgttccaagtaccgctggggccagctatcttgctacttgctaggcagcatatggtccgcgtttcatgaccttcatgagctgttccgcggccgtctccaacaggaccctctgcgggggccacggcgctgtctgcgcgcgcggggtgctcgctctcggttcccacagtagtaggaggagggcgaggcgcagacacgcggtggtcttcgctaagaggaggcggcggcgtctcagcaaatggcagcggccgtggtggaagaccttcttttctgactggaacgaagacgacgagagcctggccgggtggagggaggaggacgagctcttggaggagattggcgccaaccaggagctgtcggacaatgaaaagttcaaggtgtggatgagtaaggccgaggcaatcgttgaaatgcgcgaggcccagcaggatgcgatgaacgccgaggagcgatcgtgggaggattggatcagtggtggcggcacgtcagggactggaggaggtggggactggaatcgggaggacagcttgttggaccagataactgatgatcctgcagagattgtgagggacaagagcattattcagattttcagagattccatcaatgaggattacgaggacatgctgttcgaagatcgagtgtttatgtatgcctcgacaaactcggccaaatttctagcattgttgattgtggttccatgggtgatagattttctagtgcatgactatgttatgatgccctttttagagaggtatgtccagaaggtgccacttgcagctgagctactcgatgtaaggcgcagccaaaagctgcagatggttaaagacctaaatattgaaaaggcaagatatcgtcttgaagtagagattggcaaatctcctccactttctgatgaggaggtctggcatgagttgcgggaaaaagcgatagagttgagggatgattggaggctagaaaatcgaaatgctttcgcaaatatatggtccgatactgtttatggaattgtgctatttcttcttatgtgcttcaaccagagcaaagttgcaatgctgaagttcacgggatataaggtgctaaataacatttcagacagtgggaaagcctttcttattattttagtatcggacatccttctaggctaccattcagagtcaggttggcatacattggtagaagttattctcgagcattatgggcttgaagctgatgaagcggcggtcacattttttgtttgtctggttccagtggctttcgatgtgtacataaaatattgggtatacaaataccttccaagattatcacccagtgtgggaaacgttttggatgaaataaagcgccattagagaactttttttagtttccttattgggaaattgcttgagaatttgtcgccttccaggtagtcaatggcttggcatataaagttttaaaatctgaacgatgtcttcgtctgaaaggccttgcctagaatgtctgtctggtgatcaatcagagtctcaggctgttcgagaagactgggaatttggagaagtaacctaggtagtccttattctaaaagaaaggttccatgactcggaatcaacgtcagagactcagaacaaggaggatgcactgttgctttatggacaaattgcacttctctattttttcctttgactttgccattattggacttgtgacttttttatggggtttcatgcatgctatggttaattccctcgcaagcttattcaccatattttcatgattatgcggaggaagttgagtattccactttctcttccattgaataagtcccttcctagcctatcaccctcttctttgacctctttactttgttttataatggtatcatcgcaaggtcctacaagtgttagcacatgatgtaataaattgagcttatgtacatgtgcacttgtgaggtactgaggttggaatgattttaatgttgt

SEQ ID NO: 81910 - DNA, 1630 bp, Zea Mays
ccctgcacggcttgcggttggagctggcctcaaaccagccttaacctgacaggctgacagcgcagagcggaatggaggaaatgcccctacctgttcacagtgactggcctcccgactcgactctcctccccctatctctatctgcttcctgctgagctcaaaccccttccgcctccccatccaccattccatccgccgccgccgccgccgcctgtgcaagatgaatgtggagaagctcaagaagatggctggcgctgtacgcaccggagggaagggcagcatgcgcagaagaaggcagttcacaagaccacgaccaccgatgacaagcggcttcagagcaccttgaaaaggatcggggggaacaccattcctggtatcgaggaggtcaacatcttcaaggacgatgttgttatccagtttcagaaccctaaagtgcaagcatccattcctgcaaatacatgggtggttagtggagtaccccagacaaaaagtctgcaagaccttctgccatcaattatcaaccaactgggccctgataacctggacaaccttaagaagctggctgagattttccagaggcaggtacctggtgctgaagcagctgcacaggatgatgacgacgtccctgagcttgtccaaggagagacatttgaggaggctgcagagaaggagcctcaactggagcaggatgagaacaaagaatcgtgattttgttgtgaagggtcgtcggtttaattgttggcatcagccttgcgagagaccctacctgctcatctggcgtgcctctttacatgtgctccagctttgtgtcaagtgtgctttgggttcgaaaagcattactgcattatgttttctgaagacagtgtaggcatatattttcctcgagccatagtgagtttccgcatatgtcttgctttctcggcgtccagcagcagttccatatacatagaccaaatttgcaacaaaaaaataggagatttttgccagaaaatgcatctccctgatcgaatagaaagaaactggcgacgcggttgtttggttaatgctgggtcatgtgtaaccgtgacactattgccccatttccactccacacctagcaacatctgaatggaatgacaaacaaaaaaagcatttggaccagtttcttcaactagtgcatgcaacatatgccttttgtcacagctgatgattttccatacaaaaaaagggtcagctcgccataaccacccgacgggttgggcgtcagtcacacgaaggaccagttgacgaagcagaacgccaggcagtggatgttgctatcctcgccgagcaccttccacgctacagcttggtcgaaagaaacatggcggcccattcctgacatgcacacgcctgacggcaggtacgcgtagccctaaaacaacgaagacggaatatgttagctgttgagcgcatctcaggttcactctcaaggatggctgttttgacctctaacctgttccattagtttcgagatgtctgagaatagtgctttccttcctgactcgtcgaagatcttgtctagcgtcaggtcttgcagggcaacaagagatgtttctaacatgtccagccctgccttgtttgcaaacgtaaacataggtttctcctgaaa

SEQ ID NO: 81911 - DNA, 1608 bp, Zea Mays
ccctgcacggcttgcggttggagctggcctcaaaccagccttaacctgacaggctgacagcgcagagcggaatggaggaaatgcccctacctgttcacagtgactggcctcccgactcgactctcctccccctatctctatctgcttcctgctgagctcaaaccccttccgcctccccatccaccattccatccgccgccgccgccgccgcctgtgcaagatgaatgtggagaagctcaagaagatggctggcgctgtacgcaccggagggaagggcagcatgcgcaggaagaagaaggcagttcacaagaccacgaccaccgatgacaagcggcttcagagcaccttgaaaaggatcggggggaacaccattcctggtatcgaggaggtcaacatcttcaaggacgatgttgttatccagtttcagaaccctaaagtgcaagcatccattcctgcaaatacatgggtggttagtggagtaccccagacaaaaagtctgcaagaccttctgccatcaattatcaaccaactggaagctggctgagattttccagaggcaggtacctggtgctgaagcagctgcacaggatgatgacgacgtccctgagcttgtccaaggagagacatttgaggaggctgcagagaaggagcctcaactggagcaggatgagaacaaagaatcgtgattttgttgtgaagggtcgtcggtttaattgttggcatcagccttgcgagagaccctacctgctcatctggcgtgcctctttacatgtgctccagctttgtgtcaagtgtgctttgggttcgaaaagcattactgcattatgttttctgaagacagtgtaggcatatattttcctcgagccatagtgagtttccgcatatgtcttgctttctcggcgtccagcagcagttccatatacatagaccaaatttgcaacaaaaaaataggagatttttgccagaaaatgcatctccctgatcgaatagaaagaaactggcgacgcggttgtttggttaatgctgggtcatgtgtaaccgtgacactattgccccatttccactccacacctagcaacatctgaatggaatgacaaacaaaaaaagcatttggaccagtttcttcaactagtgcatgcaacatatgccttttgtcacagctgatgattttccatacaaaaaaagggtcagctcgccataaccacccgacgggttgggcgtcagtcacacgaaggaccagttgacgaagcagaacgccaggcagtggatgttgctatcctcgccgagcaccttccacgctacagcttggtcgaaagaaacatggcggcccattcctgacatgcacacgcctgacggcaggtacgcgtagccctaaaacaacgaagacggaatatgttagctgttgagcgcatctcaggttcactctcaaggatggctgttttgacctctaacctgttccattagtttcgagatgtctgagaatagtgctttccttcctgactcgtcgaagatcttgtctagcgtcaggtcttgcagggcaacaagagatgtttctaacatgtccagccctgccttgtttgcaaacgtaaacataggtttctcctgaaa

SEQ ID NO: 81912 - DNA, 368 bp, Zea Mays
ctcctccccacgtaccctgcgctggctgcctcgcgagatgaatgtggagaagctcaagaagatggctggcgctgtacgcaccggagggaagggcagcatgcgcaggaagaagaaggcagttcacaagaccacgaccaccgatgacaagcggcttcagagcaccttgaaaaggatcggggggaacaccattcctggtatcgaggaggtcaacatcttcaaggacgatgttgttatccagtttcagaaccctaaagtgcaagcatccattcctgcaaatacatgggtggttagtggagtaccccagacaaaaagtctgcaagaccttctgccatcaattatcaaccaactggcttcctcctcctcttcag

SEQ ID NO: 81913 - DNA, 1580 bp, Zea Mays
gcgacatcgacgacaacgacgacgacgacacgcgagatcgcctcagaaatctcgcaaccacaaggcagctggcctgctgttctgacgacagccattgcacgcaccagccagagaagttgaggttgcgccttctcctctcgggctcgggctcggtaggtatatgcctgcattcccattcccaaccaggtctggtctggtctgctccggtccggtcttctctcccgaccccgacctggcctcctccctcccctctccagcagagctctccctccccctccccctgaggtgaggtggctgaagtcgggggacatggtttctttctccgcttcctaagattcctcttcttccccccaacccaccacctacaccttttgctgcgccgcacctgcacggccgctccatgcgccgccgtatctcagtctcaggtcagcatcaccaaccgcagttccacctcccgaccccagccgcaatctaggaggagggccgccgctctcccctcggccgcatcgcatggtaaccaccaccagcagggcaggatgttcaagcttcaccgccaccgctcctccgaccgcgtcggcgagcgcttcgacttcagattctccaacttccgcgccgtccaggtccccgccatttcagacaggctcttcctttccatagtctccgtagacaatggaaaaacaattgcaaagtccactaaagtagcttctcgtagtggaatatgccagtggcccgacaccatcttggaacccatatggttctccaaggaccaagtctccaaagaatttcaagagtgccagtacaggattattgtttccctgggatcggcaaaatctggcattcttggggagattcttctaaatctctctaattttctgaatttggccgatccaaccgctatctctttgccactgaagagatgcaactctggaacagttttgcagcttaaagctatcaagaaaggcaggtggttttagcaggatgcggagttgttgcctgacataaaacatgaggctgacaccacaggtgggcatcatcaagccgtgctatgctccagcaccagtgagactaagagcaagcaagtgcaagtgcagagtcagacagtgatatagcctggacgtgctaactggtgctggagcatgtgtctctcactgaagctccgtatgatgcggtacccagcccttgtttaactggacgtgctaacttgcgttgtcccctagagtcatgatcccgttcttattggtatttatttttaatggtatataattaatatatacaccagtatgtattgagtttgactggagagtgatggtcagttgttgataccatccgatccctctgttttacatgattgattacgttggaaagagtcaacccattaagggctagtttgaaagccacaaaaccggaggggttggaggggctaaaatcccctctttattcaattttaaataaaaagtggattttagcccctataatcacctctgtttttttggactcccaaactagccctaataatagtcgataaatgtagttactccgtcctttattttgttgtagttaataatattgctgtagtttgg

SEQ ID NO: 81914 - DNA, 5255 bp, Zea Mays
gcgacatcgacgacaacgacgacgacgacacgcgagatcgcctcagaaatctcgcaaccacaaggcagctggcctgctgttctgacgacagccattgcacgcaccagccagagaagttgaggttgcgccttctcctctcgggctcgggctcggtaggtatatgcctgcattcccattcccaaccaggtctggtctggtctgctccggtccggtcttctctcccgaccccgacctggcctcctccctcccctctccagcagagctctccctccccctccccctgaggtgaggtggctgaagtcgggggacatggtttctttctccgcttcctaagattcctcttcttccccccaacccaccacctacaccttttgctgcgccgcacctgcacggccgctccatgcgccgccgtatctcagtctcaggtcagcatcaccaaccgcagttccacctcccgaccccagccgcaatctaggaggagggccgccgctctcccctcggccgcatcgcatggtaaccaccaccagcagggcaggatgttcaagcttcaccgccaccgctcctccgaccgcgtcggcgagcgcttcgacttcagattctccaacttccgcgccgtccaggtccccgccatttcagacaggctcttcctttccatagtctccgtagacaatggaaaaacaattgcaaagtccactaaagtagcttctcgtagtggaatatgccagtggcccgacaccatcttggaacccatatggttctccaaggaccaagtctccaaagaatttcaagagtgccagtacaggattattgtttccctgggatcggcaaaatctggcattcttggggagattcttctaaatctctctaattttctgaatttggccgatccaaccgctatctctttgccactgaagagatgcaactctggaacagttttgcagcttaaggttcaatgtcttggcacaaaatctaagctgagtggtgtcagatcattgagggacatggctcctcgtcttgatgaccgtagtccaacgccaaccaatgacgagctggacaacaggtcagattgctctgatggtatgttcaacaagggtgttcattcttcatctgaaaatcatctgggtggaacttatcaagatgaatctggaaacatggaaacaggtttctcagcatcagggtcccatcggagttctaattctggagatagtactgcagatagaacaaacttctctcctagagtcaactctaatggagggctttttgtgggaaggcaggattctgctagttcctatgctagttatgttagtgccggcggtggtgatgatgggcttagatccaacaattcatcttttagttctcggacttcaggcccaaatttgctgcaagggagtactccaaaaacattttcgaatgacctttctcagttatctatgggggcgtctgactcatccaaagattttcttgaagctgctgaagaaacaattgaggagctccgtgacgaggcaaaaatgtgggaacgccactctcgcaagttgaaggctgatctagagatgctgaaaaaggagtgttctgaaaaatcaaagcaacatgctgaactagcagttgagctgtctgctgcacaagctgaacgggattcatataggcatgaaatagaagaattaaagtcatccttacaagatgtaaacacacgacagacaattacaggaacacctaaacgttcagactggatagacctgcagaaggaacttgaaggtgaggtgaagtttcttaaagaatcgaatacagacttaaccatacaactaaacaggactcaagagtcaaatatagagcttctttctattcttcaggaactggaggaaaccattgaagaacagagagttgaaatatctaagatttcaaaggtcaagcagactgcttatcctgagaatgggctgttagtaaaaaaagacagagagtgggctaagaaactgtcaatgaaagaggatgaaatcacaattccgagggagaaatcggatcgtgctctcaacattggaaatgcagatggtgcagcttccaatgccatttatcttgatttggagaaagaaaatgaaattttaagggctaaaatacaagagcttgagaaggactgctctgaactaacagatgaaaatttggagcttatatataagctgaaagaaaatggtctgacaaaaggtcaggttcctcatattgcaaacaacaatgagctgcaattcaaaaagcttacatcccggattcatcaactggaggaggatcttaggaataaggaaatgttaagagatgacagtttttctgagtcatcaatgtctaatgcagatgagatacagagaaaatgtgctgaccttgagctgaaggtgctaaattttaggtctcaaacctgtgagctagaagaaaagttccgaaaatgccaagaggagctggaacaaagaaatcttgagttatctgcgctgagaagaaagataaatggtttacattctaatgaactggaagtttgtgaatctggtgcgacatggaagtaccaagctagaatagcagatctagaggatactgaacctgagacagatacacttaaggctaggtttgaactgcagctacaggaaaatgatgaccttcgtcgttccaaggttgagatgcagaattttatttctgagtttcaggcagagaagagtcagcttgaggaacgcctgtccgcgtcgcttaaagaaagcagcatcacatctaaatgtctggatgaagtgcggaaagatatccttgtgctttccagcagtatagattcccatgtttcaaccaataaacttcttgagaggaacttagttgagctagagagctgcaaagctgaactagagttgcatgtatcggagctggaacaggaaaacatcgagttgtcagaacggatatctggacttgaaacacaactgacttacgtgacaaatgaaaaggagtcaagcgagctgcagttgcatgactccagatctctcatcatcaatctcaaagataaagtagagtgtcagcaatcagagatggaaactcaaaggctccagtttaagcagaaacaacaagaatctcaaagaagattgtgcgaagcacaagatgattctgaagttctgagaagatctaattgtaaactacaatctacggttgagagtcttattgaagagtgcagttctcttcagaatctaattgctgatctgaaaaggcagaagttggaattacatggtcatcttacgcaaaaagagcaggaattggatgagtcgaaaaaaaagaactttgagtttagcaaaacagtggagttccttgaggcaaaacttttgtcactacagaaggacatttcttctaaagaacaatctttattgtcagaattggagaatattttccaggagcacatggaacaagaagaaagaattaatcgcgcacatttcatgctcaataagatcgagaaagaaaagactcttgaagtagagaatcttgaaagggaggtcgtcagcctcgctgcacaggtctcctccacacacgaggagcgagaaagtgccactctgaatgctattcaagaggtatctgtcctgcgagcagacaatgctaaacttgaggctaatctccaagatgttagtgaacagctgagatgttacgagtctcaattggaagaccttcgtaaggagtctaaaagtaaaattaaaggattggttgattcccttaatgcctccaaacaaagcgaggaaatgttgacatcagatgctgaacatatgaaaaagttgatggaagctgctaaatccaatgaagatgcactaaggaagacttctaacgaactagaactgaagcttaaatccagtgattatgtgaaacaacaaatgctggaagaaatatctggcctgaaacttcaggttcagaaaataatgaatcttcaagatgaggtttccaaacttcagagttctcttgatgaggccaagttcgaaaaagggaaacttgaggagtttgtgcgctcggtgactgaggaatgtcaagaactaaaagcacagaaggctatgctaacagataaagtttcttatatgcaggagaccttgagaaatggtgaagaagaaaaccgaaacagaatagctatgcatgcaaagctcatgaggttggagagtgatctaacagcattagaagcatcacatgtacatgaagcagaattaaagaacgaactcagtaggatcaagagatcaaacagtgagtatcagaggaagatacaatctctcgggcaggaaaatgaggatctcactaggcgagttcaaattatggaaaagggttttgagcgaatgtcccacgctaaagagaaccttggaaagcaggagattggaggagataaccaggaagccatccagtcaacaattcagttactggaaattaagcttgcagaggcattggaggaaaataagatatacagagctcaacagaagagttcgatgtctgaggggcaacctgctggtggagatggcaaggagggcaataccgacaggattttgcagttggaaggagagctgagagatatgaaggaacgattactcaacatgagcttgcagtacgcagaggtagaggctcagagggaacggttagtgatggagcttaaagctatcaagaaaggcaggtggttttagcaggatgcggagttgttgcctgacataaaacatgaggctgacaccacaggtgggcatcatcaagccgtgctatgctccagcaccagtgagactaagagcaagcaagtgcaagtgcagagtcagacagtgatatagcctggacgtgctaactggtgctggagcatgtgtctctcactgaagctccgtatgatgcggtacccagcccttgtttaactggacgtgctaacttgcgttgtcccctagagtcatgatcccgttcttattggtatttatttttaatggtatataattaatatatacaccagtatgtattgagtttgactggagagtgatggtcagttgttgataccatccgatccctctgttttacatgattgattacgttggaaagagtcaacccattaagggctagtttgaaagccacaaaaccggaggggttggaggggctaaaatcccctctttattcaattttaaataaaaagtggattttagcccctataatcacctctgtttttttggactcccaaactagccctaataatagtcgataaatgtagttactccgtcctttattttgttgtagttaataatattgctgtagtttgg

SEQ ID NO: 81915 - DNA, 4955 bp, Zea Mays
gcgacatcgacgacaacgacgacgacgacacgcgagatcgcctcagaaatctcgcaaccacaaggcagctggcctgctgttctgacgacagccattgcacgcaccagccagagaagttgaggttgcgccttctcctctcgggctcgggctcggtaggtatatgcctgcattcccattcccaaccaggtctggtctggtctgctccggtccggtcttctctcccgaccccgacctggcctcctccctcccctctccagcagagctctccctccccctccccctgaggtgaggtggctgaagtcgggggacatggtttctttctccgcttcctaagattcctcttcttccccccaacccaccacctacaccttttgctgcgccgcacctgcacggccgctccatgcgccgccgtatctcagtctcaggtcagcatcaccaaccgcagttccacctcccgaccccagccgcaatctaggaggagggccgccgctctcccctcggccgcatcgcatggtaaccaccaccagcagggcaggatgttcaagcttcaccgccaccgctcctccgaccgcgtcggcgagcgcttcgacttcagattctccaacttccgcgccgtccaggtccccgccatttcagacaggctcttcctttccatagtctccgtagacaatggaaaaacaattgcaaagtccactaaagtagcttctcgtagtggaatatgccagtggcccgacaccatcttggaacccatatggttctccaaggaccaagtctccaaagaatttcaagagtgccagtacaggattattgtttccctgggatcggcaaaatctggcattcttggggagattcttctaaatctctctaattttctgaatttggccgatccaaccgctatctctttgccactgaagagatgcaactctggaacagttttgcagcttaaggttcaatgtcttggcacaaaatctaagctgagtggtgtcagatcattgagggacatggctcctcgtcttgatgaccgtagtccaacgccaaccaatgacgagctggacaacaggtcagattgctctgatggtatgttcaacaagggtgttcattcttcatctgaaaatcatctgggtggaacttatcaagatgaatctggaaacatggaaacaggtttctcagcatcagggtcccatcggagttctaattctggagatagtactgcagatagaacaaacttctctcctagagtcaactctaatggagggctttttgtgggaaggcaggattctgctagttcctatgctagttatgttagtgccggcggtggtgatgatgggcttagatccaacaattcatcttttagttctcggacttcaggcccaaatttgctgcaagggagtactccaaaaacattttcgaatgacctttctcagttatctatgggggcgtctgactcatccaaagattttcttgaagctgctgaagaaacaattgaggagctccgtgacgaggcaaaaatgtgggaacgccactctcgcaagttgaaggctgatctagagatgctgaaaaaggagtgttctgaaaaatcaaagcaacatgctgaactagcagttgagctgtctgctgcacaagctgaacgggattcatataggcatgaaatagaagaattaaagtcatccttacaagatgtaaacacacgacagacaattacaggaacacctaaacgttcagactggatagacctgcagaaggaacttgaaggtgaggtgaagtttcttaaagaatcgaatacagacttaaccatacaactaaacaggactcaagagtcaaatatagagcttctttctattcttcaggaactggaggaaaccattgaagaacagagagttgaaatatctaagatttcaaaggtcaagcagactgcttatcctgagaatgggctgttagtaaaaaaagacagagagtgggctaagaaactgtcaatgaaagaggatgaaatcacaattccgagggagaaatcggatcgtgctctcaacattggaaatgcagatggtgcagcttccaatgccatttatcttgatttggagaaagaaaatgaaattttaagggctaaaatacaagagcttgagaaggactgctctgaactaacagatgaaaatttggagcttatatataagctgaaagaaaatggtctgacaaaaggtcaggttcctcatattgcaaacaacaatgagctgcaattcaaaaagcttacatcccggattcatcaactggaggaggatcttaggaataaggaaatgttaagagatgacagtttttctgagtcatcaatgtctaatgcagatgagatacagagaaaatgtgctgaccttgagctgaaggtgctaaattttaggtctcaaacctgtgagctagaagaaaagttccgaaaatgccaagaggagctggaacaaagaaatcttgagttatctgcgctgagaagaaagataaatggtttacattctaatgaactggaagtttgtgaatctggtgcgacatggaagtaccaagctagaatagcagatctagaggatactgaacctgagacagatacacttaaggctaggtttgaactgcagctacaggaaaatgatgaccttcgtcgttccaaggttgagatgcagaattttatttctgagtttcaggcagagaagagtcagcttgaggaacgcctgtccgcgtcgcttaaagaaagcagcatcacatctaaatgtctggatgaagtgcggaaagatatccttgtgctttccagcagtatagattcccatgtttcaaccaataaacttcttgagaggaacttagttgagctagagagctgcaaagctgaactagagttgcatgtatcggagctggaacaggaaaacatcgagttgtcagaacggatatctggacttgaaacacaactgacttacgtgacaaatgaaaaggagtcaagcgagctgcagttgcatgactccagatctctcatcatcaatctcaaagataaagtagagtgtcagcaatcagagatggaaactcaaaggctccagtttaagcagaaacaacaagaatctcaaagaagattgtgcgaagcacaagatgattctgaagttctgagaagatctaattgtaaactacaatctacggttgagagtcttattgaagagtgcagttctcttcagaatctaattgctgatctgaaaaggcagaagttggaattacatggtcatcttacgcaaaaagagcaggaattggatgagtcgaaaaaaaagaactttgagtttagcaaaacagtggagttccttgaggcaaaacttttgtcactacagaaggacatttcttctaaagaacaatctttattgtcagaattggagaatattttccaggagcacatggaacaagaagaaagaattaatcgcgcacatttcatgctcaataagatcgagaaagaaaagactcttgaagtagagaatcttgaaagggaggtcgtcagcctcgctgcacaggtctcctccacacacgaggagcgagaaagtgccactctgaatgctattcaagaggtatctgtcctgcgagcagacaatgctaaacttgaggctaatctccaagatgttagtgaacagctgagatgttacgagtctcaattggaagaccttcgtaaggagtctaaaagtaaaattaaaggattggttgattcccttaatgcctccaaacaaagcgaggaaatgttgacatcagatgctgaacatatgaaaaagttgatggaagctgctaaatccaatgaagatgcactaaggaagacttctaacgaactagaactgaagcttaaatccagtgattatgtgaaacaacaaatgctggaagaaatatctggcctgaaacttcaggttcagaaaataatgaatcttcaagatgaggtttccaaacttcagagttctcttgatgaggccaagttcgaaaaagggaaacttgaggagtttgtgcgctcggtgactgaggaatgtcaagaactaaaagcacagaaggctatgctaacagataaagtttcttatatgcaggagaccttgagaaatggtgaagaagaaaaccgaaacagaatagctatgcatgcaaagctcatgaggttggagagtgatctaacagcattagaagcatcacatgtacatgaagcagaattaaagaacgaactcagtaggatcaagagatcaaacagtgagtatcagaggaagatacaatctctcgggcaggaaaatgaggatctcactaggcgagttcaaattatggaaaagggttttgagcgaatgtcccacgctaaagagaaccttggaaagcaggagattggaggagataaccaggaagccatccagtcaacaattcagttactggaaattaagcttgcagaggcattggaggaaaataagatatacagagctcaacagaagagttcgatgtctgaggggcaacctgctggtggagatggcaaggagggcaataccgacaggattttgcagttggaaggagagctgagagatatgaaggaacgattactcaacatgagcttgcagtacgcagaggtagaggctcagagggaacggttagtgatggagcttaaagctatcaagaaaggcaggtggttttagcaggatgcggagttgttgcctgacataaaacatgaggctgacaccacaggtgggcatcatcaagccgtgctatgctccagcaccagtgagactaagagcaagcaagtgcaagtgcagagtcagacagtgatatagcctggacgtgctaactggtgctggagcatgtgtctctcactgaagctccgtatgatgcggcttataccccccaactcagtctattgagctctattgcctatttcaactattagaggatctgtatgagtgaggaagagtctttacctggtgaggaactcaatagctaataat

SEQ ID NO: 81916 - DNA, 5557 bp, Zea Mays
gaaatctcgcaaccacaaggcagctggcctgctgttctgacgacagccattgcacgcaccagccagagaagttgaggttgcgccttctcctctcgggctcgggctcggtaggtatatgcctgcattcccattcccaaccaggtctggtctggtctgctccggtccggtcttctctcccgaccccgacctggcctcctccctcccctctccagcagagctctccctccccctccccctgaggtgaggtggctgaagtcgggggacatggtttctttctccgcttcctaagattcctcttcttccccccaacccaccacctacaccttttgctgcgccgcacctgcacggccgctccatgcgccgccgtatctcagtctcaggtcagcatcaccaaccgcagttccacctcccgaccccagccgcaatctaggaggagggccgccgctctcccctcggccgcatcgcatggtaaccaccaccagcagggcaggatgttcaagcttcaccgccaccgctcctccgaccgcgtcggcgagcgcttcgacttcagattctccaacttccgcgccgtccaggttggttcctttcctctctctctctctctctctctctctctctctctctctctctctctctctcttactctcttcctgctctccctccctccttccttcagggactagccggccggccagcgggggaggacagacagtaccaaaacctcgcttacccgatccgatacaaaagagaggccctgcgattaccacaaattcttctctcatatcttatctactggagtaatcgctttgctgcttgcctttcatctgctgatttgctctctcccgctaggccaaggccgctgctgatgtgatggcagacactcgtcatccaacctacattccttcacctttgctacatcaatgtccccgccatttcagacaggctcttcctttccatagtctccgtagacaatggaaaaacaattgcaaagtccactaaagtagcttctcgtagtggaatatgccagtggcccgacaccatcttggaacccatatggttctccaaggaccaagtctccaaagaatttcaagagtgccagtacaggattattgtttccctgggatcggcaaaatctggcattcttggggagattcttctaaatctctctaattttctgaatttggccgatccaaccgctatctctttgccactgaagagatgcaactctggaacagttttgcagcttaaggttcaatgtcttggcacaaaatctaagctgagtggtgtcagatcattgagggacatggctcctcgtcttgatgaccgtagtccaacgccaaccaatgacgagctggacaacaggtcagattgctctgatggtatgttcaacaagggtgttcattcttcatctgaaaatcatctgggtggaacttatcaagatgaatctggaaacatggaaacaggtttctcagcatcagggtcccatcggagttctaattctggagatagtactgcagatagaacaaacttctctcctagagtcaactctaatggagggctttttgtgggaaggcaggattctgctagttcctatgctagttatgttagtgccggcggtggtgatgatgggcttagatccaacaattcatcttttagttctcggacttcaggcccaaatttgctgcaagggagtactccaaaaacattttcgaatgacctttctcagttatctatgggggcgtctgactcatccaaagattttcttgaagctgctgaagaaacaattgaggagctccgtgacgaggcaaaaatgtgggaacgccactctcgcaagttgaaggctgatctagagatgctgaaaaaggagtgttctgaaaaatcaaagcaacatgctgaactagcagttgagctgtctgctgcacaagctgaacgggattcatataggcatgaaatagaagaattaaagtcatccttacaagatgtaaacacacgacagacaattacaggaacacctaaacgttcagactggatagacctgcagaaggaacttgaaggtgaggtgaagtttcttaaagaatcgaatacagacttaaccatacaactaaacaggactcaagagtcaaatatagagcttctttctattcttcaggaactggaggaaaccattgaagaacagagagttgaaatatctaagatttcaaaggtcaagcagactgcttatcctgagaatgggctgttagtaaaaaaagacagagagtgggctaagaaactgtcaatgaaagaggatgaaatcacaattccgagggagaaatcggatcgtgctctcaacattggaaatgcagatggtgcagcttccaatgccatttatcttgatttggagaaagaaaatgaaattttaagggctaaaatacaagagcttgagaaggactgctctgaactaacagatgaaaatttggagcttatatataagctgaaagaaaatggtctgacaaaaggtcaggttcctcatattgcaaacaacaatgagctgcaattcaaaaagcttacatcccggattcatcaactggaggaggatcttaggaataaggaaatgttaagagatgacagtttttctgagtcatcaatgtctaatgcagatgagatacagagaaaatgtgctgaccttgagctgaaggtgctaaattttaggtctcaaacctgtgagctagaagaaaagttccgaaaatgccaagaggagctggaacaaagaaatcttgagttatctgcgctgagaagaaagataaatggtttacattctaatgaactggaagtttgtgaatctggtgcgacatggaagtaccaagctagaatagcagatctagaggatactgaacctgagacagatacacttaaggctaggtttgaactgcagctacaggaaaatgatgaccttcgtcgttccaaggttgagatgcagaattttatttctgagtttcaggcagagaagagtcagcttgaggaacgcctgtccgcgtcgcttaaagaaagcagcatcacatctaaatgtctggatgaagtgcggaaagatatccttgtgctttccagcagtatagattcccatgtttcaaccaataaacttcttgagaggaacttagttgagctagagagctgcaaagctgaactagagttgcatgtatcggagctggaacaggaaaacatcgagttgtcagaacggatatctggacttgaaacacaactgacttacgtgacaaatgaaaaggagtcaagcgagctgcagttgcatgactccagatctctcatcatcaatctcaaagataaagtagagtgtcagcaatcagagatggaaactcaaaggctccagtttaagcagaaacaacaagaatctcaaagaagattgtgcgaagcacaagatgattctgaagttctgagaagatctaattgtaaactacaatctacggttgagagtcttattgaagagtgcagttctcttcagaatctaattgctgatctgaaaaggcagaagttggaattacatggtcatcttacgcaaaaagagcaggaattggatgagtcgaaaaaaaagaactttgagtttagcaaaacagtggagttccttgaggcaaaacttttgtcactacagaaggacatttcttctaaagaacaatctttattgtcagaattggagaatattttccaggagcacatggaacaagaagaaagaattaatcgcgcacatttcatgctcaataagatcgagaaagaaaagactcttgaagtagagaatcttgaaagggaggtcgtcagcctcgctgcacaggtctcctccacacacgaggagcgagaaagtgccactctgaatgctattcaagaggtatctgtcctgcgagcagacaatgctaaacttgaggctaatctccaagatgttagtgaacagctgagatgttacgagtctcaattggaagaccttcgtaaggagtctaaaagtaaaattaaaggattggttgattcccttaatgcctccaaacaaagcgaggaaatgttgacatcagatgctgaacatatgaaaaagttgatggaagctgctaaatccaatgaagatgcactaaggaagacttctaacgaactagaactgaagcttaaatccagtgattatgtgaaacaacaaatgctggaagaaatatctggcctgaaacttcaggttcagaaaataatgaatcttcaagatgaggtttccaaacttcagagttctcttgatgaggccaagttcgaaaaagggaaacttgaggagtttgtgcgctcggtgactgaggaatgtcaagaactaaaagcacagaaggctatgctaacagataaagtttcttatatgcaggagaccttgagaaatggtgaagaagaaaaccgaaacagaatagctatgcatgcaaagctcatgaggttggagagtgatctaacagcattagaagcatcacatgtacatgaagcagaattaaagaacgaactcagtaggatcaagagatcaaacagtgagtatcagaggaagatacaatctctcgggcaggaaaatgaggatctcactaggcgagttcaaattatggaaaagggttttgagcgaatgtcccacgctaaagagaaccttggaaagcaggagattggaggagataaccaggaagccatccagtcaacaattcagttactggaaattaagcttgcagaggcattggaggaaaataagatatacagagctcaacagaagagttcgatgtctgaggggcaacctgctggtggagatggcaaggagggcaataccgacaggattttgcagttggaaggagagctgagagatatgaaggaacgattactcaacatgagcttgcagtacgcagaggtagaggctcagagggaacggttagtgatggagcttaaagctatcaagaaaggcaggtggttttagcaggatgcggagttgttgcctgacataaaacatgaggctgacaccacaggtgggcatcatcaagccgtgctatgctccagcaccagtgagactaagagcaagcaagtgcaagtgcagagtcagacagtgatatagcctggacgtgctaactggtgctggagcatgtgtctctcactgaagctccgtatgatgcggtacccagcccttgtttaactggacgtgctaacttgcgttgtcccctagagtcatgatcccgttcttattggtatttatttttaatggtatataattaatatatacaccagtatgtattgagtttgactggagagtgatggtcagttgttgataccatccgatccctctgttttacatgattgattacgttggaaagagtcaacccattaagggctagtttgaaagccacaaaaccggaggggttggaggggctaaaatcccctctttattcaattttaaataaaaagtggattttagcccctataatcacctctgtttttttggactcccaaactagccctaataatagtcgataaatgtagttactccgtcctttattttgttgtagttaataatattgctgtagtttgg

SEQ ID NO: 81917 - DNA, 4880 bp, Zea Mays
aaccaggtctggtctggtctgctccggtccggtcttctctcccgaccccgacctggcctcctccctcccctctccagcagagctctccctccccctccccctgaggtgaggtggctgaagtcgggggacatggtttctttctccgcttcctaagattcctcttcttccccccaacccaccacctacaccttttgctgcgccgcacctgcacggccgctccatgcgccgccgtatctcagtctcaggtccccgccatttcagacaggctcttcctttccatagtctccgtagacaatggaaaaacaattgcaaagtccactaaagtagcttctcgtagtggaatatgccagtggcccgacaccatcttggaacccatatggttctccaaggaccaagtctccaaagaatttcaagagtgccagtacaggattattgtttccctgggatcggcaaaatctggcattcttggggagattcttctaaatctctctaattttctgaatttggccgatccaaccgctatctctttgccactgaagagatgcaactctggaacagttttgcagcttaaggttcaatgtcttggcacaaaatctaagctgagtggtgtcagatcattgagggacatggctcctcgtcttgatgaccgtagtccaacgccaaccaatgacgagctggacaacaggtcagattgctctgatggtatgttcaacaagggtgttcattcttcatctgaaaatcatctgggtggaacttatcaagatgaatctggaaacatggaaacaggtttctcagcatcagggtcccatcggagttctaattctggagatagtactgcagatagaacaaacttctctcctagagtcaactctaatggagggctttttgtgggaaggcaggattctgctagttcctatgctagttatgttagtgccggcggtggtgatgatgggcttagatccaacaattcatcttttagttctcggacttcaggcccaaatttgctgcaagggagtactccaaaaacattttcgaatgacctttctcagttatctatgggggcgtctgactcatccaaagattttcttgaagctgctgaagaaacaattgaggagctccgtgacgaggcaaaaatgtgggaacgccactctcgcaagttgaaggctgatctagagatgctgaaaaaggagtgttctgaaaaatcaaagcaacatgctgaactagcagttgagctgtctgctgcacaagctgaacgggattcatataggcatgaaatagaagaattaaagtcatccttacaagatgtaaacacacgacagacaattacaggaacacctaaacgttcagactggatagacctgcagaaggaacttgaaggtgaggtgaagtttcttaaagaatcgaatacagacttaaccatacaactaaacaggactcaagagtcaaatatagagcttctttctattcttcaggaactggaggaaaccattgaagaacagagagttgaaatatctaagatttcaaaggtcaagcagactgcttatcctgagaatgggctgttagtaaaaaaagacagagagtgggctaagaaactgtcaatgaaagaggatgaaatcacaattccgagggagaaatcggatcgtgctctcaacattggaaatgcagatggtgcagcttccaatgccatttatcttgatttggagaaagaaaatgaaattttaagggctaaaatacaagagcttgagaaggactgctctgaactaacagatgaaaatttggagcttatatataagctgaaagaaaatggtctgacaaaaggtcaggttcctcatattgcaaacaacaatgagctgcaattcaaaaagcttacatcccggattcatcaactggaggaggatcttaggaataaggaaatgttaagagatgacagtttttctgagtcatcaatgtctaatgcagatgagatacagagaaaatgtgctgaccttgagctgaaggtgctaaattttaggtctcaaacctgtgagctagaagaaaagttccgaaaatgccaagaggagctggaacaaagaaatcttgagttatctgcgctgagaagaaagataaatggtttacattctaatgaactggaagtttgtgaatctggtgcgacatggaagtaccaagctagaatagcagatctagaggatactgaacctgagacagatacacttaaggctaggtttgaactgcagctacaggaaaatgatgaccttcgtcgttccaaggttgagatgcagaattttatttctgagtttcaggcagagaagagtcagcttgaggaacgcctgtccgcgtcgcttaaagaaagcagcatcacatctaaatgtctggatgaagtgcggaaagatatccttgtgctttccagcagtatagattcccatgtttcaaccaataaacttcttgagaggaacttagttgagctagagagctgcaaagctgaactagagttgcatgtatcggagctggaacaggaaaacatcgagttgtcagaacggatatctggacttgaaacacaactgacttacgtgacaaatgaaaaggagtcaagcgagctgcagttgcatgactccagatctctcatcatcaatctcaaagataaagtagagtgtcagcaatcagagatggaaactcaaaggctccagtttaagcagaaacaacaagaatctcaaagaagattgtgcgaagcacaagatgattctgaagttctgagaagatctaattgtaaactacaatctacggttgagagtcttattgaagagtgcagttctcttcagaatctaattgctgatctgaaaaggcagaagttggaattacatggtcatcttacgcaaaaagagcaggaattggatgagtcgaaaaaaaagaactttgagtttagcaaaacagtggagttccttgaggcaaaacttttgtcactacagaaggacatttcttctaaagaacaatctttattgtcagaattggagaatattttccaggagcacatggaacaagaagaaagaattaatcgcgcacatttcatgctcaataagatcgagaaagaaaagactcttgaagtagagaatcttgaaagggaggtcgtcagcctcgctgcacaggtctcctccacacacgaggagcgagaaagtgccactctgaatgctattcaagaggtatctgtcctgcgagcagacaatgctaaacttgaggctaatctccaagatgttagtgaacagctgagatgttacgagtctcaattggaagaccttcgtaaggagtctaaaagtaaaattaaaggattggttgattcccttaatgcctccaaacaaagcgaggaaatgttgacatcagatgctgaacatatgaaaaagttgatggaagctgctaaatccaatgaagatgcactaaggaagacttctaacgaactagaactgaagcttaaatccagtgattatgtgaaacaacaaatgctggaagaaatatctggcctgaaacttcaggttcagaaaataatgaatcttcaagatgaggtttccaaacttcagagttctcttgatgaggccaagttcgaaaaagggaaacttgaggagtttgtgcgctcggtgactgaggaatgtcaagaactaaaagcacagaaggctatgctaacagataaagtttcttatatgcaggagaccttgagaaatggtgaagaagaaaaccgaaacagaatagctatgcatgcaaagctcatgaggttggagagtgatctaacagcattagaagcatcacatgtacatgaagcagaattaaagaacgaactcagtaggatcaagagatcaaacagtgagtatcagaggaagatacaatctctcgggcaggaaaatgaggatctcactaggcgagttcaaattatggaaaagggttttgagcgaatgtcccacgctaaagagaaccttggaaagcaggagattggaggagataaccaggaagccatccagtcaacaattcagttactggaaattaagcttgcagaggcattggaggaaaataagatatacagagctcaacagaagagttcgatgtctgaggggcaacctgctggtggagatggcaaggagggcaataccgacaggattttgcagttggaaggagagctgagagatatgaaggaacgattactcaacatgagcttgcagtacgcagaggtagaggctcagagggaacggttagtgatggagcttaaagctatcaagaaaggcaggtggttttagcaggatgcggagttgttgcctgacataaaacatgaggctgacaccacaggtgggcatcatcaagccgtgctatgctccagcaccagtgagactaagagcaagcaagtgcaagtgcagagtcagacagtgatatagcctggacgtgctaactggtgctggagcatgtgtctctcactgaagctccgtatgatgcggtacccagcccttgtttaactggacgtgctaacttgcgttgtcccctagagtcatgatcccgttcttattggtatttatttttaatggtatataattaatatatacaccagtatgtattgagtttgactggagagtgatggtcagttgttgataccatccgatccctctgttttacatgattgattacgttggaaagagtcaacccattaagggctagtttgaaagccacaaaaccggaggggttggaggggctaaaatcccctctttattcaattttaaataaaaagtggattttagcccctataatcacctctgtttttttggactcccaaactagccctaataatagtcgataaatgtagttactccgtcctttattttgttgtagttaataatattgctgtagtttgg

SEQ ID NO: 81918 - DNA, 4402 bp, Zea Mays
cttgtttccaatggccacttgggcattgcttacatgatttggtagccaaaaatatgctggtattacattccaatcatagctgccaacacttaaggttcaatgtcttggcacaaaatctaagctgagtggtgtcagatcattgagggacatggctcctcgtcttgatgaccgtagtccaacgccaaccaatgacgagctggacaacaggtcagattgctctgatggtatgttcaacaagggtgttcattcttcatctgaaaatcatctgggtggaacttatcaagatgaatctggaaacatggaaacaggtttctcagcatcagggtcccatcggagttctaattctggagatagtactgcagatagaacaaacttctctcctagagtcaactctaatggagggctttttgtgggaaggcaggattctgctagttcctatgctagttatgttagtgccggcggtggtgatgatgggcttagatccaacaattcatcttttagttctcggacttcaggcccaaatttgctgcaagggagtactccaaaaacattttcgaatgacctttctcagttatctatgggggcgtctgactcatccaaagattttcttgaagctgctgaagaaacaattgaggagctccgtgacgaggcaaaaatgtgggaacgccactctcgcaagttgaaggctgatctagagatgctgaaaaaggagtgttctgaaaaatcaaagcaacatgctgaactagcagttgagctgtctgctgcacaagctgaacgggattcatataggcatgaaatagaagaattaaagtcatccttacaagatgtaaacacacgacagacaattacaggaacacctaaacgttcagactggatagacctgcagaaggaacttgaaggtgaggtgaagtttcttaaagaatcgaatacagacttaaccatacaactaaacaggactcaagagtcaaatatagagcttctttctattcttcaggaactggaggaaaccattgaagaacagagagttgaaatatctaagatttcaaaggtcaagcagactgcttatcctgagaatgggctgttagtaaaaaaagacagagagtgggctaagaaactgtcaatgaaagaggatgaaatcacaattccgagggagaaatcggatcgtgctctcaacattggaaatgcagatggtgcagcttccaatgccatttatcttgatttggagaaagaaaatgaaattttaagggctaaaatacaagagcttgagaaggactgctctgaactaacagatgaaaatttggagcttatatataagctgaaagaaaatggtctgacaaaaggtcaggttcctcatattgcaaacaacaatgagctgcaattcaaaaagcttacatcccggattcatcaactggaggaggatcttaggaataaggaaatgttaagagatgacagtttttctgagtcatcaatgtctaatgcagatgagatacagagaaaatgtgctgaccttgagctgaaggtgctaaattttaggtctcaaacctgtgagctagaagaaaagttccgaaaatgccaagaggagctggaacaaagaaatcttgagttatctgcgctgagaagaaagataaatggtttacattctaatgaactggaagtttgtgaatctggtgcgacatggaagtaccaagctagaatagcagatctagaggatactgaacctgagacagatacacttaaggctaggtttgaactgcagctacaggaaaatgatgaccttcgtcgttccaaggttgagatgcagaattttatttctgagtttcaggcagagaagagtcagcttgaggaacgcctgtccgcgtcgcttaaagaaagcagcatcacatctaaatgtctggatgaagtgcggaaagatatccttgtgctttccagcagtatagattcccatgtttcaaccaataaacttcttgagaggaacttagttgagctagagagctgcaaagctgaactagagttgcatgtatcggagctggaacaggaaaacatcgagttgtcagaacggatatctggacttgaaacacaactgacttacgtgacaaatgaaaaggagtcaagcgagctgcagttgcatgactccagatctctcatcatcaatctcaaagataaagtagagtgtcagcaatcagagatggaaactcaaaggctccagtttaagcagaaacaacaagaatctcaaagaagattgtgcgaagcacaagatgattctgaagttctgagaagatctaattgtaaactacaatctacggttgagagtcttattgaagagtgcagttctcttcagaatctaattgctgatctgaaaaggcagaagttggaattacatggtcatcttacgcaaaaagagcaggaattggatgagtcgaaaaaaaagaactttgagtttagcaaaacagtggagttccttgaggcaaaacttttgtcactacagaaggacatttcttctaaagaacaatctttattgtcagaattggagaatattttccaggagcacatggaacaagaagaaagaattaatcgcgcacatttcatgctcaataagatcgagaaagaaaagactcttgaagtagagaatcttgaaagggaggtcgtcagcctcgctgcacaggtctcctccacacacgaggagcgagaaagtgccactctgaatgctattcaagaggtatctgtcctgcgagcagacaatgctaaacttgaggctaatctccaagatgttagtgaacagctgagatgttacgagtctcaattggaagaccttcgtaaggagtctaaaagtaaaattaaaggattggttgattcccttaatgcctccaaacaaagcgaggaaatgttgacatcagatgctgaacatatgaaaaagttgatggaagctgctaaatccaatgaagatgcactaaggaagacttctaacgaactagaactgaagcttaaatccagtgattatgtgaaacaacaaatgctggaagaaatatctggcctgaaacttcaggttcagaaaataatgaatcttcaagatgaggtttccaaacttcagagttctcttgatgaggccaagttcgaaaaagggaaacttgaggagtttgtgcgctcggtgactgaggaatgtcaagaactaaaagcacagaaggctatgctaacagataaagtttcttatatgcaggagaccttgagaaatggtgaagaagaaaaccgaaacagaatagctatgcatgcaaagctcatgaggttggagagtgatctaacagcattagaagcatcacatgtacatgaagcagaattaaagaacgaactcagtaggatcaagagatcaaacagtgagtatcagaggaagatacaatctctcgggcaggaaaatgaggatctcactaggcgagttcaaattatggaaaagggttttgagcgaatgtcccacgctaaagagaaccttggaaagcaggagattggaggagataaccaggaagccatccagtcaacaattcagttactggaaattaagcttgcagaggcattggaggaaaataagatatacagagctcaacagaagagttcgatgtctgaggggcaacctgctggtggagatggcaaggagggcaataccgacaggattttgcagttggaaggagagctgagagatatgaaggaacgattactcaacatgagcttgcagtacgcagaggtagaggctcagagggaacggttagtgatggagcttaaagctatcaagaaaggcaggtggttttagcaggatgcggagttgttgcctgacataaaacatgaggctgacaccacaggtgggcatcatcaagccgtgctatgctccagcaccagtgagactaagagcaagcaagtgcaagtgcagagtcagacagtgatatagcctggacgtgctaactggtgctggagcatgtgtctctcactgaagctccgtatgatgcggtacccagcccttgtttaactggacgtgctaacttgcgttgtcccctagagtcatgatcccgttcttattggtatttatttttaatggtatataattaatatatacaccagtatgtattgagtttgactggagagtgatggtcagttgttgataccatccgatccctctgttttacatgattgattacgttggaaagagtcaacccattaagggctagtttgaaagccacaaaaccggaggggttggaggggctaaaatcccctctttattcaattttaaataaaaagtggattttagcccctataatcacctctgtttttttggactcccaaactagccctaataatagtcgataaatgtagttactccgtcctttattttgttgtagttaataatattgctgtagtttgg

SEQ ID NO: 81919 - DNA, 4117 bp, Zea Mays
atcaagatgaatctggaaacatggtttctcagcatcagggtcccatcggagttctaattctggagatagtactgcagatagaacaaacttctctcctagagtcaactctaatggagggctttttgtgggaaggcaggattctgctagttcctatgctagttatgttagtgccggcggtggtgatgatgggcttagatccaacaattcatcttttagttctcggacttcaggcccaaatttgctgcaagggagtactccaaaaacattttcgaatgacctttctcagttatctatgggggcgtctgactcatccaaagattttcttgaagctgctgaagaaacaattgaggagctccgtgacgaggcaaaaatgtgggaacgccactctcgcaagttgaaggctgatctagagatgctgaaaaaggagtgttctgaaaaatcaaagcaacatgctgaactagcagttgagctgtctgctgcacaagctgaacgggattcatataggcatgaaatagaagaattaaagtcatccttacaagatgtaaacacacgacagacaattacaggaacacctaaacgttcagactggatagacctgcagaaggaacttgaaggtgaggtgaagtttcttaaagaatcgaatacagacttaaccatacaactaaacaggactcaagagtcaaatatagagcttctttctattcttcaggaactggaggaaaccattgaagaacagagagttgaaatatctaagatttcaaaggtcaagcagactgcttatcctgagaatgggctgttagtaaaaaaagacagagagtgggctaagaaactgtcaatgaaagaggatgaaatcacaattccgagggagaaatcggatcgtgctctcaacattggaaatgcagatggtgcagcttccaatgccatttatcttgatttggagaaagaaaatgaaattttaagggctaaaatacaagagcttgagaaggactgctctgaactaacagatgaaaatttggagcttatatataagctgaaagaaaatggtctgacaaaaggtcaggttcctcatattgcaaacaacaatgagctgcaattcaaaaagcttacatcccggattcatcaactggaggaggatcttaggaataaggaaatgttaagagatgacagtttttctgagtcatcaatgtctaatgcagatgagatacagagaaaatgtgctgaccttgagctgaaggtgctaaattttaggtctcaaacctgtgagctagaagaaaagttccgaaaatgccaagaggagctggaacaaagaaatcttgagttatctgcgctgagaagaaagataaatggtttacattctaatgaactggaagtttgtgaatctggtgcgacatggaagtaccaagctagaatagcagatctagaggatactgaacctgagacagatacacttaaggctaggtttgaactgcagctacaggaaaatgatgaccttcgtcgttccaaggttgagatgcagaattttatttctgagtttcaggcagagaagagtcagcttgaggaacgcctgtccgcgtcgcttaaagaaagcagcatcacatctaaatgtctggatgaagtgcggaaagatatccttgtgctttccagcagtatagattcccatgtttcaaccaataaacttcttgagaggaacttagttgagctagagagctgcaaagctgaactagagttgcatgtatcggagctggaacaggaaaacatcgagttgtcagaacggatatctggacttgaaacacaactgacttacgtgacaaatgaaaaggagtcaagcgagctgcagttgcatgactccagatctctcatcatcaatctcaaagataaagtagagtgtcagcaatcagagatggaaactcaaaggctccagtttaagcagaaacaacaagaatctcaaagaagattgtgcgaagcacaagatgattctgaagttctgagaagatctaattgtaaactacaatctacggttgagagtcttattgaagagtgcagttctcttcagaatctaattgctgatctgaaaaggcagaagttggaattacatggtcatcttacgcaaaaagagcaggaattggatgagtcgaaaaaaaagaactttgagtttagcaaaacagtggagttccttgaggcaaaacttttgtcactacagaaggacatttcttctaaagaacaatctttattgtcagaattggagaatattttccaggagcacatggaacaagaagaaagaattaatcgcgcacatttcatgctcaataagatcgagaaagaaaagactcttgaagtagagaatcttgaaagggaggtcgtcagcctcgctgcacaggtctcctccacacacgaggagcgagaaagtgccactctgaatgctattcaagaggtatctgtcctgcgagcagacaatgctaaacttgaggctaatctccaagatgttagtgaacagctgagatgttacgagtctcaattggaagaccttcgtaaggagtctaaaagtaaaattaaaggattggttgattcccttaatgcctccaaacaaagcgaggaaatgttgacatcagatgctgaacatatgaaaaagttgatggaagctgctaaatccaatgaagatgcactaaggaagacttctaacgaactagaactgaagcttaaatccagtgattatgtgaaacaacaaatgctggaagaaatatctggcctgaaacttcaggttcagaaaataatgaatcttcaagatgaggtttccaaacttcagagttctcttgatgaggccaagttcgaaaaagggaaacttgaggagtttgtgcgctcggtgactgaggaatgtcaagaactaaaagcacagaaggctatgctaacagataaagtttcttatatgcaggagaccttgagaaatggtgaagaagaaaaccgaaacagaatagctatgcatgcaaagctcatgaggttggagagtgatctaacagcattagaagcatcacatgtacatgaagcagaattaaagaacgaactcagtaggatcaagagatcaaacagtgagtatcagaggaagatacaatctctcgggcaggaaaatgaggatctcactaggcgagttcaaattatggaaaagggttttgagcgaatgtcccacgctaaagagaaccttggaaagcaggagattggaggagataaccaggaagccatccagtcaacaattcagttactggaaattaagcttgcagaggcattggaggaaaataagatatacagagctcaacagaagagttcgatgtctgaggggcaacctgctggtggagatggcaaggagggcaataccgacaggattttgcagttggaaggagagctgagagatatgaaggaacgattactcaacatgagcttgcagtacgcagaggtagaggctcagagggaacggttagtgatggagcttaaagctatcaagaaaggcaggtggttttagcaggatgcggagttgttgcctgacataaaacatgaggctgacaccacaggtgggcatcatcaagccgtgctatgctccagcaccagtgagactaagagcaagcaagtgcaagtgcagagtcagacagtgatatagcctggacgtgctaactggtgctggagcatgtgtctctcactgaagctccgtatgatgcggtacccagcccttgtttaactggacgtgctaacttgcgttgtcccctagagtcatgatcccgttcttattggtatttatttttaatggtatataattaatatatacaccagtatgtattgagtttgactggagagtgatggtcagttgttgataccatccgatccctctgttttacatgattgattacgttggaaagagtcaacccattaagggctagtttgaaagccacaaaaccggaggggttggaggggctaaaatcccctctttattcaattttaaataaaaagtggattttagcccctataatcacctctgtttttttggactcccaaactagccctaataatagtcgataaatgtagttactccgtcctttattttgttgtagttaataatattgctgtagtttgg

SEQ ID NO: 81920 - DNA, 2611 bp, Zea Mays
atttaaaccagaaataatgtatttataaaaaatcttcgtaaaaaggtcaaaaggcaacaacaaaaaaggtcaaaaagcgaaaaaagatggcgacaaacgccaagaataacaaaagtataaccaactcaagtcgttcaactagtgacataagatacaataaccatatgtgatgcggtagtatctctctaatctcatgtaaataatgagctaaaagatggaagtgaatagaatgtgtttctctatcattaataggtcttcacgagagcatagagtgcaacgatatcagtcaaggccaaccagatggtatatctatttatacatctgcattggaatctaactgttacgtctgaaattggagaccacagacgtaaaaggatgtgaggataagaaggaccgacgcggatgcgatgaaaagtcagagagtcgggtgtgccgccgaacgcgtcacacacgtctctgtccataggaggcttcgttccgtcgctggctgacccttccgggaaccgggaccaggagatgcagagtggagtggtggaaggaggaggagaattcgatcagctgcccctaattttgtcggcggcgtcaattattgctcttttccaagaaaaaaagaagaagaagaagaaggaaagtacctttcggtaatggtggttccttccgacagcaggagttggggtccaaagcgctagctatattaaaatcagcgcagcgagccttcccttcccttcccttcccttccttccatcgcacgcggcacgcgtcttggtcttcgtcttcgtcctcgtcttctcccccaccccacggtccacgcctacctccttagtgcttggttggtatacataccaccatcagcacctcgctcttctgctcagctctccccctctagcctcacctgccctatacacagccactactgtcgatcgattgaatttgaacccaccaggatcaggattaggattacagcatgtcggcgtccccggagttgtacaggcccgcggaagcgccggccttctcgccgtcctgcgccacgcagccgctcgtgttcgccggcgacgactactgctgcaggacgccgacgggcagcgggatctgctacctgagggagcccaccacgtgcccgcccgcgccccggaagccgccgccgccgccgcccatgtgcaggaagcgcctcttccaagcggcggatcagcagcttgctgaggcgggccccgtccctgttatcagcatccgcctcgacgagctggagcgcctcttccgcccctgtccgccgccgaccaccaccaccaccgacaagcggcgccgctccggctccggccccagccccagatccgccacgaaacatggtgctcagctgcagctgcgcagcatgaattgaattgggttagcgtaacgtagcttgcacgcaccaaccaaccactccctttttagtttttgctgctgcatctgtctgcttcttgttgctgcaacaagcaaagcgcaagcggtggcgcttctttttatttatttatttatttattacggagtacttgcttccgttctcaaatatttgtcatttgatagttcatttcaaaaatttgacaaataaaaaagaacgacgaagcaagcagtacccacctgtgtaaatcaaatcaaatatgcaaagttaccgccatagcaataaaatcacccgtgtaaatcagatcaaaaataccaagttgttgtggtattacaaattgtggctttgaatgtgaatcgtctcgttatgcctttctcgaagaaacagacatccactatgttttttcagacaacaggctttctcaggtcagagcagcccccatttagaggagctcgcttcgtaccctgctggcaccgcctccagcaccaagttccagccgctgttcacgctagccaaccacttcttcgcgctgttctcccagtcgtgtgtcccgccggttcgattcctggtttggtttgattgcgcagtgttccaatttgatccgagttctgttattttttgtgtttcttccagcgaagacactcgacatcgaagctgaaggagagcaagtgggagaggcgccgtggggcaagcataatcgagctggccacgaaccaatcgagccgacaagccacgagtatttcgtccagtcctatcatacaccacgacgaggacatcagcattagactcgctacagcctaaagggacccatacaccggacaggcgaagcgatacgctataccggagtacggctaagcacgaccctacaaggacgtcaggggcactacgtgtcaactgggcagcagatcacatccttaccgctcatgtttgtaggaaacaagtctctctatatggccttacccttgagctataaaagagaagacccccctcctaacgcatgcactagctgtaacatagtcctcaagcaatacaacgatcagaactacattggactatgtgtaagcttggaccagtataattctttgtctcggatcccctgctcgaatctcagggattcaccattagaagtgagtctccactagcatctcttatcgaatacaaattctattgtctctggttttcgaaaccacgacaataaatcattctatcttttagtcaaattattttaactttgat

SEQ ID NO: 81921 - DNA, 2711 bp, Zea Mays
atttaaaccagaaataatgtatttataaaaaatcttcgtaaaaaggtcaaaaggcaacaacaaaaaaggtcaaaaagcgaaaaaagatggcgacaaacgccaagaataacaaaagtataaccaactcaagtcgttcaactagtgacataagatacaataaccatatgtgatgcggtagtatctctctaatctcatgtaaataatgagctaaaagatggaagtgaatagaatgtgtttctctatcattaataggtcttcacgagagcatagagtgcaacgatatcagtcaaggccaaccagatggtatatctatttatacatctgcattggaatctaactgttacgtctgaaattggagaccacagacgtaaaaggatgtgaggataagaaggaccgacgcggatgcgatgaaaagtcagagagtcgggtgtgccgccgaacgcgtcacacacgtctctgtccataggaggcttcgttccgtcgctggctgacccttccgggaaccgggaccaggagatgcagagtggagtggtggaaggaggaggagaattcgatcagctgcccctaattttgtcggcggcgtcaattattgctcttttccaagaaaaaaagaagaagaagaagaaggaaagtacctttcggtaatggtggttccttccgacagcaggagttggggtccaaagcgctagctatattaaaatcagcgcagcgagccttcccttcccttcccttcccttccttccatcgcacgcggcacgcgtcttggtcttcgtcttcgtcctcgtcttctcccccaccccacggtccacgcctacctccttagtgcttggttggtatacataccaccatcagcacctcgctcttctgctcagctctccccctctagcctcacctgccctatacacagccactactgtcgatcgattgaatttgaacccaccaggatcaggattaggattacagcatgtcggcgtccccggagttgtacaggcccgcggaagcgccggccttctcgccgtcctgcgccacgcagccgctcgtgttcgccggcgacgactactgctgcaggacgccgacgggcagcgggatctgctacctgagggagcccaccacgtgcccgcccgcgccccggaagccgccgccgccgccgcccatgtgcaggaagcgcctcttccaagcggcggatcagcagcttgctgaggcgggccccgtccctgttatcagcatccgcctcgacgagctggagcgcctcttccgcccctgtccgccgccgaccaccaccaccaccgacaagcggcgccgctccggctccggccccagccccagatccgccacgaaacatgcgaagacactcgacatcgaagctgaaggagagcaagtgggagaggcgccgtggggcaaggaggatgtagccatcgccgatggtataccggagttcctgaagaggtccatcctgctacagacatttggtgtacagggccatcacacatgtcaggaggtggagcatgtcgtgatcccacctcatgtgccgccggaggtggagcatgaactaccagagccagagaaggctcaaagagacatatttgccttctttcgaggcaaaatggaggtgcaccccaagaatattagtggccgcttctacagcaagaaggtgaggactgagcttctacaacattatggtcgcaaccgcaagttctaccttaagagaaagcggttcgacaactaccgatcagagatggctcggtcattgttctgtctatgtccgctgggatgggcgccttggagtcctcggctcgtggagtcagtcctcctaggctgcattcctgttataattgctgataacatacgtatgccgttcccttcagtcctccagtggccggagatctcattgcaggtggctgagaaggacgtagccaaccttgaggtggtgcttgaccatgttgtggcaaccaatttgagtgtgatacagaagaatctgtgggatccagtgaagcgaaaggctctggttttcaaccgtcccatggaagtgggagatgctacatggcaagtgttgagggagcttgaggttttgctggaccagtctcaaaggaggagatacggtggatcctggagggcgtgagaaaccagaaaagatcagttttgtataatctgttgcagctgtgcagttgacattgagtctgaggcttgagcctgagatccaccggaaactcaggttattgttctcatgccagagatcccaatctcagttagtcaatgggaatatgggatgctagctcaacctttattggcttgttgcccggttagtgcctaactagagatcccgctcttgtacgtatagagaaattttatttgttctttggagaactggtgggatgagtttgattttctagccatagaaagaaatgtattacaggctgcagcatattagtgtatatttctttttcctggttgcacacttgtatagttatttatatgtccgaaccttggacttaaataggaggaatgcttagaaaagagttatttatatgtccgaactttgactttagacttttattggattttaactctagcatatccaactcttttgggcatgcatatggtaggtcatgcctggagagttggctttgtcggagccgaattaaatcaaaatcaaactgatgcgctcattgctgcatgcgtggatttttctatagcttgtttctgcacatgcc

SEQ ID NO: 81922 - DNA, 3349 bp, Zea Mays
aaaaatcttcgtaaaaaggtcaaaaggcaacaacaaaaaaggtcaaaaagcgaaaaaagatggcgacaaacgccaagaataacaaaagtataaccaactcaagtcgttcaactagtgacataagatacaataaccatatgtgatgcggtagtatctctctaatctcatgtaaataatgagctaaaagatggaagtgaatagaatgtgtttctctatcattaataggtcttcacgagagcatagagtgcaacgatatcagtcaaggccaaccagatggtatatctatttatacatctgcattggaatctaactgttacgtctgaaattggagaccacagacgtaaaaggatgtgaggataagaaggaccgacgcggatgcgatgaaaagtcagagagtcgggtgtgccgccgaacgcgtcacacacgtctctgtccataggaggcttcgttccgtcgctggctgacccttccgggaaccgggaccaggagatgcagagtggagtggtggaaggaggaggagaattcgatcagctgcccctaattttgtcggcggcgtcaattattgctcttttccaagaaaaaaagaagaagaagaagaaggaaagtacctttcggtaatggtggttccttccgacagcaggagttggggtccaaagcgctagctatattaaaatcagcgcagcgagccttcccttcccttcccttcccttccttccatcgcacgcggcacgcgtcttggtcttcgtcttcgtcctcgtcttctcccccaccccacggtccacgcctacctccttagtgcttggttggtatacataccaccatcagcacctcgctcttctgctcagctctccccctctagcctcacctgccctatacacagccactactgtcgatcgattgaatttgaacccaccaggatcaggattaggattacagcatgtcggcgtccccggagttgtacaggcccgcggaagcgccggccttctcgccgtcctgcgccacgcagccgctcgtgttcgccggcgacgactactgctgcaggacgccgacgggcagcgggatctgctacctgagggagcccaccacgtgcccgcccgcgccccggaagccgccgccgccgccgcccatgtgcaggaagcgcctcttccaagcggcggatcagcagcttgctgaggcgggccccgtccctgttatcagcatccgcctcgacgagctggagcgcctcttccgcccctgtccgccgccgaccaccaccaccaccgacaagcggcgccgctccggctccggccccagccccagatccgccacgaaacatggtgctcagctgcagctgcgcagcatgaattgaattgggttagcgtaacgtagcttgcacgcaccaaccaaccactccctttttagtttttgctgctgcatctgtctgcttcttgttgctgcaacaagcaaagcgcaagcggtggcgcttctttttatttatttatttatttattacggagtacttgcttccgttctcaaatatttgtcatttgatagttcatttcaaaaatttgacaaataaaaaagaacgacgaagcaagcagtacccacctgtgtaaatcaaatcaaatatgcaaagttaccgccatagcaataaaatcacccgtgtaaatcagatcaaaaataccaagttgttgtggtattacaaattgtggctttgaatgtgaatcgtctcgttatgcctttctcgaagaaacagacatccactatgttttttcagacaacaggctttctcaggtcagagcagcccccatttagaggagctcgcttcgtaccctgctggcaccgcctccagcaccaagttccagccgctgttcacgctagccaaccacttcttcgcgctgttctcccagtcgtgtgtcccgccggttcgattcctggtttggtttgattgcgcagtgttccaatttgatccgagttctgttattttttgtgtttcttccagcgaagacactcgacatcgaagctgaaggagagcaagtgggagaggcgccgtggggcaaggaggatgtagccatcgccgatggtataccggagttcctgaagaggtccatcctgctacagacatttggtgtacagggccatcacacatgtcaggaggtggagcatgtcgtgatcccacctcatgtgccgccggaggtggagcatgaactaccagagccagagaaggctcaaagagacatatttgccttctttcgaggcaaaatggaggtgcaccccaagaatattagtggccgcttctacagcaagaaggtgaggactgagcttctacaacattatggtcgcaaccgcaagttctaccttaagagaaagcggttcgacaactaccgatcagagatggctcggtcattgttctgtctatgtccgctgggatgggcgccttggagtcctcggctcgtggagtcagtcctcctaggctgcattcctgttataattgctgataacatacgtatgccgttcccttcagtcctccagtggccggagatctcattgcaggtggctgagaaggacgtagccaaccttgaggtggtgcttgaccatgttgtggcaaccaatttgagtgtgatacagaagaatctgtgggatccagtgaagcgaaaggctctggttttcaaccgtcccatggaagtgggagatgctacatggcaagtgttgagggagcttgaggttttgctggaccagtctcaaaggaggagatacggtggatcctggagggcgtgagaaaccagaaaagatcagttttgtataatctgttgcagctgtgcagttgacattgagtctgaggcttgagcctgagatccaccggaaactcaggttattgttctcatgccagagatcccaatctcagttagtcaatgggaatatgggatgctagctcaacctttattggcttgttgcccggttagtgcctaactagagatcccgctcttgtacgtatagagaaattttatttgttctttggagaactggtgggatgagtttgattttctagccatagaaagaaatgtattacaggctgcagcatattagtgtatatttctttttcctggttgcacacttgtatagttatttatatgtccgaaccttggacttaaataggaggaatgcttagaaaagagttatttatatgtccgaactttgactttagacttttattggattttaactctagcatatccaactcttttgggcatgcatatggtaggtcatgcctggagagttggctttgtcggagccgaattaaatcaaaatcaaactgatgcgctcattgctgcatgcgtggatttttctatagcttgtttctgcacatgcc

SEQ ID NO: 81923 - DNA, 2732 bp, Zea Mays
aattattgctcttttccaagaaaaaaagaagaagaagaagaaggaaagtacctttcggtaatggtggttccttccgacagcaggagttggggtccaaagcgctagctatattaaaatcagcgcagcgagccttcccttcccttcccttcccttccttccatcgcacgcggcacgcgtcttggtcttcgtcttcgtcctcgtcttctcccccaccccacggtccacgcctacctccttagtgcttggttggtatacataccaccatcagcacctcgctcttctgctcagctctccccctctagcctcacctgccctatacacagccactactgtcgatcgattgaatttgaacccaccaggatcaggattaggattacagcatgtcggcgtccccggagttgtacaggcccgcggaagcgccggccttctcgccgtcctgcgccacgcagccgctcgtgttcgccggcgacgactactgctgcaggacgccgacgggcagcgggatctgctacctgagggagcccaccacgtgcccgcccgcgccccggaagccgccgccgccgccgcccatgtgcaggaagcgcctcttccaagcggcggatcagcagcttgctgaggcgggccccgtccctgttatcagcatccgcctcgacgagctggagcgcctcttccgcccctgtccgccgccgaccaccaccaccaccgacaagcggcgccgctccggctccggccccagccccagatccgccacgaaacatggtgctcagctgcagctgcgcagcatgaattgaattgggttagcgtaacgtagcttgcacgcaccaaccaaccactccctttttagtttttgctgctgcatctgtctgcttcttgttgctgcaacaagcaaagcgcaagcggtggcgcttctttttatttatttatttatttattacggagtacttgcttccgttctcaaatatttgtcatttgatagttcatttcaaaaatttgacaaataaaaaagaacgacgaagcaagcagtacccacctgtgtaaatcaaatcaaatatgcaaagttaccgccatagcaataaaatcacccgtgtaaatcagatcaaaaataccaagttgttgtggtattacaaattgtggctttgaatgtgaatcgtctcgttatgcctttctcgaagaaacagacatccactatgttttttcagacaacaggctttctcaggtcagagcagcccccatttagaggagctcgcttcgtaccctgctggcaccgcctccagcaccaagttccagccgctgttcacgctagccaaccacttcttcgcgctgttctcccagtcgtgtgtcccgccggttcgattcctggtttggtttgattgcgcagtgttccaatttgatccgagttctgttattttttgtgtttcttccagcgaagacactcgacatcgaagctgaaggagagcaagtgggagaggcgccgtggggcaagacatttggtgtacagggccatcacacatgtcaggaggtggagcatgtcgtgatcccacctcatgtgccgccggaggtggagcatgaactaccagagccagagaaggctcaaagagacatatttgccttctttcgaggcaaaatggaggtgcaccccaagaatattagtggccgcttctacagcaagaaggtgaggactgagcttctacaacattatggtcgcaaccgcaagttctaccttaagagaaagcggttcgacaactaccgatcagagatggctcggtcattgttctgtctatgtccgctgggatgggcgccttggagtcctcggctcgtggagtcagtcctcctaggctgcattcctgttataattgctgataacatacgtatgccgttcccttcagtcctccagtggccggagatctcattgcaggtggctgagaaggacgtagccaaccttgaggtggtgcttgaccatgttgtggcaaccaatttgagtgtgatacagaagaatctgtgggatccagtgaagcgaaaggctctggttttcaaccgtcccatggaagtgggagatgctacatggcaagtgttgagggagcttgaggttttgctggaccagtctcaaaggaggagatacggtggatcctggagggcgtgagaaaccagaaaagatcagttttgtataatctgttgcagctgtgcagttgacattgagtctgaggcttgagcctgagatccaccggaaactcaggttattgttctcatgccagagatcccaatctcagttagtcaatgggaatatgggatgctagctcaacctttattggcttgttgcccggttagtgcctaactagagatcccgctcttgtacgtatagagaaattttatttgttctttggagaactggtgggatgagtttgattttctagccatagaaagaaatgtattacaggctgcagcatattagtgtatatttctttttcctggttgcacacttgtatagttatttatatgtccgaaccttggacttaaataggaggaatgcttagaaaagagttatttatatgtccgaactttgactttagacttttattggattttaactctagcatatccaactcttttgggcatgcatatggtaggtcatgcctggagagttggctttgtcggagccgaattaaatcaaaatcaaactgatgcgctcattgctgcatgcgtggatttttctatagcttgtttctgcacatgcc

SEQ ID NO: 81924 - DNA, 1375 bp, Zea Mays
cagtagtgattatgttcatttaattcttgccaatttgagcttaggtcatctgatttcccaccctaggaggatgtagccatcgccgatggtataccggagttcctgaagaggtccatcctgctacagacatttggtgtacagggccatcacacatgtcaggaggtggagcatgtcgtgatcccacctcatgtgccgccggaggtggagcatgaactaccagagccagagaaggctcaaagagacatatttgccttctttcgaggcaaaatggaggtgcaccccaagaatattagtggccgcttctacagcaagaaggtgaggactgagcttctacaacattatggtcgcaaccgcaagttctaccttaagagaaagcggttcgacaactaccgatcagagatggctcggtcattgttctgtctatgtccgctgggatgggcgccttggagtcctcggctcgtggagtcagtcctcctaggctgcattcctgttataattgctgataacatacgtatgccgttcccttcagtcctccagtggccggagatctcattgcaggtggctgagaaggacgtagccaaccttgaggtggtgcttgaccatgttgtggcaaccaatttgagtgtgatacagaagaatctgtgggatccagtgaagcgaaaggctctggttttcaaccgtcccatggaagtgggagatgctacatggcaagtgttgagggagcttgaggttttgctggaccagtctcaaaggaggagatacggtggatcctggagggcgtgagaaaccagaaaagatcagttttgtataatctgttgcagctgtgcagttgacattgagtctgaggcttgagcctgagatccaccggaaactcaggttattgttctcatgccagagatcccaatctcagttagtcaatgggaatatgggatgctagctcaacctttattggcttgttgcccggttagtgcctaactagagatcccgctcttgtacgtatagagaaattttatttgttctttggagaactggtgggatgagtttgattttctagccatagaaagaaatgtattacaggctgcagcatattagtgtatatttctttttcctggttgcacacttgtatagttatttatatgtccgaaccttggacttaaataggaggaatgcttagaaaagagttatttatatgtccgaactttgactttagacttttattggattttaactctagcatatccaactcttttgggcatgcatatggtaggtcatgcctggagagttggctttgtcggagccgaattaaatcaaaatcaaactgatgcgctcattgctgcatgcgtggatttttctatagcttgtttctgcacatgcc

SEQ ID NO: 81925 - DNA, 1943 bp, Zea Mays
tgattttttttcccaagttcattgcaaaactgtccaggcccaggagcccatgaagaaagaagaggcccactaacgaaacggggtaagtatatcatatctttatcggataggacacccccatctcaacgcaaacccaactgtcttggttgcgcaagcaccaagcaggtggaagatgatggaggtggcgggggctcaggcccgcgcggttcccctcctgctccgcaacaccgcctccctgcggacctccgtctccgtctcctgcacgggctcccgccggagctgggtggcggcggccacggcggagggggacgagacccgcggcttcgacaaggtgcccatggacacccccggcgcgtaccgcctggtagaccgggacaccggccgcagcgtcatcgtgtggggcggcaccgacgacagcgacgaggcctccatgccgtccccggcggtgctctcccggaccaccgaccgccgccacagccaaggtgttgggggaggtacaggtatcgggaatttcggcaggttcaaggcacagaaaataaaatccttggtcacgaggtcagctcaccgcaagagggagagttctaatcgctcaagcactgcctggtctgatgaatcttctttcaatggctctgatgatgaagaggaaagctattttgagagaagaaagcatgtctcagactctgaacgccacccgaagatgagcagtggctccagagatggaagaactcgaagtgcacattctctgagttctgttttgagccaatacagaggcgatgatgatacagacttccctggttcagaggctacttctggttccaaacgatggggtaatgttgccgatgttacttatggacggcagaatcagaagcaaagggagcctctgaatttccctcaaagaaaagggcctctggacggcggatttttcagtcgcagatctttcaaggagattggctgcagcgatgaaatgctaggtgcgttgagaaattttgatttccctcgtccgtctcatatccaggctatggcatatgggcctatcttagaggggaggagttgtgttgttgctgatcaaagtgggtctggcaagacactggcatatctttgccctataatacaaaacttaaggaacgaagaagttcaagggctccataaatcatcccctaggaaccccagggtgatagtattgacccctactgctgaacttgcttctcaggtccttaacaactgccggttgatatcaaaatctggggttccatttaggtctatggttgcaaccggaggatttcgacaaaagactcagttagagagccttgaccaagagctcgatgtaattatagcaacacctggccgtttcttgtatctgcttcaagaaggctttgtgcaactagctaacctcagatgtgttgtgttggatgaagtggacattttatttggtgaagaaggtttcgagcaagtgcttcatcagttgatcaccgtggcaccagtgacaacgcagtatcttttcgtgactgccactcttcctcttgacatctataacaaggtcgttgaaacctttcctgactgtgaggtgatcatgggacccggtgtccaccgaacaagctctcgccttgaagagatccttgtggactgcagcggagatgacaacgaagaaaagaatccagaaaccgccttttcgaacaagaaaacagcgcttttgaagattatcgaggagtctcctgtccgcaaaacaattgttttctgcaacaagattgagacatgtagaaaagttgagaatgcgctgaggcgggtggacaggaaggcctcgcagatcaaagttctccccttccatgctgcgctggatcaggcccagcgcatcgcaaacatcaaggagttcctgaacaagcaaacggctgactccatgttccttgtgtgcacagatagcgctgatgctaccatttgagtttgac

SEQ ID NO: 81926 - DNA, 1762 bp, Zea Mays
atctcaacgcaaacccaactgtcttggttgcgcaagcaccaagcaggtggaagatgatggaggtggcgggggctcaggcccgcgcggttcccctcctgctccgcaacaccgcctccctgcggacctccgtctccgtctcctgcacgggctcccgccggagctgggtggcggcggccacggcggagggggacgagacccgcggcttcgacaaggtgcccatggacacccccggcgcgtaccgcctggtagaccgggacaccggccgcagcgtcatcgtgtggggcggcaccgacgacagcgacgaggcctccatgccgtccccggcggtgctctcccggaccaccgaccgccgccacagccaaggtatcgggaatttcggcaggttcaaggcacagaaaataaaatccttggtcacgaggtcagctcaccgcaagagggagagttctaatcgctcaagcactgcctggtctgatgaatcttctttcaatggctctgatgatgaagaggaaagctattttgagagaagaaagcatgtctcagactctgaacgccacccgaagatgagcagtggctccagagatggaagaactcgaagtgcacattctctgagttctgttttgagccaatacagaggcgatgatgatacagacttccctggttcagaggctacttctggttccaaacgatggggtaatgttgccgatgttacttatggacggcagaatcagaagcaaagggagcctctgaatttccctcaaagaaaagggcctctggacggcggatttttcagtcgcagatctttcaaggagattggctgcagcgatgaaatgctaggctatggcatatgggcctatcttagaggggaggagttgtgttgttgctgatcaaagtgggtctggcaagacactggcatatctttgccctataatacaaaacttaaggaacgaagaagttcaagggctccataaatcatcccctaggaaccccagggtgatagtattgacccctactgctgaacttgcttctcaggtccttaacaactgccggttgatatcaaaatctggggttccatttaggtctatggttgcaaccggaggatttcgacaaaagactcagttagagagccttgaccaagagctcgatgtaattatagcaacacctggccgtttcttgtatctgcttcaagaaggctttgtgcaactagctaacctcagatgtgttgtgttggatgaagtggacattttatttggtgaagaaggtttcgagcaagtgcttcatcagttgatcaccgtggcaccagtgacaacgcagtatcttttcgtgactgccactcttcctcttgacatctataacaaggtcgttgaaacctttcctgactgtgaggtgatcatgggacccggtgtccaccgaacaagctctcgccttgaagagatccttgtggactgcagcggagatgacaacgaagaaaagaatccagaaaccgccttttcgaacaagaaaacagcgcttttgaagattatcgaggagtctcctgtccgcaaaacaattgttttctgcaacaagattgagacatgtagaaaagttgagaatgcgctgaggcgggtggacaggaaggcctcgcagatcaaagttctccccttccatgctgcgctggatcaggcccagcgcatcgcaaacatcaaggagttcctgaacaagcaaacggctgactccatgttccttgtgtgcacagatagcgctgatgctaccatttgagtttgac

SEQ ID NO: 81927 - DNA, 1806 bp, Zea Mays
atctcaacgcaaacccaactgtcttggttgcgcaagcaccaagcaggtggaagatgatggaggtggcgggggctcaggcccgcgcggttcccctcctgctccgcaacaccgcctccctgcggacctccgtctccgtctcctgcacgggctcccgccggagctgggtggcggcggccacggcggagggggacgagacccgcggcttcgacaaggtgcccatggacacccccggcgcgtaccgcctggtagaccgggacaccggccgcagcgtcatcgtgtggggcggcaccgacgacagcgacgaggcctccatgccgtccccggcggtgctctcccggaccaccgaccgccgccacagccaaggtatcgggaatttcggcaggttcaaggcacagaaaataaaatccttggtcacgaggtcagctcaccgcaagagggagagttctaatcgctcaagcactgcctggtctgatgaatcttctttcaatggctctgatgatgaagaggaaagctattttgagagaagaaagcatgtctcagactctgaacgccacccgaagatgagcagtggctccagagatggaagaactcgaagtgcacattctctgagttctgttttgagccaatacagaggcgatgatgatacagacttccctggttcagaggctacttctggttccaaacgatggggtaatgttgccgatgttacttatggacggcagaatcagaagcaaagggagcctctgaatttccctcaaagaaaagggcctctggacggcggatttttcagtcgcagatctttcaaggagattggctgcagcgatgaaatgctaggtgcgttgagaaattttgatttccctcgtccgtctcatatccaggctatggcatatgggcctatcttagaggggaggagttgtgttgttgctgatcaaagtgggtctggcaagacactggcatatctttgccctataatacaaaacttaaggaacgaagaagttcaagggctccataaatcatcccctaggaaccccagggtgatagtattgacccctactgctgaacttgcttctcaggtccttaacaactgccggttgatatcaaaatctggggttccatttaggtctatggttgcaaccggaggatttcgacaaaagactcagttagagagccttgaccaagagctcgatgtaattatagcaacacctggccgtttcttgtatctgcttcaagaaggctttgtgcaactagctaacctcagatgtgttgtgttggatgaagtggacattttatttggtgaagaaggtttcgagcaagtgcttcatcagttgatcaccgtggcaccagtgacaacgcagtatcttttcgtgactgccactcttcctcttgacatctataacaaggtcgttgaaacctttcctgactgtgaggtgatcatgggacccggtgtccaccgaacaagctctcgccttgaagagatccttgtggactgcagcggagatgacaacgaagaaaagaatccagaaaccgccttttcgaacaagaaaacagcgcttttgaagattatcgaggagtctcctgtccgcaaaacaattgttttctgcaacaagattgagacatgtagaaaagttgagaatgcgctgaggcgggtggacaggaaggcctcgcagatcaaagttctccccttccatgctgcgctggatcaggcccagcgcatcgcaaacatcaaggagttcctgaacaagcaaacggctgactccatgttccttgtgtgcacagatagcgctgatgctaccatttgagtttgac

SEQ ID NO: 81928 - DNA, 2109 bp, Zea Mays
caaggatttcactttttctaatgtcagtcttcatgtcccagtttccaacatacccatatgttgaaaacaacagcatcccatgaaacttttatcgcctctcttttcatcagtgcaacactgcaatacatgtgttgggggaggtacaggtatcgggaatttcggcaggttcaaggcacagaaaataaaatccttggtcacgaggtcagctcaccgcaagagggagagttctaatcgctcaagcactgcctggtctgatgaatcttctttcaatggctctgatgatgaagaggaaagctattttgagagaagaaagcatgtctcagactctgaacgccacccgaagatgagcagtggctccagagatggaagaactcgaagtgcacattctctgagttctgttttgagccaatacagaggcgatgatgatacagacttccctggttcagaggctacttctggttccaaacgatggggtaatgttgccgatgttacttatggacggcagaatcagaagcaaagggagcctctgaatttccctcaaagaaaagggcctctggacggcggatttttcagtcgcagatctttcaaggagattggctgcagcgatgaaatgctaggtgcgttgagaaattttgatttccctcgtccgtctcatatccaggctatggcatatgggcctatcttagaggggaggagttgtgttgttgctgatcaaagtgggtctggcaagacactggcatatctttgccctataatacaaaacttaaggaacgaagaagttcaagggctccataaatcatcccctaggaaccccagggtgatagtattgacccctactgctgaacttgcttctcaggtccttaacaactgccggttgatatcaaaatctggggttccatttaggtctatggttgcaaccggaggatttcgacaaaagactcagttagagagccttgaccaagagctcgatgtaattatagcaacacctggccgtttcttgtatctgcttcaagaaggctttgtgcaactagctaacctcagatgagctcgttctgtttgcagtgttgtgttggatgaagtggacattttatttggtgaagaaggtttcgagcaagtgcttcatcagttgatcaccgtggcaccagtgacaacgcagtatcttttcgtgactgccactcttcctcttgacatctataacaaggtcgttgaaacctttcctgactgtgaggtgatcatgggacccggtgtccaccgaacaagctctcgccttgaagagatccttgtggactgcagcggagatgacaacgaagaaaagaatccagaaaccgccttttcgaacaagaaaacagcgcttttgaagattatcgaggagtctcctgtccgcaaaacaattgttttctgcaacaagattgagacatgtagaaaagttgagaatgcgctgaggcgggtggacaggaaggcctcgcagatcaaagttctccccttccatgctgcgctggatcaggcccagcgcatcgcaaacatcaaggagttcctgaacaagcaaacggctgactccatgttccttgtgtgcacagatagggcgtcgcggggcatcgactttgcgaacgtgaaccacgtggtgctcttcgactacccccgcgacccgagcgagtacgtgcggcgcgtcgggcggactgcccgcggcgcgtccggcaacggcaaggcgttcgtgttcgcggtgggcaagcaggtgtccctggccaggagggtgatggagaggaacatgaaggggcacccgctgcacgacgtgccgtgcgtctagagaccctggagggggaggtgtctgatgcgtgcaattgctgcctaaactctaagcatgttttttgtttcggaacgttgtgggtcatctatcctatccctcgcttgactcttctcggaaaaggttctcgttcccatgaatcttgatctgcctcctggtattgatagcgattgatcgaattcctactctggtttgagaagcttttcagttttccttatctcttcctgactgaaaagaattcaaaatacgtatatttggtactaaataaaccgccttcgctggctaatcggtcaggtcggagccgatct

SEQ ID NO: 81929 - DNA, 765 bp, Zea Mays
gcccagcatcggccgaactggtctatcggcgccgcccttcacgccgagagttccctctttctcgcttgctcactcgcgtcgacgactgggctaccggcgcctccaccctccgcctggtgtccttcgccgtcgacgagcgcacaccagtacgtattgctcgtgatttgtgtaactacggagcaagctgcatacagcacaagatagaagatgggtatccttgagaggatcaaggagattgaggccgagatggctcggactcagaaaaataaagcaacagaatatcatcttggacaactgaaggcaaaactagcaaagttgaggacacaactattagagcctccaaaggtaccaatggggttgtgaaaccacatcagcaattcagaatcttgaaattcatttgcttattcccatgggttccagcggaggtggagatggttttgaagtcacaaagtttgggcatggtcgtgttgcacttattggatttcccagtgttggaaagtcaactcttttaacgatgttgactgggacacattctgaagctgcatcatatgagttcacaacgcttacttgcattcctggaattgttcattacaatgataccaaaatccagcttcttgatcttcctggtatcattgaaggagcttctgaaggcaaggggcgtggtaggcaggttattgctgttgcaaagtcatcagatcttgtgctgatggttctggatgcctcaaagatgaggaaatcttcttttattatcaacaaatcggagaa

SEQ ID NO: 81930 - DNA, 2755 bp, Zea Mays
aaatcttgaaattttttaacgatagtttacgtgggtattgttgtaagccgtcgcaacgcacgggcaaccgactagtaattttaaaaaggccagttatgtggatacactcgtaaaaaaaaactccagtccggagttcccactctccagacaagcagacaagcagtcacgagtcacgactcacagcaactgaaaactaaagaaaccgctggcggacgcccaccaaaccaaaaaaaaaaacaaaaaacaaaaaaccaaaaaaccccacgcctttcctcgccggcgaaggagaagccgcagcgctgctcccacgccccctaggagcgcgtgcctccattccatgtgcgcccgcccaccggaggataacctttgatcatttcgtttgctggacattggatcaactggtgctgttatacatagaaaggatttcattttaaattctcatctatatttggtggtgccataatcatttttccactagcgtttggcaataatgtcggagagcgagttagcagtaataaaaccagaggtgttgaagacatatatctggcttcagtgctttgatggttccatacaacaagtggaggaggaggttgcaatgttctgccccatgatatgtcaggaaattgtgaaaaatggcacagggtcatcaaaaaatcatgctattgctctcccggaaagagttaatccagccaatttgagtttgattcttgactactgtcgatttcatcagatcactgggcgttcaaacatggagcggaagtcctttgatgaaaagtttgttaggatagaaacagaaagactctgcgaattgacttctgcagccgacagtctacagttaaagccacttgttgatcttactggccgagcgcttgctcgaatcattgaaggaaagacacctgaggaaattcgtgacattttccatttaccagatgatttaacagaggaagagaaattggagcccctaaaaaatataaatgatggtcctgctaggattcgcctactgaaccggttgtatgccaagaagcggaaagagctccaggagcgccataagctgaaggatgttcaagtacagaaagagcaaaaagatgagagatctttggatgagttacttagttttattaatggggatggaggttcaggaggcaggaaagctaccaagagtaagaaaaagaataaaaggaaggatcatgttgagaaccccccaaaagctgactctgagcctgtaaatgcgaatccagatatgcaagatgatgccgagtacccttttgaagatgctgacctcgatgatggacttgatcctgcaatgaaagaagagcttgatagagaagttgaggcctttgcgaagaggttggattcagtttggaaggagtcacatattggtggtaatggttctgcacggagatttcctgggtttaatcacatgtgagtgttaagctggtaggatcagaaggcagaagcagaggagatttgtggacatacagcctggaagagagtaaaaataccaaacagtcgacttgctcctgtgtgtttgataagggcatgtacaaccctgaaatcatggatcggttttgcgaagtacaaaagacatgttaagagactgtataccctgagcctttggatcataaatgtaagtaagaggcaatgtgtgtagaattgtgtagagacagtctcttcgcggaaagagagcctgtctattgtatttttttcaattaaccctcaagagacttcatattgaaagaggttatacatgtcagagccaagcatgcagacatgctattttgttggggaggaggctgcctagttgggatgaagcttagcatggttcaaggaaaaagtgtagttttttttctttggaaagggaggattagaggtctgtcttgtctgtgttgccagggaggaggctgcctagttgggatgaagcttataatgcagtatatagtgtaaaacagtgttttgaatgactatatggctgaactgttggacacagtttgtatcaatgaaatttcgttgattcactgtattgtggtggtgcacataaaaaatgtcctttttttggctgaccttacgtgggttggaatatactataagcacgtgttcttatttataattaagttaaacaacattttatcgtatatatcaataataatagaattggatagatgaatgatagaagttaatttaataggtatttacatgtaaaatgttatagaaaacaaatgaaacattatcatttagaaataatcaaaaaggttttgatgggataaaaaataatgatcagcggacagtaggtagaatatacctaaagtcaatcattgagtgcaacaacaatcttaaacgacacttttccccaagggcatctaaactggacatgttgggaaacctaacctataagcaactaatgtcaaaaacacaaaatctaacaaaaaaagttgtagcgggtcaatggagggcaaggtgtattatcctcacatttatgacattgtcggttgatgtgtcaaacatataaccattgttcaactgtcaaatttcagcagctctcccagtagagcacactaagtatcattccacaagttgagagattcacataagtaatgaggatatatttgctaagatgaagaaaatctggtactccatgctactgatggtcaattaagaaaaatgaacactgaggtgtaaactttaaaaaattaccatccatgcatgagaggtcgagattcatgatgcttctgcaatttacctgatcaagctacaattt

SEQ ID NO: 81931 - DNA, 2513 bp, Zea Mays
agacaagcagacaagcagtcacgagtcacgactcacagcaactgaaaactaaagaaaccgctggcggacgcccaccaaaccaaaaaaaaaaacaaaaaacaaaaaaccaaaaaaccccacgcctttcctcgccggcgaaggagaagccgcagcgctgctcccacgccccctaggagcgcgtgcctccattccatgtgcgcccgcccaccggaggataacctttgatcatttcgtttgctggacattggatcaactggtgctgttatacatagaaaggatttcattttaaattctcatctatatttggtggtgccataatcatttttccactagcgtttggcaataatgtcggagagcgagttagcagtaataaaaccagaggtgttgaagacatatatctggcttcagtgctttgatggttccatacaacaagtggaggaggaggttgcaatgttctgccccatgatatgtcaggaaattgtgaaaaatggcacagggtcatcaaaaaatcatgctattgctctcccggaaagagttaatccagccaatttgagtttgattcttgactactgtcgatttcatcagatcactgggcgttcaaacatggagcggaagtcctttgatgaaaagtttgttaggatagaaacagaaagactctgcgaattgacttctgcagccgacagtctacagttaaagccacttgttgatcttactggccgagcgcttgctcgaatcattgaaggaaagacacctgaggaaattcgtgacattttccatttaccagatgatttaacagaggaagagaaattggagcccctaaaaaatataaatgatggtcctgctaggattcgcctactgaaccggttgtatgccaagaagcggaaagagctccaggagcgccataagctgaaggatgttcaagtacagaaagagcaaaaagatgagagatctttggatgagttacttagttttattaatggggatggaggtatagctacagttcaggaggcaggaaagctaccaagagtaagaaaaagaataaaaggaaggatcatgttgagaaccccccaaaagctgactctgagcctgtaaatgcgaatccagatatgcaagatgatgccgagtacccttttgaagatgctgacctcgatgatggacttgatcctgcaatgaaagaagagcttgatagagaagttgaggcctttgcgaagaggttggattcagtttggaaggagtcacatattggtggtaatggttctgcacggagatttcctgggtttaatcacatgtgagtgttaagctggtaggatcagaaggcagaagcagaggagatttgtggacatacagcctggaagagagtaaaaataccaaacagtcgacttgctcctgtgtgtttgataagggcatgtacaaccctgaaatcatggatcggttttgcgaagtacaaaagacatgttaagagactgtataccctgagcctttggatcataaatgtaagtaagaggcaatgtgtgtagaattgtgtagagacagtctcttcgcggaaagagagcctgtctattgtatttttttcaattaaccctcaagagacttcatattgaaagaggttatacatgtcagagccaagcatgcagacatgctattttgttggggaggaggctgcctagttgggatgaagcttataatgcagtatatagtgtaaaacagtgttttgaatgactatatggctgaactgttggacacagtttgtatcaatgaaatttcgttgattcactgtattgtggtggtgcacataaaaaatgtcctttttttggctgaccttacgtgggttggaatatactataagcacgtgttcttatttataattaagttaaacaacattttatcgtatatatcaataataatagaattggatagatgaatgatagaagttaatttaataggtatttacatgtaaaatgttatagaaaacaaatgaaacattatcatttagaaataatcaaaaaggttttgatgggataaaaaataatgatcagcggacagtaggtagaatatacctaaagtcaatcattgagtgcaacaacaatcttaaacgacacttttccccaagggcatctaaactggacatgttgggaaacctaacctataagcaactaatgtcaaaaacacaaaatctaacaaaaaaagttgtagcgggtcaatggagggcaaggtgtattatcctcacatttatgacattgtcggttgatgtgtcaaacatataaccattgttcaactgtcaaatttcagcagctctcccagtagagcacactaagtatcattccacaagttgagagattcacataagtaatgaggatatatttgctaagatgaagaaaatctggtactccatgctactgatggtcaattaagaaaaatgaacactgaggtgtaaactttaaaaaattaccatccatgcatgagaggtcgagattcatgatgcttctgcaatttacctgatcaagctacaattt

SEQ ID NO: 81932 - DNA, 2620 bp, Zea Mays
gacaagcagtcacgagtcacgactcacagcaactgaaaactaaagaaaccgctggcggacgcccaccaaaccaaaaaaaaaaacaaaaaacaaaaaaccaaaaaaccccacgcctttcctcgccggcgaaggagaagccgcagcgctgctcccacgccccctaggagcgcgtgcctccattccatgtgcgcccgcccaccggaggataacctttgatcatttcgtttgctggacattggatcaactggtgctgttatacatagaaaggatttcattttaaattctcatctatatttggtggtgccataatcatttttccactagcgtttggcaataatgtcggagagcgagttagcagtaataaaaccagaggtgttgaagacatatatctggcttcagtgctttgatggttccatacaacaagtggaggaggaggttgcaatgttctgccccatgatatgtcaggaaattgtgaaaaatggcacagggtcatcaaaaaatcatgctattgctctcccggaaagagttaatccagccaatttgagtttgattcttgactactgtcgatttcatcagatcactgggcgttcaaacatggagcggaagtcctttgatgaaaagtttgttaggatagaaacagaaagactctgcgaattgacttctgcagccgacagtctacagttaaagccacttgttgatcttactggccgagcgcttgctcgaatcattgaaggaaagacacctgaggaaattcgtgacattttccatttaccagatgatttaacagaggaagagaaattggagcccctaaaaaatataaatgatggtcctgctaggattcgcctactgaaccggttgtatgccaagaagcggaaagagctccaggagcgccataagctgaaggatgttcaagtacagaaagagcaaaaagatgagagatctttggatgagttacttagttttattaatggggatggaggttcaggaggcaggaaagctaccaagagtaagaaaaagaataaaaggaaggatcatgttgagaaccccccaaaagctgactctgagcctgtaaatgcgaatccagatatgcaagatgatgccgagtacccttttgaagatgctgacctcgatgatggacttgatcctgcaatgaaagaagagcttgataggtttgtttttaacatgcagagaagttgaggcctttgcgaagaggttggattcagtttggaaggagtcacatattggtggtaatggttctgcacggagatttcctgggtttaatcacatgtgagtgttaagctggtaggatcagaaggcagaagcagaggagatttgtggacatacagcctggaagagagtaaaaataccaaacagtcgacttgctcctgtgtgtttgataagggcatgtacaaccctgaaatcatggatcggttttgcgaagtacaaaagacatgttaagagactgtataccctgagcctttggatcataaatgtaagtaagaggcaatgtgtgtagaattgtgtagagacagtctcttcgcggaaagagagcctgtctattgtatttttttcaattaaccctcaagagacttcatattgaaagaggttatacatgtcagagccaagcatgcagacatgctattttgttggggaggaggctgcctagttgggatgaagcttagcatggttcaaggaaaaagtgtagttttttttctttggaaagggaggattagaggtctgtcttgtctgtgttgccagggaggaggctgcctagttgggatgaagcttataatgcagtatatagtgtaaaacagtgttttgaatgactatatggctgaactgttggacacagtttgtatcaatgaaatttcgttgattcactgtattgtggtggtgcacataaaaaatgtcctttttttggctgaccttacgtgggttggaatatactataagcacgtgttcttatttataattaagttaaacaacattttatcgtatatatcaataataatagaattggatagatgaatgatagaagttaatttaataggtatttacatgtaaaatgttatagaaaacaaatgaaacattatcatttagaaataatcaaaaaggttttgatgggataaaaaataatgatcagcggacagtaggtagaatatacctaaagtcaatcattgagtgcaacaacaatcttaaacgacacttttccccaagggcatctaaactggacatgttgggaaacctaacctataagcaactaatgtcaaaaacacaaaatctaacaaaaaaagttgtagcgggtcaatggagggcaaggtgtattatcctcacatttatgacattgtcggttgatgtgtcaaacatataaccattgttcaactgtcaaatttcagcagctctcccagtagagcacactaagtatcattccacaagttgagagattcacataagtaatgaggatatatttgctaagatgaagaaaatctggtactccatgctactgatggtcaattaagaaaaatgaacactgaggtgtaaactttaaaaaattaccatccatgcatgagaggtcgagattcatgatgcttctgcaatttacctgatcaagctacaattt

SEQ ID NO: 81933 - DNA, 2657 bp, Zea Mays
cacgagtcacgactcacagcaactgaaaactaaagaaaccgctggcggacgcccaccaaaccaaaaaaaaaaacaaaaaacaaaaaaccaaaaaaccccacgcctttcctcgccggcgaaggagaagccgcagcgctgctcccacgccccctaggagcgcgtgcctccattccatgtgcgcccgcccaccggaggataacctttgatcatttcgtttgctggacattggatcaactggtgctgttatacatagaaaggatttcattttaaattctcatctatatttggtggtgccataatcatttttccactagcgtttggcaataatgtcggagagcgagttagcagtaataaaaccagaggtgttgaagacatatatctggcttcagtgctttgatggttccatacaacaagtggaggaggaggttgcaatgttctgccccatgatatgtcaggaaattgtgaaaaatggcacagggtcatcaaaaaatcatgctattgctctcccggaaagagttaatccagccaatttgagtttgattcttgactactgtcgatttcatcagatcactgggcgttcaaacatggagcggaagtcctttgatgaaaagtttgttaggatagaaacagaaagactctgcgaattgacttctgcagccgacagtctacagttaaagccacttgttgatcttactggccgagcgcttgctcgaatcattgaaggaaagacacctgaggaaattcgtgacattttccatttaccagatgatttaacagaggaagagaaattggagcccctaaaaaatataaatgatggtcctgctaggattcgcctactgaaccggttgtatgccaagaagcggaaagagctccaggagcgccataagctgaaggatgttcaagtacagaaagagcaaaaagatgagagatctttggatgagttacttagttttattaatggggatggaggttcaggaggcaggaaagctaccaagagtaagaaaaagaataaaaggaaggatcatgttgagaaccccccaaaagctgactctgagcctgtaaatgcggaaggagctgcttgtgtggttccgtgcaaagtcgatagaagtaatgtttctagacttccatgccagaatccagatatgcaagatgatgccgagtacccttttgaagatgctgacctcgatgatggacttgatcctgcaatgaaagaagagcttgatagagaagttgaggcctttgcgaagaggttggattcagtttggaaggagtcacatattggtggtaatggttctgcacggagatttcctgggtttaatcacatgtgagtgttaagctggtaggatcagaaggcagaagcagaggagatttgtggacatacagcctggaagagagtaaaaataccaaacagtcgacttgctcctgtgtgtttgataagggcatgtacaaccctgaaatcatggatcggttttgcgaagtacaaaagacatgttaagagactgtataccctgagcctttggatcataaatgtaagtaagaggcaatgtgtgtagaattgtgtagagacagtctcttcgcggaaagagagcctgtctattgtatttttttcaattaaccctcaagagacttcatattgaaagaggttatacatgtcagagccaagcatgcagacatgctattttgttggggaggaggctgcctagttgggatgaagcttagcatggttcaaggaaaaagtgtagttttttttctttggaaagggaggattagaggtctgtcttgtctgtgttgccagggaggaggctgcctagttgggatgaagcttataatgcagtatatagtgtaaaacagtgttttgaatgactatatggctgaactgttggacacagtttgtatcaatgaaatttcgttgattcactgtattgtggtggtgcacataaaaaatgtcctttttttggctgaccttacgtgggttggaatatactataagcacgtgttcttatttataattaagttaaacaacattttatcgtatatatcaataataatagaattggatagatgaatgatagaagttaatttaataggtatttacatgtaaaatgttatagaaaacaaatgaaacattatcatttagaaataatcaaaaaggttttgatgggataaaaaataatgatcagcggacagtaggtagaatatacctaaagtcaatcattgagtgcaacaacaatcttaaacgacacttttccccaagggcatctaaactggacatgttgggaaacctaacctataagcaactaatgtcaaaaacacaaaatctaacaaaaaaagttgtagcgggtcaatggagggcaaggtgtattatcctcacatttatgacattgtcggttgatgtgtcaaacatataaccattgttcaactgtcaaatttcagcagctctcccagtagagcacactaagtatcattccacaagttgagagattcacataagtaatgaggatatatttgctaagatgaagaaaatctggtactccatgctactgatggtcaattaagaaaaatgaacactgaggtgtaaactttaaaaaattaccatccatgcatgagaggtcgagattcatgatgcttctgcaatttacctgatcaagctacaattt

SEQ ID NO: 81934 - DNA, 2361 bp, Zea Mays
aaaaaaacaaaaaacaaaaaaccaaaaaaccccacgcctttcctcgccggcgaaggagaagccgcagcgctgctcccacgccccctaggagcgcgtgcctccattccatgtgcgcccgcccaccggaggtgttgaagacatatatctggcttcagtgctttgatggttccatacaacaagtggaggaggaggttgcaatgttctgccccatgatatgtcaggaaattgtgaaaaatggcacagggtcatcaaaaaatcatgctattgctctcccggaaagagttaatccagccaatttgagtttgattcttgactactgtcgatttcatcagatcactgggcgttcaaacatggagcggaagtcctttgatgaaaagtttgttaggatagaaacagaaagactctgcgaattgacttctgcagccgacagtctacagttaaagccacttgttgatcttactggccgagcgcttgctcgaatcattgaaggaaagacacctgaggaaattcgtgacattttccatttaccagatgatttaacagaggaagagaaattggagcccctaaaaaatataaatgatggtcctgctaggattcgcctactgaaccggttgtatgccaagaagcggaaagagctccaggagcgccataagctgaagaaagagcaaaaagatgagagatctttggatgagttacttagttttattaatggggatggaggttcaggaggcaggaaagctaccaagagtaagaaaaagaataaaaggaaggatcatgttgagaaccccccaaaagctgactctgagcctgtaaatgcgaatccagatatgcaagatgatgccgagtacccttttgaagatgctgacctcgatgatggacttgatcctgcaatgaaagaagagcttgataggtttgtttttaacatgcagagaagttgaggcctttgcgaagaggttggattcagtttggaaggagtcacatattggtggtaatggttctgcacggagatttcctgggtttaatcacatgtgagtgttaagctggtaggatcagaaggcagaagcagaggagatttgtggacatacagcctggaagagagtaaaaataccaaacagtcgacttgctcctgtgtgtttgataagggcatgtacaaccctgaaatcatggatcggttttgcgaagtacaaaagacatgttaagagactgtataccctgagcctttggatcataaatgtaagtaagaggcaatgtgtgtagaattgtgtagagacagtctcttcgcggaaagagagcctgtctattgtatttttttcaattaaccctcaagagacttcatattgaaagaggttatacatgtcagagccaagcatgcagacatgctattttgttggggaggaggctgcctagttgggatgaagcttagcatggttcaaggaaaaagtgtagttttttttctttggaaagggaggattagaggtctgtcttgtctgtgttgccagggaggaggctgcctagttgggatgaagcttataatgcagtatatagtgtaaaacagtgttttgaatgactatatggctgaactgttggacacagtttgtatcaatgaaatttcgttgattcactgtattgtggtggtgcacataaaaaatgtcctttttttggctgaccttacgtgggttggaatatactataagcacgtgttcttatttataattaagttaaacaacattttatcgtatatatcaataataatagaattggatagatgaatgatagaagttaatttaataggtatttacatgtaaaatgttatagaaaacaaatgaaacattatcatttagaaataatcaaaaaggttttgatgggataaaaaataatgatcagcggacagtaggtagaatatacctaaagtcaatcattgagtgcaacaacaatcttaaacgacacttttccccaagggcatctaaactggacatgttgggaaacctaacctataagcaactaatgtcaaaaacacaaaatctaacaaaaaaagttgtagcgggtcaatggagggcaaggtgtattatcctcacatttatgacattgtcggttgatgtgtcaaacatataaccattgttcaactgtcaaatttcagcagctctcccagtagagcacactaagtatcattccacaagttgagagattcacataagtaatgaggatatatttgctaagatgaagaaaatctggtactccatgctactgatggtcaattaagaaaaatgaacactgaggtgtaaactttaaaaaattaccatccatgcatgagaggtcgagattcatgatgcttctgcaatttacctgatcaagctacaattt

SEQ ID NO: 81935 - DNA, 2353 bp, Zea Mays
aaacaaaaaacaaaaaaccaaaaaaccccacgcctttcctcgccggcgaaggagaagccgcagcgctgctcccacgccccctaggagcgcgtgcctccattccatgtgcgcccgcccaccggaggtgttgaagacatatatctggcttcagtgctttgatggttccatacaacaagtggaggaggaggttgcaatgttctgccccatgatatgtcaggaaattgtgaaaaatggcacagggtcatcaaaaaatcatgctattgctctcccggaaagagttaatccagccaatttgagtttgattcttgactactgtcgatttcatcagatcactgggcgttcaaacatggagcggaagtcctttgatgaaaagtttgttaggatagaaacagaaagactctgcgaattgacttctgcagccgacagtctacagttaaagccacttgttgatcttactggccgagcgcttgctcgaatcattgaaggaaagacacctgaggaaattcgtgacattttccatttaccagatgatttaacagaggaagagaaattggagcccctaaaaaatataaatgatggtcctgctaggattcgcctactgaaccggttgtatgccaagaagcggaaagagctccaggagcgccataagctgaaggatgttcaagtacagaaagagcaaaaagatgagagatctttggatgagttacttagttttattaatggggatggaggttcaggaggcaggaaagctaccaagagtaagaaaaagaataaaaggaaggatcatgttgagaaccccccaaaagctgactctgagcctgtaaatgcgaatccagatatgcaagatgatgccgagtacccttttgaagatgctgacctcgatgatggacttgatcctgcaatgaaagaagagcttgatagagaagttgaggcctttgcgaagaggttggattcagtttggaaggagtcacatattggtggtaatggttctgcacggagatttcctgggtttaatcacatgtgagtgttaagctggtaggatcagaaggcagaagcagaggagatttgtggacatacagcctggaagagagtaaaaataccaaacagtcgacttgctcctgtgtgtttgataagggcatgtacaaccctgaaatcatggatcggttttgcgaagtacaaaagacatgttaagagactgtataccctgagcctttggatcataaatgtaagtaagaggcaatgtgtgtagaattgtgtagagacagtctcttcgcggaaagagagcctgtctattgtatttttttcaattaaccctcaagagacttcatattgaaagaggttatacatgtcagagccaagcatgcagacatgctattttgttggggaggaggctgcctagttgggatgaagcttagcatggttcaaggaaaaagtgtagttttttttctttggaaagggaggattagaggtctgtcttgtctgtgttgccagggaggaggctgcctagttgggatgaagcttataatgcagtatatagtgtaaaacagtgttttgaatgactatatggctgaactgttggacacagtttgtatcaatgaaatttcgttgattcactgtattgtggtggtgcacataaaaaatgtcctttttttggctgaccttacgtgggttggaatatactataagcacgtgttcttatttataattaagttaaacaacattttatcgtatatatcaataataatagaattggatagatgaatgatagaagttaatttaataggtatttacatgtaaaatgttatagaaaacaaatgaaacattatcatttagaaataatcaaaaaggttttgatgggataaaaaataatgatcagcggacagtaggtagaatatacctaaagtcaatcattgagtgcaacaacaatcttaaacgacacttttccccaagggcatctaaactggacatgttgggaaacctaacctataagcaactaatgtcaaaaacacaaaatctaacaaaaaaagttgtagcgggtcaatggagggcaaggtgtattatcctcacatttatgacattgtcggttgatgtgtcaaacatataaccattgttcaactgtcaaatttcagcagctctcccagtagagcacactaagtatcattccacaagttgagagattcacataagtaatgaggatatatttgctaagatgaagaaaatctggtactccatgctactgatggtcaattaagaaaaatgaacactgaggtgtaaactttaaaaaattaccatccatgcatgagaggtcgagattcatgatgcttctgcaatttacctgatcaagctacaattt

SEQ ID NO: 81936 - DNA, 1205 bp, Zea Mays
aaaaaacaaaaaaccaaaaaaccccacgcctttcctcgccggcgaaggagaagccgcagcgctgctcccacgccccctaggagcgcgtgcctccattccatgtgcgcccgcccaccggaggataacctttgatcatttcgtttgctggacattggatcaactggtgctgttatacatagaaaggatttcattttaaattctcatctatatttggtggtgccataatcatttttccactagcgtttggcaataatgtcggagagcgagttagcagtaataaaaccagaggtgttgaagacatatatctggcttcagtgctttgatggttccatacaacaagtggaggaggaggttgcaatgttctgccccatgatatgtcaggaaattgtgaaaaatggcacagggtcatcaaaaaatcatgctattgctctcccggaaagagttaatccagccaatttgagtttgattcttgactactgtcgatttcatcagatcactgggcgttcaaacatggagcggaagtcctttgatgaaaagtttgttaggatagaaacagaaagactctgcgaattgacttctgcagccgacagtctacagttaaagccacttgttgatcttactggccgagcgcttgctcgaatcattgaaggaaagacacctgaggaaattcgtgacattttccatttaccagatgatttaacagaggaagagaaattggagcccctaaaaaatataaatgatggtcctgctaggattcgcctactgaaccggttgtatgccaagaagcggaaagagctccaggagcgccataagctgaaggatgttcaagtacagaaagagcaaaaagatgagagatctttggatgagttacttagttttattaatggggatggaggttcaggaggcaggaaagctaccaagagtaagaaaaagaataaaaggaaggatcatgttgagaaccccccaaaagctgactctgagcctgtaaatgcgaacatttatttcttacgcgatctatcatgggagtttaggaaggagctgcttgtgtggttccgtgcaaagtcgatagaagtaatgtttctagacttccatgccagaatccagatatgcaagatgatgccgagtacccttttgaagatgctgacctcgatgatggacttgatcctgcaatgaaagaagagcttgataggtttgtttttaacatg

SEQ ID NO: 81937 - DNA, 2821 bp, Zea Mays
aaaaaacaaaaaaccaaaaaaccccacgcctttcctcgccggcgaaggagaagccgcagcgctgctcccacgccccctaggagcgcgtgcctccattccatgtgcgcccgcccaccggagcgcgcgcctgtctgccgttctcctgtttccgcctgcgctgagcgtgaatggttgtaataagccatggctggaggctgcctgggttcgggagccttggttactggaacagatagtcttcttgcaaaccaatctccggctcaattcattagtccatgcgatatttggttgctgggtacgatttcggtggtccggatcatctgtcacagcaaaggtgcaaagagtggcaattaattacaatggcattgccatacatttgtgttagtcatgcataaaacgtattggctatcggctctggacttctaaggataacctttgatcatttcgtttgctggacattggatcaactggtgctgttatacatagaaaggatttcattttaaattctcatctatatttggtggtgccataatcatttttccactagcgtttggcaataatgtcggagagcgagttagcagtaataaaaccagaggtgttgaagacatatatctggcttcagtgctttgatggttccatacaacaagtggaggaggaggttgcaatgttctgccccatgatatgtcaggaaattgtgaaaaatggcacagggtcatcaaaaaatcatgctattgctctcccggaaagagttaatccagccaatttgagtttgattcttgactactgtcgatttcatcagatcactgggcgttcaaacatggagcggaagtcctttgatgaaaagtttgttaggatagaaacagaaagactctgcgaattgacttctgcagccgacagtctacagttaaagccacttgttgatcttactggccgagcgcttgctcgaatcattgaaggaaagacacctgaggaaattcgtgacattttccatttaccagatgatttaacagaggaagagaaattggagcccctaaaaaatataaatgatggtcctgctaggattcgcctactgaaccggttgtatgccaagaagcggaaagagctccaggagcgccataagctgaaggatgttcaagtacagaaagagcaaaaagatgagagatctttggatgagttacttagttttattaatggggatggaggttcaggaggcaggaaagctaccaagagtaagaaaaagaataaaaggaaggatcatgttgagaaccccccaaaagctgactctgagcctgtaaatgcgaatccagatatgcaagatgatgccgagtacccttttgaagatgctgacctcgatgatggacttgatcctgcaatgaaagaagagcttgatagagaagttgaggcctttgcgaagaggttggattcagtttggaaggagtcacatattggtggtaatggttctgcacggagatttcctgggtttaatcacatgtgagtgttaagctggtaggatcagaaggcagaagcagaggagatttgtggacatacagcctggaagagagtaaaaataccaaacagtcgacttgctcctgtgtgtttgataagggcatgtacaaccctgaaatcatggatcggttttgcgaagtacaaaagacatgttaagagactgtataccctgagcctttggatcataaatgtaagtaagaggcaatgtgtgtagaattgtgtagagacagtctcttcgcggaaagagagcctgtctattgtatttttttcaattaaccctcaagagacttcatattgaaagaggttatacatgtcagagccaagcatgcagacatgctattttgttggggaggaggctgcctagttgggatgaagcttagcatggttcaaggaaaaagtgtagttttttttctttggaaagggaggattagaggtctgtcttgtctgtgttgccagggaggaggctgcctagttgggatgaagcttataatgcagtatatagtgtaaaacagtgttttgaatgactatatggctgaactgttggacacagtttgtatcaatgaaatttcgttgattcactgtattgtggtggtgcacataaaaaatgtcctttttttggctgaccttacgtgggttggaatatactataagcacgtgttcttatttataattaagttaaacaacattttatcgtatatatcaataataatagaattggatagatgaatgatagaagttaatttaataggtatttacatgtaaaatgttatagaaaacaaatgaaacattatcatttagaaataatcaaaaaggttttgatgggataaaaaataatgatcagcggacagtaggtagaatatacctaaagtcaatcattgagtgcaacaacaatcttaaacgacacttttccccaagggcatctaaactggacatgttgggaaacctaacctataagcaactaatgtcaaaaacacaaaatctaacaaaaaaagttgtagcgggtcaatggagggcaaggtgtattatcctcacatttatgacattgtcggttgatgtgtcaaacatataaccattgttcaactgtcaaatttcagcagctctcccagtagagcacactaagtatcattccacaagttgagagattcacataagtaatgaggatatatttgctaagatgaagaaaatctggtactccatgctactgatggtcaattaagaaaaatgaacactgaggtgtaaactttaaaaaattaccatccatgcatgagaggtcgagattcatgatgcttctgcaatttacctgatcaagctacaattt

SEQ ID NO: 81938 - DNA, 2507 bp, Zea Mays
aaaaaacaaaaaaccaaaaaaccccacgcctttcctcgccggcgaaggagaagccgcagcgctgctcccacgccccctaggagcgcgtgcctccattccatgtgcgcccgcccaccggaggtgttgaagacatatatctggcttcagtgctttgatggttccatacaacaagtggaggaggaggttgcaatgttctgccccatgatatgtcaggaaattgtgaaaaatggcacagggtcatcaaaaaatcatgctattgctctcccggaaagagttaatccagccaatttgagtttgattcttgactactgtcgatttcatcagatcactgggcgttcaaacatggagcggaagtcctttgatgaaaagtttgttaggatagaaacagaaagactctgcgaattgacttctgcagccgacagtctacagttaaagccacttgttgatcttactggccgagcgcttgctcgaatcattgaaggaaagacacctgaggaaattcgtgacattttccatttaccagatgatttaacagaggaagagaaattggagcccctaaaaaatataaatgatggtcctgctaggattcgcctactgaaccggttgtatgccaagaagcggaaagagctccaggagcgccataagctgaaggatgttcaagtacagaaagagcaaaaagatgagagatctttggatgagttacttagttttattaatggggatggaggtatagctacagttcaggaggcaggaaagctaccaagagtaagaaaaagaataaaaggaaggatcatgttgagaaccccccaaaagctgactctgagcctgtaaatgcggttagatttcctgactgtttcccctactgtgtgttctatgtagaacatttatttcttacgcgatctatcatgggagtttaggaaggagctgcttgtgtggttccgtgcaaagtcgatagaagtaatgtttctagacttccatgccagaatccagatatgcaagatgatgccgagtacccttttgaagatgctgacctcgatgatggacttgatcctgcaatgaaagaagagcttgatagagaagttgaggcctttgcgaagaggttggattcagtttggaaggagtcacatattggtggtaatggttctgcacggagatttcctgggtttaatcacatgtgagtgttaagctggtaggatcagaaggcagaagcagaggagatttgtggacatacagcctggaagagagtaaaaataccaaacagtcgacttgctcctgtgtgtttgataagggcatgtacaaccctgaaatcatggatcggttttgcgaagtacaaaagacatgttaagagactgtataccctgagcctttggatcataaatgtaagtaagaggcaatgtgtgtagaattgtgtagagacagtctcttcgcggaaagagagcctgtctattgtatttttttcaattaaccctcaagagacttcatattgaaagaggttatacatgtcagagccaagcatgcagacatgctattttgttggggaggaggctgcctagttgggatgaagcttagcatggttcaaggaaaaagtgtagttttttttctttggaaagggaggattagaggtctgtcttgtctgtgttgccagggaggaggctgcctagttgggatgaagcttataatgcagtatatagtgtaaaacagtgttttgaatgactatatggctgaactgttggacacagtttgtatcaatgaaatttcgttgattcactgtattgtggtggtgcacataaaaaatgtcctttttttggctgaccttacgtgggttggaatatactataagcacgtgttcttatttataattaagttaaacaacattttatcgtatatatcaataataatagaattggatagatgaatgatagaagttaatttaataggtatttacatgtaaaatgttatagaaaacaaatgaaacattatcatttagaaataatcaaaaaggttttgatgggataaaaaataatgatcagcggacagtaggtagaatatacctaaagtcaatcattgagtgcaacaacaatcttaaacgacacttttccccaagggcatctaaactggacatgttgggaaacctaacctataagcaactaatgtcaaaaacacaaaatctaacaaaaaaagttgtagcgggtcaatggagggcaaggtgtattatcctcacatttatgacattgtcggttgatgtgtcaaacatataaccattgttcaactgtcaaatttcagcagctctcccagtagagcacactaagtatcattccacaagttgagagattcacataagtaatgaggatatatttgctaagatgaagaaaatctggtactccatgctactgatggtcaattaagaaaaatgaacactgaggtgtaaactttaaaaaattaccatccatgcatgagaggtcgagattcatgatgcttctgcaatttacctgatcaagctacaattt

SEQ ID NO: 81939 - DNA, 2852 bp, Zea Mays
gtaataagccatggctggaggctgcctgggttcgggagccttggttactggaacagatagtcttcttgcaaaccaatctccggctcaattcattagtccatgcgatatttggttgctggttacctctgacatattctgctctcatgtgttgaagacatatatctggcttcagtgctttgatggttccatacaacaagtggaggaggaggttgcaatgttctgccccatgatatgtcaggaaattgtgaaaaatggcacagggtcatcaaaaaatcatgctattgctctcccggaaagagttaatccagccaatttgagtttgattcttgactactgtcgatttcatcagatcactgggcgttcaaacatggagcggaagtcctttgatgaaaagtttgttaggatagaaacagaaagactctgcgaattgacttctgcagccgacagtctacagttaaagccacttgttgatcttactggccgagcgcttgctcgaatcattgaaggaaagacacctgaggaaattcgtgacattttccatttaccagatgatttaacagaggaagagaaattggagcccctaaaaaatataaatgatggtcctgctaggattcgcctactgaaccggttgtatgccaagaagcggaaagagctccaggagcgccataagctgaaggatgttcaagtacagaaagagcaaaaagatgagagatctttggatgagttacttagttttattaatggggatggaggttcaggaggcaggaaagctaccaagagtaagaaaaagaataaaaggaaggatcatgttgagaaccccccaaaagctgactctgagcctgtaaatgcgaacatttatttcttacgcgatctatcatgggagtttaggaaggagctgcttgtgtggttccgtgcaaagtcgatagaagtaatgtttctagacttccatgccagaatccagatatgcaagatgatgccgagtacccttttgaagatgctgacctcgatgatggacttgatcctgcaatgaaagaagagcttgataggtgaggatataagatatctcattgctgtatgcatgtagactcttagatttgtttttcttttgatgtgtcaacttgtttttcctccttggaagcgaactttttagtctgctttgttctgtgcctactagtctgtttcttaatttgcaaagcatgtagttgtccctgaaatgacaagccttagaggtttctatactcagatgtgaagaatttaagttgagttcggaattgttgcttaatattgtttcaaataccacgacccatgaaactcaatttcaattttacttggattgcggcacgtggtcattatttactctatgcatagtgcggtagtgctgtggcctgaaacaacggcaaggtttgtttttaacatgcagagaagttgaggcctttgcgaagaggttggattcagtttggaaggagtcacatattggtggtaatggttctgcacggagatttcctgggtttaatcacatgtgagtgttaagctggtaggatcagaaggcagaagcagaggagatttgtggacatacagcctggaagagagtaaaaataccaaacagtcgacttgctcctgtgtgtttgataagggcatgtacaaccctgaaatcatggatcggttttgcgaagtacaaaagacatgttaagagactgtataccctgagcctttggatcataaatgtaagtaagaggcaatgtgtgtagaattgtgtagagacagtctcttcgcggaaagagagcctgtctattgtatttttttcaattaaccctcaagagacttcatattgaaagaggttatacatgtcagagccaagcatgcagacatgctattttgttggggaggaggctgcctagttgggatgaagcttagcatggttcaaggaaaaagtgtagttttttttctttggaaagggaggattagaggtctgtcttgtctgtgttgccagggaggaggctgcctagttgggatgaagcttataatgcagtatatagtgtaaaacagtgttttgaatgactatatggctgaactgttggacacagtttgtatcaatgaaatttcgttgattcactgtattgtggtggtgcacataaaaaatgtcctttttttggctgaccttacgtgggttggaatatactataagcacgtgttcttatttataattaagttaaacaacattttatcgtatatatcaataataatagaattggatagatgaatgatagaagttaatttaataggtatttacatgtaaaatgttatagaaaacaaatgaaacattatcatttagaaataatcaaaaaggttttgatgggataaaaaataatgatcagcggacagtaggtagaatatacctaaagtcaatcattgagtgcaacaacaatcttaaacgacacttttccccaagggcatctaaactggacatgttgggaaacctaacctataagcaactaatgtcaaaaacacaaaatctaacaaaaaaagttgtagcgggtcaatggagggcaaggtgtattatcctcacatttatgacattgtcggttgatgtgtcaaacatataaccattgttcaactgtcaaatttcagcagctctcccagtagagcacactaagtatcattccacaagttgagagattcacataagtaatgaggatatatttgctaagatgaagaaaatctggtactccatgctactgatggtcaattaagaaaaatgaacactgaggtgtaaactttaaaaaattaccatccatgcatgagaggtcgagattcatgatgcttctgcaatttacctgatcaagctacaattt

SEQ ID NO: 81940 - DNA, 2496 bp, Zea Mays
atggctggaggctgcctgggttcgggagccttggttactggaacagatagtcttcttgcaaaccaatctccggctcaattcattagtccatgcgatatttggttgctggttacctctgacatattctgctctcatgtgttgaagacatatatctggcttcagtgctttgatggttccatacaacaagtggaggaggaggttgcaatgttctgccccatgatatgtcaggaaattgtgaaaaatggcacagggtcatcaaaaaatcatgctattgctctcccggaaagagttaatccagccaatttgagtttgattcttgactactgtcgatttcatcagatcactgggcgttcaaacatggagcggaagtcctttgatgaaaagtttgttaggatagaaacagaaagactctgcgaattgacttctgcagccgacagtctacagttaaagccacttgttgatcttactggccgagcgcttgctcgaatcattgaaggaaagacacctgaggaaattcgtgacattttccatttaccagatgatttaacagaggaagagaaattggagcccctaaaaaatataaatgatggtcctgctaggattcgcctactgaaccggttgtatgccaagaagcggaaagagctccaggagcgccataagctgaagaaagagcaaaaagatgagagatctttggatgagttacttagttttattaatggggatggaggttcaggaggcaggaaagctaccaagagtaagaaaaagaataaaaggaaggatcatgttgagaaccccccaaaagctgactctgagcctgtaaatgcggttagatttcctgactgtttcccctactgtgtgttctatgtagaacatttatttcttacgcgatctatcatgggagtttaggaaggagctgcttgtgtggttccgtgcaaagtcgatagaagtaatgtttctagacttccatgccagaatccagatatgcaagatgatgccgagtacccttttgaagatgctgacctcgatgatggacttgatcctgcaatgaaagaagagcttgatagagaagttgaggcctttgcgaagaggttggattcagtttggaaggagtcacatattggtggtaatggttctgcacggagatttcctgggtttaatcacatgtgagtgttaagctggtaggatcagaaggcagaagcagaggagatttgtggacatacagcctggaagagagtaaaaataccaaacagtcgacttgctcctgtgtgtttgataagggcatgtacaaccctgaaatcatggatcggttttgcgaagtacaaaagacatgttaagagactgtataccctgagcctttggatcataaatgtaagtaagaggcaatgtgtgtagaattgtgtagagacagtctcttcgcggaaagagagcctgtctattgtatttttttcaattaaccctcaagagacttcatattgaaagaggttatacatgtcagagccaagcatgcagacatgctattttgttggggaggaggctgcctagttgggatgaagcttagcatggttcaaggaaaaagtgtagttttttttctttggaaagggaggattagaggtctgtcttgtctgtgttgccagggaggaggctgcctagttgggatgaagcttataatgcagtatatagtgtaaaacagtgttttgaatgactatatggctgaactgttggacacagtttgtatcaatgaaatttcgttgattcactgtattgtggtggtgcacataaaaaatgtcctttttttggctgaccttacgtgggttggaatatactataagcacgtgttcttatttataattaagttaaacaacattttatcgtatatatcaataataatagaattggatagatgaatgatagaagttaatttaataggtatttacatgtaaaatgttatagaaaacaaatgaaacattatcatttagaaataatcaaaaaggttttgatgggataaaaaataatgatcagcggacagtaggtagaatatacctaaagtcaatcattgagtgcaacaacaatcttaaacgacacttttccccaagggcatctaaactggacatgttgggaaacctaacctataagcaactaatgtcaaaaacacaaaatctaacaaaaaaagttgtagcgggtcaatggagggcaaggtgtattatcctcacatttatgacattgtcggttgatgtgtcaaacatataaccattgttcaactgtcaaatttcagcagctctcccagtagagcacactaagtatcattccacaagttgagagattcacataagtaatgaggatatatttgctaagatgaagaaaatctggtactccatgctactgatggtcaattaagaaaaatgaacactgaggtgtaaactttaaaaaattaccatccatgcatgagaggtcgagattcatgatgcttctgcaatttacctgatcaagctacaattt

SEQ ID NO: 81941 - DNA, 2738 bp, Zea Mays
atggctggaggctgcctgggttcgggagccttggttactggaacagatagtcttcttgcaaaccaatctccggctcaattcattagtccatgcgatatttggttgctggttacctctgacatattctgctctcatgtgttgaagacatatatctggcttcagtgctttgatggttccatacaacaagtggaggaggaggttgcaatgttctgccccatgatatgtcaggaaattgtgaaaaatggcacagggtcatcaaaaaatcatgctattgctctcccggaaagagttaatccagccaatttgagtttgattcttgactactgtcgatttcatcagatcactgggcgttcaaacatggagcggaagtcctttgatgaaaagtttgttaggatagaaacagaaagactctgcgaattgacttctgcagccgacagtctacagttaaagccacttgttgatcttactggccgagcgcttgctcgaatcattgaaggaaagacacctgaggaaattcgtgacattttccatttaccagatgatttaacagaggaagagaaattggagcccctaaaaaatataaatgatggtcctgctaggattcgcctactgaaccggttgtatgccaagaagcggaaagagctccaggagcgccataagctgaaggatgttcaagtacagaaagagcaaaaagatgagagatctttggatgagttacttagttttattaatggggatggaggttcaggaggcaggaaagctaccaagagtaagaaaaagaataaaaggaaggatcatgttgagaaccccccaaaagctgactctgagcctgtaaatgcgaatccagatatgcaagatgatgccgagtacccttttgaagatgctgacctcgatgatggacttgatcctgcaatgaaagaagagcttgataggtgaggatataagatatctcattgctgtatgcatgtagactcttagatttgtttttcttttgatgtgtcaacttgtttttcctccttggaagcgaactttttagtctgctttgttctgtgcctactagtctgtttcttaatttgcaaagcatgtagttgtccctgaaatgacaagccttagaggtttctatactcagatgtgaagaatttaagttgagttcggaattgttgcttaatattgtttcaaataccacgacccatgaaactcaatttcaattttacttggattgcggcacgtggtcattatttactctatgcatagtgcggtagtgctgtggcctgaaacaacggcaaggtttgtttttaacatgcagagaagttgaggcctttgcgaagaggttggattcagtttggaaggagtcacatattggtggtaatggttctgcacggagatttcctgggtttaatcacatgtgagtgttaagctggtaggatcagaaggcagaagcagaggagatttgtggacatacagcctggaagagagtaaaaataccaaacagtcgacttgctcctgtgtgtttgataagggcatgtacaaccctgaaatcatggatcggttttgcgaagtacaaaagacatgttaagagactgtataccctgagcctttggatcataaatgtaagtaagaggcaatgtgtgtagaattgtgtagagacagtctcttcgcggaaagagagcctgtctattgtatttttttcaattaaccctcaagagacttcatattgaaagaggttatacatgtcagagccaagcatgcagacatgctattttgttggggaggaggctgcctagttgggatgaagcttagcatggttcaaggaaaaagtgtagttttttttctttggaaagggaggattagaggtctgtcttgtctgtgttgccagggaggaggctgcctagttgggatgaagcttataatgcagtatatagtgtaaaacagtgttttgaatgactatatggctgaactgttggacacagtttgtatcaatgaaatttcgttgattcactgtattgtggtggtgcacataaaaaatgtcctttttttggctgaccttacgtgggttggaatatactataagcacgtgttcttatttataattaagttaaacaacattttatcgtatatatcaataataatagaattggatagatgaatgatagaagttaatttaataggtatttacatgtaaaatgttatagaaaacaaatgaaacattatcatttagaaataatcaaaaaggttttgatgggataaaaaataatgatcagcggacagtaggtagaatatacctaaagtcaatcattgagtgcaacaacaatcttaaacgacacttttccccaagggcatctaaactggacatgttgggaaacctaacctataagcaactaatgtcaaaaacacaaaatctaacaaaaaaagttgtagcgggtcaatggagggcaaggtgtattatcctcacatttatgacattgtcggttgatgtgtcaaacatataaccattgttcaactgtcaaatttcagcagctctcccagtagagcacactaagtatcattccacaagttgagagattcacataagtaatgaggatatatttgctaagatgaagaaaatctggtactccatgctactgatggtcaattaagaaaaatgaacactgaggtgtaaactttaaaaaattaccatccatgcatgagaggtcgagattcatgatgcttctgcaatttacctgatcaagctacaattt

SEQ ID NO: 81942 - DNA, 2541 bp, Zea Mays
attaattacaatggcattgccatacatttgtgttagtcatgcataaaacgtattggctatcggctctggacttctaaggataacctttgatcatttcgtttgctggacattggatcaactggtgctgttatacatagaaaggatttcattttaaattctcatctatatttggtggtgccataatcatttttccactagcgtttggcaataatgtcggagagcgagttagcagtaataaaaccagaggtgttgaagacatatatctggcttcagtgctttgatggttccatacaacaagtggaggaggaggttgcaatgttctgccccatgatatgtcaggaaattgtgaaaaatggcacagggtcatcaaaaaatcatgctattgctctcccggaaagagttaatccagccaatttgagtttgattcttgactactgtcgatttcatcagatcactgggcgttcaaacatggagcggaagtcctttgatgaaaagtttgttaggatagaaacagaaagactctgcgaattgacttctgcagccgacagtctacagttaaagccacttgttgatcttactggccgagcgcttgctcgaatcattgaaggaaagacacctgaggaaattcgtgacattttccatttaccagatgatttaacagaggaagagaaattggagcccctaaaaaatataaatgatggtcctgctaggattcgcctactgaaccggttgtatgccaagaagcggaaagagctccaggagcgccataagctgaaggatgttcaagtacagaaagagcaaaaagatgagagatctttggatgagttacttagttttattaatggggatggaggttcaggaggcaggaaagctaccaagagtaagaaaaagaataaaaggaaggatcatgttgagaaccccccaaaagctgactctgagcctgtaaatgcggaaggagctgcttgtgtggttccgtgcaaagtcgatagaagtaatgtttctagacttccatgccagaatccagatatgcaagatgatgccgagtacccttttgaagatgctgacctcgatgatggacttgatcctgcaatgaaagaagagcttgatagagaagttgaggcctttgcgaagaggttggattcagtttggaaggagtcacatattggtggtaatggttctgcacggagatttcctgggtttaatcacatgtgagtgttaagctggtaggatcagaaggcagaagcagaggagatttgtggacatacagcctggaagagagtaaaaataccaaacagtcgacttgctcctgtgtgtttgataagggcatgtacaaccctgaaatcatggatcggttttgcgaagtacaaaagacatgttaagagactgtataccctgagcctttggatcataaatgtaagtaagaggcaatgtgtgtagaattgtgtagagacagtctcttcgcggaaagagagcctgtctattgtatttttttcaattaaccctcaagagacttcatattgaaagaggttatacatgtcagagccaagcatgcagacatgctattttgttggggaggaggctgcctagttgggatgaagcttagcatggttcaaggaaaaagtgtagttttttttctttggaaagggaggattagaggtctgtcttgtctgtgttgccagggaggaggctgcctagttgggatgaagcttataatgcagtatatagtgtaaaacagtgttttgaatgactatatggctgaactgttggacacagtttgtatcaatgaaatttcgttgattcactgtattgtggtggtgcacataaaaaatgtcctttttttggctgaccttacgtgggttggaatatactataagcacgtgttcttatttataattaagttaaacaacattttatcgtatatatcaataataatagaattggatagatgaatgatagaagttaatttaataggtatttacatgtaaaatgttatagaaaacaaatgaaacattatcatttagaaataatcaaaaaggttttgatgggataaaaaataatgatcagcggacagtaggtagaatatacctaaagtcaatcattgagtgcaacaacaatcttaaacgacacttttccccaagggcatctaaactggacatgttgggaaacctaacctataagcaactaatgtcaaaaacacaaaatctaacaaaaaaagttgtagcgggtcaatggagggcaaggtgtattatcctcacatttatgacattgtcggttgatgtgtcaaacatataaccattgttcaactgtcaaatttcagcagctctcccagtagagcacactaagtatcattccacaagttgagagattcacataagtaatgaggatatatttgctaagatgaagaaaatctggtactccatgctactgatggtcaattaagaaaaatgaacactgaggtgtaaactttaaaaaattaccatccatgcatgagaggtcgagattcatgatgcttctgcaatttacctgatcaagctacaattt

SEQ ID NO: 81943 - DNA, 2491 bp, Zea Mays
cattgccatacatttgtgttagtcatgcataaaacgtattggctatcggctctggacttctaaggataacctttgatcatttcgtttgctggacattggatcaactggtgctgttatacatagaaaggatttcattttaaattctcatctatatttggtggtgccataatcatttttccactagcgtttggcaataatgtcggagagcgagttagcagtaataaaaccagaggtgttgaagacatatatctggcttcagtgctttgatggttccatacaacaagtggaggaggaggttgcaatgttctgccccatgatatgtcaggaaattgtgaaaaatggcacagggtcatcaaaaaatcatgctattgctctcccggaaagagttaatccagccaatttgagtttgattcttgactactgtcgatttcatcagatcactgggcgttcaaacatggagcggaagtcctttgatgaaaagtttgttaggatagaaacagaaagactctgcgaattgacttctgcagccgacagtctacagttaaagccacttgttgatcttactggccgagcgcttgctcgaatcattgaaggaaagacacctgaggaaattcgtgacattttccatttaccagatgatttaacagaggaagagaaattggagcccctaaaaaatataaatgatggtcctgctaggattcgcctactgaaccggttgtatgccaagaagcggaaagagctccaggagcgccataagctgaaggatgttcaagtacagaaagagcaaaaagatgagagatctttggatgagttacttagttttattaatggggatggaggtatagctacagttcaggaggcaggaaagctaccaagagtaagaaaaagaataaaaggaaggatcatgttgagaaccccccaaaagctgactctgagcctgtaaatgcgaatccagatatgcaagatgatgccgagtacccttttgaagatgctgacctcgatgatggacttgatcctgcaatgaaagaagagcttgataggtttgtttttaacatgcagagaagttgaggcctttgcgaagaggttggattcagtttggaaggagtcacatattggtggtaatggttctgcacggagatttcctgggtttaatcacatgtgagtgttaagctggtaggatcagaaggcagaagcagaggagatttgtggacatacagcctggaagagagtaaaaataccaaacagtcgacttgctcctgtgtgtttgataagggcatgtacaaccctgaaatcatggatcggttttgcgaagtacaaaagacatgttaagagactgtataccctgagcctttggatcataaatgtaagtaagaggcaatgtgtgtagaattgtgtagagacagtctcttcgcggaaagagagcctgtctattgtatttttttcaattaaccctcaagagacttcatattgaaagaggttatacatgtcagagccaagcatgcagacatgctattttgttggggaggaggctgcctagttgggatgaagcttagcatggttcaaggaaaaagtgtagttttttttctttggaaagggaggattagaggtctgtcttgtctgtgttgccagggaggaggctgcctagttgggatgaagcttataatgcagtatatagtgtaaaacagtgttttgaatgactatatggctgaactgttggacacagtttgtatcaatgaaatttcgttgattcactgtattgtggtggtgcacataaaaaatgtcctttttttggctgaccttacgtgggttggaatatactataagcacgtgttcttatttataattaagttaaacaacattttatcgtatatatcaataataatagaattggatagatgaatgatagaagttaatttaataggtatttacatgtaaaatgttatagaaaacaaatgaaacattatcatttagaaataatcaaaaaggttttgatgggataaaaaataatgatcagcggacagtaggtagaatatacctaaagtcaatcattgagtgcaacaacaatcttaaacgacacttttccccaagggcatctaaactggacatgttgggaaacctaacctataagcaactaatgtcaaaaacacaaaatctaacaaaaaaagttgtagcgggtcaatggagggcaaggtgtattatcctcacatttatgacattgtcggttgatgtgtcaaacatataaccattgttcaactgtcaaatttcagcagctctcccagtagagcacactaagtatcattccacaagttgagagattcacataagtaatgaggatatatttgctaagatgaagaaaatctggtactccatgctactgatggtcaattaagaaaaatgaacactgaggtgtaaactttaaaaaattaccatccatgcatgagaggtcgagattcatgatgcttctgcaatttacctgatcaagctacaattt

SEQ ID NO: 81944 - DNA, 2520 bp, Zea Mays
catatggattgggaataactgaacaaggataacctttgatcatttcgtttgctggacattggatcaactggtgctgttatacatagaaaggatttcattttaaattctcatctatatttggtggtgccataatcatttttccactagcgtttggcaataatgtcggagagcgagttagcagtaataaaaccagaggttcaattccctgcacccttcttagctgcaactccgctctgttaattcatcctatgttgagtttattggtggtgaactataataggtgttgaagacatatatctggcttcagtgctttgatggttccatacaacaagtggaggaggaggttgcaatgttctgccccatgatatgtcaggaaattgtgaaaaatggcacagggtcatcaaaaaatcatgctattgctctcccggaaagagttaatccagccaatttgagtttgattcttgactactgtcgatttcatcagatcactgggcgttcaaacatggagcggaagtcctttgatgaaaagtttgttaggatagaaacagaaagactctgcgaattgacttctgcagccgacagtctacagttaaagccacttgttgatcttactggccgagcgcttgctcgaatcattgaaggaaagacacctgaggaaattcgtgacattttccatttaccagatgatttaacagaggaagagaaattggagcccctaaaaaatataaatgatggtcctgctaggattcgcctactgaaccggttgtatgccaagaagcggaaagagctccaggagcgccataagctgaaggatgttcaagtacagaaagagcaaaaagatgagagatctttggatgagttacttagttttattaatggggatggaggtatagctacagttcaggaggcaggaaagctaccaagagtaagaaaaagaataaaaggaaggatcatgttgagaaccccccaaaagctgactctgagcctgtaaatgcgaatccagatatgcaagatgatgccgagtacccttttgaagatgctgacctcgatgatggacttgatcctgcaatgaaagaagagcttgatagagaagttgaggcctttgcgaagaggttggattcagtttggaaggagtcacatattggtggtaatggttctgcacggagatttcctgggtttaatcacatgtgagtgttaagctggtaggatcagaaggcagaagcagaggagatttgtggacatacagcctggaagagagtaaaaataccaaacagtcgacttgctcctgtgtgtttgataagggcatgtacaaccctgaaatcatggatcggttttgcgaagtacaaaagacatgttaagagactgtataccctgagcctttggatcataaatgtaagtaagaggcaatgtgtgtagaattgtgtagagacagtctcttcgcggaaagagagcctgtctattgtatttttttcaattaaccctcaagagacttcatattgaaagaggttatacatgtcagagccaagcatgcagacatgctattttgttggggaggaggctgcctagttgggatgaagcttagcatggttcaaggaaaaagtgtagttttttttctttggaaagggaggattagaggtctgtcttgtctgtgttgccagggaggaggctgcctagttgggatgaagcttataatgcagtatatagtgtaaaacagtgttttgaatgactatatggctgaactgttggacacagtttgtatcaatgaaatttcgttgattcactgtattgtggtggtgcacataaaaaatgtcctttttttggctgaccttacgtgggttggaatatactataagcacgtgttcttatttataattaagttaaacaacattttatcgtatatatcaataataatagaattggatagatgaatgatagaagttaatttaataggtatttacatgtaaaatgttatagaaaacaaatgaaacattatcatttagaaataatcaaaaaggttttgatgggataaaaaataatgatcagcggacagtaggtagaatatacctaaagtcaatcattgagtgcaacaacaatcttaaacgacacttttccccaagggcatctaaactggacatgttgggaaacctaacctataagcaactaatgtcaaaaacacaaaatctaacaaaaaaagttgtagcgggtcaatggagggcaaggtgtattatcctcacatttatgacattgtcggttgatgtgtcaaacatataaccattgttcaactgtcaaatttcagcagctctcccagtagagcacactaagtatcattccacaagttgagagattcacataagtaatgaggatatatttgctaagatgaagaaaatctggtactccatgctactgatggtcaattaagaaaaatgaacactgaggtgtaaactttaaaaaattaccatccatgcatgagaggtcgagattcatgatgcttctgcaatttacctgatcaagctacaattt

SEQ ID NO: 81945 - DNA, 1852 bp, Zea Mays
accaaaattaaagacggcaactctgcctgcacagcattgaccgccgccttcgctcctccacctccccgctcgctctcctgcctccgcgcgggccgcggatcccttcactcgccacagcaagcgctagaagagggaatggagcccggcctcgcatcccgcgtcgcccgttcagccgctcagccgctttccggctgcctgtcgcggcactcgctctcgccgtggctcaagatccagaaccacatttatcctatgccaagtctctgtcacaaggttcctagcacgggaaaatgccacgcttctatgacaacaagttacatggaaacatcagatgtcactgatttggactgggaaaaccttggctttggcctcatcgagactgactttatgtatgttgcaaaatgtggaactgatggaatcttttccaaaggtgaagtcctaccatttggtcctatagcactgagtccttcagctggagtcttaaattatgggcagggattgtttgaaggcctaaaagcatataggaaaactgatgggtccatccttctatttcgtccagaggagaatgctataaggatgctaagcggtgcagagaggatgtgtatgcctgctccaactgttgagcaattcgttgatgctgttaaacaaactgttttggcaaataaaagatgggtgcctcctactggtaaaggttccctatatatcaggccactcctaataggaagcggtgcagttcttggtcttgcgcctgctcctgagtatagctttatcatttttgtatcccctgttgggaattatttcaaggtccgtattgcgtttccttttacttcaaattccaccaaaatttgtaggcactagtcactcatccaaaatgtaaactggagtactgggcttagagcaaatcgttacaacctgtgttctttcctgctcagtggacagtgatacaggatagcttaatggtaatagtgtataatatgaactcgtccttacacgcatctaaaatagtttgtttcaacaatgccggtatatatgttgtttgccactttgcctttgttcattttattctacaggaaggtttatctcctattaatttgatcgttgaggataaatttcaccgtgccagccctggtggaactggaggtactgaaagcacaaaagattgcaaaggggaaaggatattctgatgtcctttatttggatgctgttcatgacaaatatctcgaagaagtctcttcctgcaatatttttgttgtgaaagacaatgttatttctacgcctgccattaaaggaacaatacttcctggtataacgaggaaaagtatcattgaagttgctcagagcaaaggtttcaaggttgaggagcgtctggtgtgtgtagatgagttgattaacgctgatgaagttttctgcacggggactgctgttgtggtgtcacctgtggggagtgttacatatatggggaaaagggtggaatatggcaaccaaggagtcggtgtcgtgtctcagcaactatacaagtcacttacaagcctccagatgggcaatgtggaggactggatgggttggaccatgcaacttaatcagtagcggatcacagatattgccttggcagatcccagattattacagctactgggtgcgatagggttttttttggcagatccatcttgagcatatttgactgtacctgtttcccttgagactaagacgaaagtgatcttactgatcttttgtttcaaatctgtaacgataaaataaaatgtggtttgcaccttgccatgtactgtaagaatggacccaaaaaaaaattcatgctgctgttgcttgatatctgaaactgtttatttgctgcagc

SEQ ID NO: 81946 - DNA, 3921 bp, Zea Mays
accaaaattaaagacggcaactctgcctgcacagcattgaccgccgccttcgctcctccacctccccgctcgctctcctgcctccgcgcgggccgcggatcccttcactcgccacagcaagcgctagaagagggaatggagcccggcctcgcatcccgcgtcgcccgttcagccgctcagccgctttccggctgcctgtcgcggcactcgctctcgccgtggctcaagatccagaaccacatttatcctatgccaagtctctgtcacaaggttcctagcacgggaaaatgccacgcttctatgacaacaagttacatcagggaaacatcagatgtcactgatttggactgggaaaaccttggctttggcctcatcgagactgactttatgtatgttgcaaaatgtggaactgatggaatcttttccaaaggtgaagtcctaccatttggtcctatagcactgagtccttcagctggagtcttaaattatgggcagggattgtttgaaggcctaaaagcatataggaaaactgatgggtccatccttctatttcgtccagaggagaatgctataaggatgctaagcggtgcagagaggatgtgtatgcctgctccaactgttgagcaattcgttgatgctgttaaacaaactgttttggcaaataaaagatgggtgcctcctactggtaaaggttccctatatatcaggccactcctaataggaagcggtgcagttcttggtcttgcgcctgctcctgagtatagctttatcatttttgtatcccctgttgggaattatttcaaggtccgtattgcgtttccttttacttcaaattccaccaaaatttgtaggcactagtcactcatccaaaatgtaaactggagtactgggcttagagcaaatcgttacaacctgtgttctttcctgctcagtggacagtgatacaggatagcttaatggtaatagtgtataatatgaactcgtccttacacgcatctaaaatagtttgtttcaacaatgccggtatatatgttgtttgccactttgcctttgttcattttattctacaggaaggtttatctcctattaatttgatcgttgaggataaatttcaccgtgccagccctggtggaactggaggtgtgaaaaccattggaaactatgcctcggtactgaaagcacaaaagattgcaaaggggaaaggatattctgatgtcctttatttggatgctgttcatgacaaatatctcgaagaagtctcttcctgcaatatttttgttgtgaaagacaatgttatttctacgcctgccattaaaggaacaatacttcctggtataacgaggaaaagtatcattgaagttgctcagagcaaaggtttcaaggttgaggagcgtctggtgtgtgtagatgagttgattaacgctgatgaagttttctgcacggggactgctgttgtggtgtcacctgtggggagtgttacatatatggggaaaagggtggaatatggcaaccaaggagtcggtgtcgtgtctcagcaactatacaagtcacttacaagcctccagatgggcaatgtggaggactggatgggagacaattcacgtgatgatttaaacagagaaacaaatcggtccaggtgtcagtgtcactggcacagtgggtggtatggtacccagggaaaggcaagtgcgtcgtaccctgtacacgcaggctggcacagtgggtggtatggtaattggtacccagggaaagtctctcccagttccaggctccagcagtcactcagagccagaggagagaattcaaattcgcagcgcagcgccctcattttgtcattacgttgctctgctcctggctcacctcaccagcgatcactaccggagcaggccatgaagcttaagatcaacaagtaggaccggtgggagcggcggcgcaggaggggcgggttcctccgccgcgcccgtggcggcggggtcgcagcagaggtcgcagccgatgtcgcagcactccttctcgcagggcgttgtggggagcggcggcgcgtcgtcgctcctgcactcgcagtcgcagctctcgcaggcctccctcgacgagaatctcctcaccctccacctcgcctcgcccgctcgcgatcagagattcgggttccatgacgacttatcaaagaagatgacatcgttgcctgtcagctcggcttcttgtgtgcgagaagaatctcagctgcaactggcaaaaacatcaagcaaccctgtccatcgatggaacccttctcttcctgacggtagaagtgtgggtcctactgaggatgttgagcgcaaatttcagcatatggcaagttcagtgcataaggtagggatggtgcttgattcagtgcaaaccgacgttatgcagctaaacagagccatgaaggaagccacactagattctggaagcatacagcaaaagattgttctcctagacgctttgctgcagaaaaatcttaagggacaagatgatctcaaagctcttgttgagagcaacaccaaaagcatctccgatcagctgactgttctgaactcctactccaacaaactggatgagatatcctcaaccctttcaatcttgccaaaacaaatagaaacaaatttgaagcaacagcagagtgacaccttccgaatttttagaaaagacatggaggagattgttagagctgttagatctctcaacaataagattgatgcaatccaaatgccaacagaccagagctgcacaaccaatggaaggcccctgatgaaccaactgccagtcgatagaaatgaaaggccccaggtgaaccaaacaccagaggtaacccgggtgagccaaacaccggtagcaaccatggcgaaccaaagaccagtagcaaaaggaaggcacctggtgagccaaacaccagcagcaaatgggaaacctctgacgaaccaaacatcagtagcaaatggaagatccctgatgagccaagtaccagcagcaaatgggaaacctctgacgaaccaaatagcagtgccaaagggaagacccatgatgaggcagaaaacagcagaaggaggaaggccccagatgaaccaaatacctgtagcagatggatggccccatacaaacaaaatacacgcgccggaagtgcggcatcccgtacctttggtgtgccctgcagcaggcccgaggccgaaggtagaggagggaaagctgagagcggttccccaaaagctaactggttgtagatccagggtgacacctaaacaggaagaggcggcgacgaatacaaaggtcgtcgtcggccgggcagcggcaactgagaaggtggtgatattcatcgacgacgactccgacgatggcggcagcgaggcccttgcttcctgcgtgatcctgaggccggcgcccctggggtcaggtgcaggtgagtgcgacctggtgaaggtgggcgcggaggagagccaggagatcctgaggagggccaggaagcggaggagaagagaaatgcaggccattgtggcctgcatgccgcctgagcttgggtactagtagctagctacttctcatatcaatatatcatggatggatggatgcagttcctaatcgagaaaaagggatagttagttgtgtggttttgttgttgcgatggaatgaatcgagcagcatggatggattggttgattattatatcatctataataggggtaaggtgattgtgggtggtggtggatctggcaatctgctgggctggcaaaaaattagtgggaaaaagtgggcctgcactgcatttgcctgacaccgcacgtacggtactcatgatccatcgcaatcgtggtgttttgtttagctgaataataacaacggtggtgttttaattagctgagtagcagctgggagttggtaaccaatccgaggttacacagatgcgcg

SEQ ID NO: 81947 - DNA, 3930 bp, Zea Mays
accaaaattaaagacggcaactctgcctgcacagcattgaccgccgccttcgctcctccacctccccgctcgctctcctgcctccgcgcgggccgcggatcccttcactcgccacagcaagcgctagaagagggaatggagcccggcctcgcatcccgcgtcgcccgttcagccgctcagccgctttccggctgcctgtcgcggcactcgctctcgccgtggctcaagatccagaaccacatttatcctatgccaagtctctgtcacaaggttcctagcacgggaaaatgccacgcttctatgacaacaagttacatcagggaaacatcagatgtcactgatttggactgggaaaaccttggctttggcctcatcgagactgactttatgtatgttgcaaaatgtggaactgatggaatcttttccaaaggtgaagtcctaccatttggtcctatagcactgagtccttcagctggagtcttaaattatgggcagggattgtttgaaggcctaaaagcatataggaaaactgatgggtccatccttctatttcgtccagaggagaatgctataaggatgctaagcggtgcagagaggatgtgtatgcctgctccaactgttgagcaattcgttgatgctgttaaacaaactgttttggcaaataaaagatgggtgcctcctactggtaaaggttccctatatatcaggccactcctaataggaagcggtgcagttcttggtcttgcgcctgctcctgagtatagctttatcatttttgtatcccctgttgggaattatttcaaggtccgtattgcgtttccttttacttcaaattccaccaaaatttgtaggcactagtcactcatccaaaatgtaaactggagtactgggcttagagcaaatcgttacaacctgtgttctttcctgctcagtggacagtgatacaggatagcttaatggtaatagtgtataatatgaactcgtccttacacgcatctaaaatagtttgtttcaacaatgccggtatatatgttgtttgccactttgcctttgttcattttattctacaggaaggtttatctcctattaatttgatcgttgaggataaatttcaccgtgccagccctggtggaactggaggtactgaaagcacaaaagattgcaaaggggaaaggatattctgatgtcctttatttggatgctgttcatgacaaatatctcgaagaagtctcttcctgcaatatttttgttgtgaaagacaatgttatttctacgcctgccattaaaggaacaatacttcctggtataacgaggaaaagtatcattgaagttgctcagagcaaaggtttcaaggttgaggagcgtctggtgtgtgtagatgagttgattaacgctgatgaagttttctgcacggggactgctgttgtggtgtcacctgtggggagtgttacatatatggggaaaagggtggaatatggcaaccaaggagtcggtgtcgtgtctcagcaactatacaagtcacttacaagcctccagatgggcaatgtggaggactggatgggagacaattcacgtgatgatttaaacagagaaacaaatcggtccaggtgtcagtgtcactggcacagtgggtggtatggtacccagggaaaggcaagtgcgtcgtaccctgtacacgcaggctggcacagtgggtggtatggtaattggtacccagggaaagtctctcccagttccaggctccagcagtcactcagagccagaggagagaattcaaattcgcagcgcagcgccctcattttgtcattacgttgctctgctcctggctcacctcaccagcgatcactaccggagcaggccatgaagcttaagatcaacaaggcatgcgacctcggctccatctccgtcctccctccccgtaggaccggtgggagcggcggcgcaggaggggcgggttcctccgccgcgcccgtggcggcggggtcgcagcagaggtcgcagccgatgtcgcagcactccttctcgcagggcgttgtggggagcggcggcgcgtcgtcgctcctgcactcgcagtcgcagctctcgcaggcctccctcgacgagaatctcctcaccctccacctcgcctcgcccgctcgcgatcagagattcgggttccatgacgacttatcaaagaagatgacatcgttgcctgtcagctcggcttcttgtgtgcgagaagaatctcagctgcaactggcaaaaacatcaagcaaccctgtccatcgatggaacccttctcttcctgacggtagaagtgtgggtcctactgaggatgttgagcgcaaatttcagcatatggcaagttcagtgcataaggtagggatggtgcttgattcagtgcaaaccgacgttatgcagctaaacagagccatgaaggaagccacactagattctggaagcatacagcaaaagattgttctcctagacgctttgctgcagaaaaatcttaagggacaagatgatctcaaagctcttgttgagagcaacaccaaaagcatctccgatcagctgactgttctgaactcctactccaacaaactggatgagatatcctcaaccctttcaatcttgccaaaacaaatagaaacaaatttgaagcaacagcagagtgacaccttccgaatttttagaaaagacatggaggagattgttagagctgttagatctctcaacaataagattgatgcaatccaaatgccaacagaccagagctgcacaaccaatggaaggcccctgatgaaccaactgccagtcgatagaaatgaaaggccccaggtgaaccaaacaccagaggtaacccgggtgagccaaacaccggtagcaaccatggcgaaccaaagaccagtagcaaaaggaaggcacctggtgagccaaacaccagcagcaaatgggaaacctctgacgaaccaaacatcagtagcaaatggaagatccctgatgagccaagtaccagcagcaaatgggaaacctctgacgaaccaaatagcagtgccaaagggaagacccatgatgaggcagaaaacagcagaaggaggaaggccccagatgaaccaaatacctgtagcagatggatggccccatacaaacaaaatacacgcgccggaagtgcggcatcccgtacctttggtgtgccctgcagcaggcccgaggccgaaggtagaggagggaaagctgagagcggttccccaaaagctaactggttgtagatccagggtgacacctaaacaggaagaggcggcgacgaatacaaaggtcgtcgtcggccgggcagcggcaactgagaaggtggtgatattcatcgacgacgactccgacgatggcggcagcgaggcccttgcttcctgcgtgatcctgaggccggcgcccctggggtcaggtgcaggtgagtgcgacctggtgaaggtgggcgcggaggagagccaggagatcctgaggagggccaggaagcggaggagaagagaaatgcaggccattgtggcctgcatgccgcctgagcttgggtactagtagctagctacttctcatatcaatatatcatggatggatggatgcagttcctaatcgagaaaaagggatagttagttgtgtggttttgttgttgcgatggaatgaatcgagcagcatggatggattggttgattattatatcatctataataggggtaaggtgattgtgggtggtggtggatctggcaatctgctgggctggcaaaaaattagtgggaaaaagtgggcctgcactgcatttgcctgacaccgcacgtacggtactcatgatccatcgcaatcgtggtgttttgtttagctgaataataacaacggtggtgttttaattagctgagtagcagctgggagttggtaaccaatccgaggttacacagatgcgcg

SEQ ID NO: 81948 - DNA, 3664 bp, Zea Mays
accaaaattaaagacggcaactctgcctgcacagcattgaccgccgccttcgctcctccacctccccgctcgctctcctgcctccgcgcgggccgcggatcccttcactcgccacagcaagcgctagaagagggaatggagcccggcctcgcatcccgcgtcgcccgttcagccgctcagccgctttccggctgcctgtcgcggcactcgctctcgccgtggctcaagatccagaaccacatttatcctatgccaagtctctgtcacaaggttcctagcacgggaaaatgccacgcttctatgacaacaagttacatcagggaaacatcagatgtcactgatttggactgggaaaaccttggctttggcctcatcgagactgactttatgtatgttgcaaaatgtggaactgatggaatcttttccaaaggtgaagtcctaccatttggtcctatagcactgagtccttcagctggagtcttaaattatgggcagggattgtttgaaggcctaaaagcatataggaaaactgatgggtccatccttctatttcgtccagaggagaatgctataaggatgctaagcggtgcagagaggatgtgtatgcctgctccaactgttgagcaattcgttgatgctgttaaacaaactgttttggcaaataaaagatgggtgcctcctactggtaaaggttccctatatatcaggccactcctaataggaagcggtgcagttcttggtcttgcgcctgctcctgagtatagctttatcatttttgtatcccctgttgggaattatttcaaggaaggtttatctcctattaatttgatcgttgaggataaatttcaccgtgccagccctggtggaactggaggtactgaaagcacaaaagattgcaaaggggaaaggatattctgatgtcctttatttggatgctgttcatgacaaatatctcgaagaagtctcttcctgcaatatttttgttgtgaaagacaatgttatttctacgcctgccattaaaggaacaatacttcctggtataacgaggaaaagtatcattgaagttgctcagagcaaaggtttcaaggttgaggagcgtctggtgtgtgtagatgagttgattaacgctgatgaagttttctgcacggggactgctgttgtggtgtcacctgtggggagtgttacatatatggggaaaagggtggaatatggcaaccaaggagtcggtgtcgtgtctcagcaactatacaagtcacttacaagcctccagatgggcaatgtggaggactggatgggagacaattcacgtgatgatttaaacagagaaacaaatcggtccaggtgtcagtgtcactggcacagtgggtggtatggtacccagggaaaggcaagtgcgtcgtaccctgtacacgcaggctggcacagtgggtggtatggtaattggtacccagggaaagtctctcccagttccaggctccagcagtcactcagagccagaggagagaattcaaattcgcagcgcagcgccctcattttgtcattacgttgctctgctcctggctcacctcaccagcgatcactaccggagcaggccatgaagcttaagatcaacaaggcatgcgacctcggctccatctccgtcctccctccccgtaggaccggtgggagcggcggcgcaggaggggcgggttcctccgccgcgcccgtggcggcggggtcgcagcagaggtcgcagccgatgtcgcagcactccttctcgcagggcgttgtggggagcggcggcgcgtcgtcgctcctgcactcgcagtcgcagctctcgcaggcctccctcgacgagaatctcctcaccctccacctcgcctcgcccgctcgcgatcagagattcgggttccatgacgacttatcaaagaagatgacatcgttgcctgtcagctcggcttcttgtgtgcgagaagaatctcagctgcaactggcaaaaacatcaagcaaccctgtccatcgatggaacccttctcttcctgacggtagaagtgtgggtcctactgaggatgttgagcgcaaatttcagcatatggcaagttcagtgcataaggtagggatggtgcttgattcagtgcaaaccgacgttatgcagctaaacagagccatgaaggaagccacactagattctggaagcatacagcaaaagattgttctcctagacgctttgctgcagaaaaatcttaagggacaagatgatctcaaagctcttgttgagagcaacaccaaaagcatctccgatcagctgactgttctgaactcctactccaacaaactggatgagatatcctcaaccctttcaatcttgccaaaacaaatagaaacaaatttgaagcaacagcagagtgacaccttccgaatttttagaaaagacatggaggagattgttagagctgttagatctctcaacaataagattgatgcaatccaaatgccaacagaccagagctgcacaaccaatggaaggcccctgatgaaccaactgccagtcgatagaaatgaaaggccccaggtgaaccaaacaccagaggtaacccgggtgagccaaacaccggtagcaaccatggcgaaccaaagaccagtagcaaaaggaaggcacctggtgagccaaacaccagcagcaaatgggaaacctctgacgaaccaaacatcagtagcaaatggaagatccctgatgagccaagtaccagcagcaaatgggaaacctctgacgaaccaaatagcagtgccaaagggaagacccatgatgaggcagaaaacagcagaaggaggaaggccccagatgaaccaaatacctgtagcagatggatggccccatacaaacaaaatacacgcgccggaagtgcggcatcccgtacctttggtgtgccctgcagcaggcccgaggccgaaggtagaggagggaaagctgagagcggttccccaaaagctaactggttgtagatccagggtgacacctaaacaggaagaggcggcgacgaatacaaaggtcgtcgtcggccgggcagcggcaactgagaaggtggtgatattcatcgacgacgactccgacgatggcggcagcgaggcccttgcttcctgcgtgatcctgaggccggcgcccctggggtcaggtgcaggtgagtgcgacctggtgaaggtgggcgcggaggagagccaggagatcctgaggagggccaggaagcggaggagaagagaaatgcaggccattgtggcctgcatgccgcctgagcttgggtactagtagctagctacttctcatatcaatatatcatggatggatggatgcagttcctaatcgagaaaaagggatagttagttgtgtggttttgttgttgcgatggaatgaatcgagcagcatggatggattggttgattattatatcatctataataggggtaaggtgattgtgggtggtggtggatctggcaatctgctgggctggcaaaaaattagtgggaaaaagtgggcctgcactgcatttgcctgacaccgcacgtacggtactcatgatccatcgcaatcgtggtgttttgtttagctgaataataacaacggtggtgttttaattagctgagtagcagctgggagttggtaaccaatccgaggttacacagatgcgcg

SEQ ID NO: 81949 - DNA, 2721 bp, Zea Mays
atgggccgatggttgggaaaacggttgtggcagattggggaccagcggccacgtggggtggggcctttggcagtagcgcgggtcaaaggaagggccgcgacagcggcacaggttggagaggaggccgctacgctggctagacgggaggcggtggtgctggtgaggccggccgcaccaagcgttgcaccgacgacgagtctgaagccaacaggagcacgagcgttggggatgtggctgtcgttcgtggtggagggaggggtggaatatggcaaccaaggagtcggtgtcgtgtctcagcaactatacaagtcacttacaagcctccagatgggcaatgtggaggactggatgggagacaattcacgtgatgatttaaacagagaaacaaatcggtccaggtgtcagtgtcactggcacagtgggtggtatggtacccagggaaaggcaagtgcgtcgtaccctgtacacgcaggctggcacagtgggtggtatggtaattggtacccagggaaagtctctcccagttccaggctccagcagtcactcagagccagaggagagaattcaaattcgcagcgcagcgccctcattttgtcattacgttgctctgctcctggctcacctcaccagcgatcactaccggagcaggccatgaagcttaagatcaacaaggcatgcgacctcggctccatctccgtcctccctccccgtaggaccggtgggagcggcggcgcaggaggggcgggttcctccgccgcgcccgtggcggcggggtcgcagcagaggtcgcagccgatgtcgcagcactccttctcgcagggcgttgtggggagcggcggcgcgtcgtcgctcctgcactcgcagtcgcagctctcgcaggcctccctcgacgagaatctcctcaccctccacctcgcctcgcccgctcgcgatcagagattcgggttccatgacgacttatcaaagaagatgacatcgttgcctgtcagctcggcttcttgtgtgcgagaagaatctcagctgcaactggcaaaaacatcaagcaaccctgtccatcgatggaacccttctcttcctgacggtagaagtgtgggtcctactgaggatgttgagcgcaaatttcagcatatggcaagttcagtgcataaggtagggatggtgcttgattcagtgcaaaccgacgttatgcagctaaacagagccatgaaggaagccacactagattctggaagcatacagcaaaagattgttctcctagacgctttgctgcagaaaaatcttaagggacaagatgatctcaaagctcttgttgagagcaacaccaaaagcatctccgatcagctgactgttctgaactcctactccaacaaactggatgagatatcctcaaccctttcaatcttgccaaaacaaatagaaacaaatttgaagcaacagcagagtgacaccttccgaatttttagaaaagacatggaggagattgttagagctgttagatctctcaacaataagattgatgcaatccaaatgccaacagaccagagctgcacaaccaatggaaggcccctgatgaaccaactgccagtcgatagaaatgaaaggccccaggtgaaccaaacaccagaggtaacccgggtgagccaaacaccggtagcaaccatggcgaaccaaagaccagtagcaaaaggaaggcacctggtgagccaaacaccagcagcaaatgggaaacctctgacgaaccaaacatcagtagcaaatggaagatccctgatgagccaagtaccagcagcaaatgggaaacctctgacgaaccaaatagcagtgccaaagggaagacccatgatgaggcagaaaacagcagaaggaggaaggccccagatgaaccaaatacctgtagcagatggatggccccatacaaacaaaatacacgcgccggaagtgcggcatcccgtacctttggtgtgccctgcagcaggcccgaggccgaaggtagaggagggaaagctgagagcggttccccaaaagctaactggttgtagatccagggtgacacctaaacaggaagaggcggcgacgaatacaaaggtcgtcgtcggccgggcagcggcaactgagaaggtggtgatattcatcgacgacgactccgacgatggcggcagcgaggcccttgcttcctgcgtgatcctgaggccggcgcccctggggtcaggtgcaggtgagtgcgacctggtgaaggtgggcgcggaggagagccaggagatcctgaggagggccaggaagcggaggagaagagaaatgcaggccattgtggcctgcatgccgcctgagcttgggtactagtagctagctacttctcatatcaatatatcatggatggatggatgcagttcctaatcgagaaaaagggatagttagttgtgtggttttgttgttgcgatggaatgaatcgagcagcatggatggattggttgattattatatcatctataataggggtaaggtgattgtgggtggtggtggatctggcaatctgctgggctggcaaaaaattagtgggaaaaagtgggcctgcactgcatttgcctgacaccgcacgtacggtactcatgatccatcgcaatcgtggtgttttgtttagctgaataataacaacggtggtgttttaattagctgagtagcagctgggagttggtaaccaatccgaggttacacagatgcgcg

SEQ ID NO: 81950 - DNA, 3140 bp, Zea Mays
tttcgctctgcagtgtgcagtgcaggtggggaaaaaagctaaggtagcgtagcgtgcgttttgcttgtgcatggcatgtgctccgatcctcctcctccgacctcccggcccattctttctcccttcttcttgagggggcaccctccgtcctttcctcttcttcttccttcagaaatcgcaagaaaatggggaagagaagccagaagcgccttattcgacgccaccaggacggcagcataggctgcatggcaggcctcatccgcatgttctattcccgccatgacgccaataagctcctgttggacaggaagcagccagggagtagaaggcacagtttcagtgccttttctggacgaaggggccactcaagaaagaattccaaggacttggacgaaatagatgaatacggcgattataacatggaggaacccagttccagcaaaccaacagtcaaaagacttatggaggacgagctacgaaagctaaaacagctgaagcttccaaatgatgaggttgagagaatattagctgacctgggacatggtgcctgcctggacaaaagttcagcccaaaacagcaaagcgaagaagggagaccaaaatcacatcagaggtatcaccaccacggctgctccatctggatctttggatcccactgcttccaactgcataaaagaagcagaagaaaatgagcttgaatttgccttggcagatttcttaggacggatccatagaaattgcaacaataatggggagttatgtacggagatgaaagccctaatccaaacaaagattgcagagctagataatcctccgtgcacatttgcttatgagcagcaaacttcacggggtgacgaatatgatactgctggtggcaaacatcgatgtagcagtagtaaaactcagcccaaaaaattcagagatgcgctggagatgctaagctcagacaccgaacttttctttcagaagtcaaattcacgtattttggagagcgcccaaagaaaccaaaacagactgatagggaacaatctagagcccacaaaaatagcagataataccgactccaacaaagatccaaagagtctgaaccagcatgagttggccaccaggagatatggtaaagagagcaggaatatctttttctggaagaaggaaagatcctcaccaaggcagactgcacaaggaaccagtagttctcagccagttaacaaaatagttatactgaagccaaatccaaggagagagatcggccatgctgtggctgttagttcaacccaagctccaaaactaggtgcaaccgagagctcaaaattttcaattaaggaggtcagaaggagattcagaatcgtgactagtgaagctacaaaaggaataccctcagtgtctgaagataacctccaaaaaggtcagcattggctcaacagttcagctttcacaataataaaagataccagacagctcgctgaacagacctcagaagggaaattctcatcttcagttatgaaggattttagatcatcaaacagcggtaggcaaaagaaaagaaaaaatgatgggccaaccgaaaaaaacagtagcataattacgtcatccaaggatgaatctgtcttctatgacgaggccaggaaacatctaacagagattctcaaggacaaaagacaaacaaccaagcagcacccgacacttgagatctcaaggtccttggtgaggatgctttccttccctcagtccagcacatcatcacctaggagtagccctagggcaaaagactgcatttacctctcacctgaagaggcaagcattcgtgccatatacaagtcaaataaagatcttttagaagaagaaagccagtctggagaatttccagagaatgttgtgtgtgatcctagtgaagcactgcatgagcaggctgttcaggaaaggtggtgcgtcaaagaagaaagtcaagaaacaacacaagaaggtgcagaacttgacactctgcgcactaaagaaattgacaagctggattgcatgggaaaaaatagcaatgcatggggcaccccagcaaagcaatgcacatataaaccatcacaagatatggtgggagaagcagagccaggacaaaggcatgtcaggacgtttccaagctcccctgagaacgactttgaaaaactggaatgccaagagcccacgactccccgaccgagtgcacagatcgaacagatatcacaattttctcctgatggaaaccacgaaaagcaagaacagccgagccctcaatctgttcttgatgtgttcttcctcgacggtgagttgcacaaagatatcttgaggacacgctacaacaccacaggggatggttcagaccaagggattttctgggaggacaagcatccgaggttatgttacataaaggaattgctagagctgtcagaattgtgtgcaaaccagaacttagaggtatggtatctagaagatgaattaatcagcccttgcttgttcgaagaagtacatggaggcaatcaaattgatggtacgaagcttttatttgactgcatttgcgaagctgtgacagaaatccaggacatatactttagaaaccctccatgcctatcttctctcacacacagcataagggcacctcctccagcgggacaaaaccttatctcagaaatcaataagcgtgttgaacgccatcttcactatcgatttccaagcacattagaccagctggttaacatggatcttgaaggtggcagttggatggatcttggatcagaaagcggagaggtcgctgtagtaatatgggactgcacactagatgagcttttggaagaattagtttacgacctgtggatttcaggcttcaatctcgcagccggtaaccatctgtagatttggtagagtcataccgttaaatagaagtaacatgtttgtgtggcaaaatcctgtgatttggacatggagggctgcatgagtcgttcttaaaggcatgagcatggtacgggatgttcactcatgtgaatttcatcgtgaccctcaacatattattatgtgtctagtgtcagttaggcctagtttggatactctagtaatgagtaggatttgagtggattaagatgtattgagagagtatttaatctattggggatttacacc

SEQ ID NO: 81951 - DNA, 3023 bp, Zea Mays
attctttctcccttcttcttgagggggcaccctccgtcctttcctcttcttcttccttcagaaatcgcaagaaaatggggaagagaagccagaagcgccttattcgacgccaccaggacggcagcataggctgcatggcaggcctcatccgcatgttctattcccgccatgacgccaataagctcctgttggacaggaagcagccagggagtagaaggcacagtttcagtgccttttctggacgaaggggccactcaagaaagaattccaaggacttggacgaaatagatgaatacggcgattataacatggaggaacccagttccagcaaaccaacagtcaaaagacttatggaggacgagctacgaaagctaaaacagctgaagcttccaaatgatgaggttgagagaatattagctgacctgggacatggtgcctgcctggacaaaagttcagcccaaaacagcaaagcgaagaagggagaccaaaatcacatcagaggtatcaccaccacggctgctccatctggatctttggatcccactgcttccaactgcataaaagaagcagaagaaaatgagcttgaatttgccttggcagatttcttaggacggatccatagaaattgcaacaataatggggagttatgtacggagatgaaagccctaatccaaacaaagattgcagagctagataatcctccgtgcacatttgcttatgagcagcaaacttcacggggtgacgaatatgatactgctggtggcaaacatcgatgtagcagtagtaaaactcagcccaaaaaattcagagatgcgctggagatgctaagctcagacaccgaacttttctttcagaagtcaaattcacgtattttggagagcgcccaaagaaaccaaaacagactgatagggaacaatctagagcccacaaaaatagcagataataccgactccaacaaagatccaaagagtctgaaccagcatgagttggccaccaggagatatggtaaagagagcaggaatatctttttctggaagaaggaaagatcctcaccaaggcagactgcacaaggaaccagtagttctcagccagttaacaaaatagttatactgaagccaaatccaaggagagagatcggccatgctgtggctgttagttcaacccaagctccaaaactaggtgcaaccgagagctcaaaattttcaattaaggaggtcagaaggagattcagaatcgtgactagtgaagctacaaaaggaataccctcagtgtctgaagataacctccaaaaaggtcagcattggctcaacagttcagctttcacaataataaaagataccagacagctcgctgaacagacctcagaagggaaattctcatcttcagttatgaaggattttagatcatcaaacagcggtaggcaaaagaaaagaaaaaatgatgggccaaccgaaaaaaacagtagcataattacgtcatccaaggatgaatctgtcttctatgacgaggccaggaaacatctaacagagattctcaaggacaaaagacaaacaaccaagcagcacccgacacttgagatctcaaggtccttggtgaggatgctttccttccctcagtccagcacatcatcacctaggagtagccctagggcaaaagactgcatttacctctcacctgaagaggcaagcattcgtgccatatacaagtcaaataaagatcttttagaagaagaaagccagtctggagaatttccagagaatgttgtgtgtgatcctagtgaagcactgcatgagcaggctgttcaggaaaggtggtgcgtcaaagaagaaagtcaagaaacaacacaagaagaacttgacactctgcgcactaaagaaattgacaagctggattgcatgggaaaaaatagcaatgcatggggcaccccagcaaagcaatgcacatataaaccatcacaagatatggtgggagaagcagagccaggacaaaggcatgtcaggacgtttccaagctcccctgagaacgactttgaaaaactggaatgccaagagcccacgactccccgaccgagtgcacagatcgaacagatatcacaattttctcctgatggaaaccacgaaaagcaagaacagccgagccctcaatctgttcttgatgtgttcttcctcgacggtgagttgcacaaagatatcttgaggacacgctacaacaccacaggggatggttcagaccaagggattttctgggaggacaagcatccgaggttatgttacataaaggaattgctagagctgtcagaattgtgtgcaaaccagaacttagaggtatggtatctagaagatgaattaatcagcccttgcttgttcgaagaagtacatggaggcaatcaaattgatggtacgaagcttttatttgactgcatttgcgaagctgtgacagaaatccaggacatatactttagaaaccctccatgcctatcttctctcacacacagcataagggcacctcctccagcgggacaaaaccttatctcagaaatcaataagcgtgttgaacgccatcttcactatcgatttccaagcacattagaccagctggttaacatggatcttgaaggtggcagttggatggatcttggatcagaaagcggagaggtcgctgtagtaatatgggactgcacactagatgagcttttggaagaattagtttacgacctgtggatttcaggcttcaatctcgcagccggtaaccatctgtagatttggtagagtcataccgttaaatagaagtaacatgtttgtgtggcaaaatcctgtgatttggacatggagggctgcatgagtcgttcttaaaggcatgagcatggtacgggatgttcactcatgtgaatttcatcgtgaccctcaacatattattatgtgtctagtgtcagttaggcctagtttggatactctagtaatgagtaggatttgagtggattaagatgtattgagagagtatttaatctattggggatttacacc

SEQ ID NO: 81952 - DNA, 2725 bp, Zea Mays
agcatctcgaccatagtgcagccctgccaacgcacctcatcgggccactggacgtctctctctcaaactttgtggcctcgcaacgcccacgtaggcaccacccctcctctccgcaggaaccaccatcaccaaggcgtagatccagcgagagggcccaaaaccaggctgacggccccaaaaccgccggaccccggtgaggccagggaggagacgcggttgtgggcgggaggggagaacagagcaactccctaccgacgccaaccacgcgcccctagcgctgtcggccacagagctgagtagggccgcctcgccctcacacccgctcgcgcccactaggatacggtgcccgaaatgccggtggaatgccacaggcaccggctccaacacggtcgccggcacagccagcagcgcccggccggcagcgggcctgagcgcctccgtcaccgttccggggcccgcgcgcaccctccggcagcggcgagacggagggaagaagggagagagaggcggcggcgacggctagggttacgcccgccgaagttgcccacgcgggaggctcttcaagcttatgttctataacatggaggaacccagttccagcaaaccaacagtcaaaagacttatggaggacgagctacgaaagctaaaacagctgaagcttccaaatgatgaggttgagagaatattagctgacctgggacatggtgcctgcctggacaaaagttcagcccaaaacagcaaagcgaagaagggagaccaaaatcacatcagaggtatcaccaccacggctgctccatctggatctttggatcccactgcttccaactgcataaaagaagcagaagaaaatgagcttgaatttgccttggcagatttcttaggacggatccatagaaattgcaacaataatggggagttatgtacggagatgaaagccctaatccaaacaaagattgcagagctagataatcctccgtgcacatttgcttatgagcagcaaacttcacggggtgacgaatatgatactgctggtggcaaacatcgatgtagcagtagtaaaactcagcccaaaaaattcagagatgcgctggagatgctaagctcagacaccgaacttttctttcagaagtcaaattcacgtattttggagagcgcccaaagaaaccaaaacagactgatagggaacaatctagagcccacaaaaatagcagataataccgactccaacaaagatccaaagagtctgaaccagcatgagttggccaccaggagatatggtaaagagagcaggaatatctttttctggaagaaggaaagatcctcaccaaggcagactgcacaaggaaccagtagttctcagccagttaacaaaatagttatactgaagccaaatccaaggagagagatcggccatgctgtggctgttagttcaacccaagctccaaaactaggtgcaaccgagagctcaaaattttcaattaaggaggtcagaaggagattcagaatcgtgactagtgaagctacaaaaggaataccctcagtgtctgaagataacctccaaaaaggtcagcattggctcaacagttcagctttcacaataataaaagataccagacagctcgctgaacagacctcagaagggaaattctcatcttcagttatgaaggattttagatcatcaaacagcggtaggcaaaagaaaagaaaaaatgatgggccaaccgaaaaaaacagtagcataattacgtcatccaaggatgaatctgtcttctatgacgaggccaggaaacatctaacagagattctcaaggacaaaagacaaacaaccaagcagcacccgacacttgagatctcaaggtccttggtgaggatgctttccttccctcagtccagcacatcatcacctaggagtagccctagggcaaaagactgcatttacctctcacctgaagaggcaagcattcgtgccatatacaagtcaaataaagatcttttagaagaagaaagccagtctggagaatttccagagaatgttgtgtgtgatcctagtgaagcactgcatgagcaggctgttcaggaaaggtggtgcgtcaaagaagaaagtcaagaaacaacacaagaaggtgcagaacttgacactctgcgcactaaagaaattgacaagctggattgcatgggaaaaaatagcaatgcatggggcaccccagcaaagcaatgcacatataaaccatcacaagatatggtgggagaagcagagccaggacaaaggcatgtcaggacgtttccaagctcccctgagaacgactttgaaaaactggaatgccaagagcccacgactccccgaccgagtgcacagatcgaacagatatcacaattttctcctgatggaaaccacgaaaagcaagaacagccgagccctcaatctgttcttgatgtgttcttcctcgacggtgagttgcacaaagatatcttgaggacacgctacaacaccacaggggatggttcagaccaagggattttctgggaggacaagcatccgaggttatgttacataaaggaattgctagagctgtcagaattgtgtgcaaaccagaacttagagcagccgaagacttcttttctgctatgcttgattgagggggctgtgtcttcacccagttctgcctgtggcctgggctagtttatattctactgcgctttatatttctggctctctcgagcttgt

SEQ ID NO: 81953 - DNA, 7701 bp, Zea Mays
cacaaattcagctactcttgtcctgacgatcacggccacggagggagggagagtcaacggtcagtgcgggggctatggtttgctttcttcccccgagcgcaagcgcaacccccgcaccaaacagacaacagcagtacagcagagcaaagcaaagaggaacaccatttcccttgcctgcttgccaacccaccaccaccaccaccaccacccacgaaggcagcagcaacccagcaccaccgatccatccatccactcgtcattcctccgccccgccgctcgccttcacccatctccgaccccgctccgccaccaaaccctaggctaccagctcttcccaccccgtgtgctccgctcccctgagggcggctcgcgcgccatttctccgctcgatttcctaaaaccgtactctcggattcgggatcgggccgcgacggggcctcctcttgctctcgctcttccgtccggtcggccgctgaggacaataaaggaggttgcgctcatgccgggggcgccgctcaggtgacttgctggggggccatgcataggtactccagcaacagcgctgggttcagcggtggcagggacggcgcgaggttggaagcctcgcccttctcgtcctcctcctctgggtaccctgtcagctccaggcggcagcagcagctagttccatacaagctaaagtgtgacaaagatccacttaataacaagcttgggccacctgacttctatccacaaacaccaaactgtcccgaagagacattaaccaaagagtatgcacaagctgggtacaaggagactgttgaaggaattgaggaagcaagagagattgtactcagccagatcccgtacttctgtaagccagatgctgtcataaagtgcaaggaggcactaaagaagcgtttaagagcgatcaatgaatctcgtgctcaaaagagaaaggctggccaagtttatggagttcctctttctggatctctactgatcaagcctggagtttacccagagcaaagaccatgtaatgaggacgcccgcagaaaatggattgaggcccttgctcagccaaacaagcgactgcgttcattgtctgagcacgttcctcatggttaccgtaggaaatcactttttgaaggtctaattcgatataatgttccgttgctaagagcaacatggtttattaaagtcacatacctgaaccagacccgacagacacctaacagtatttcagtagcgggttctgataaccaacgctctaatcagtggacaaaggatgttgttgaatatttacaacatattttggacgaattttgttctaaagagggtgcattcgtgcatccatcttttagagagcagtcatcaccaggacctactgctggaaccaatcagataaaaatgaaaactgaagcatctccagctgctggagacattgaagaacccttggtgcacttcaaatggcggtatatggttcgtctcatccaatggcatctcacagaagaattgcttgttccctcagtacttatcgaatggctatctaaccaactccaggagagagattcagttgacgttttagaacttctcttgcctattatgcttggtctggttgacaccattactctctcacaaacatatgtgcgcatgtttgtggagctactagtgagacgtctcaatgatgcttctgttgttgatagtccaaaaggaccttcagtttcttctgttatagcagagttactgcggtacatggtacttgcagtgccagatacatttatttctttggattgctttcctctcccatcttttgtggttcctgatgtatatggtagaggtgctttgttgaagataactagcagtggtggaatttcaagttctaaaaggtgtgatgcttatcggtatttgtcctgtggttatgctgtttgttcaattcaaaaacgtgcatatgatctcgcaacagttgctaaccctaaccttcaagcacgtggtgcagccaaagtggtacaggctttggacatagctcttgtcacaggaaatttgtcagtggcatattcttcactctttaatgatttatctgatacgttaatggaagagagatggattaaagaagtcagccccagtctgcagtcttctctgatgtggattgggactgttgagctatcccttatctgttctatatttttcctttgtgaatgggcgacatgtgattatcgtgattgtcgagcatctccctctcggaatgtgaaatttacaggaagaagagatttgtctcagatacatatggcagtgtctatcttgaagaataaaatggatgagatgaataatttgtctcgttctaagagtagcactcgcgttaccctgaataatatcaccaaaggttcttcactgaccgatgcttgtttgacagcagctgctgtggatgacacttctggattgcaaagtaatgcaaagaatgtggatgagaagaaggatacgaatgatatctttgaaagccctggtccactgcatgatatcattgtgtgttggttggatcagcatgaagttagcagtgttgcaggttttacccgggtggatgttctcatcgtagaacttatccgcaatggtatattttttcctcaggcttatgtcaggcagctaattattagtggaattactgacaagaacgacacaatgttggatgttgaaagaaaaaggaggcatcacagaactttgaagcagcttcctgggtcttctttatttgatattcttgaggaaactaggaccgtggaagagcaacagttatatgagatgatgtcgacatactccagcgagcggcgccttgttctctctgaactttcatgtgatcactcattttatgcaagtggcagaggcgagtatactgcaagttcctgcattcggaagcagagtgatcttccacttgcatcaggaggtgataagcatggaagagtgccagaacaagtagaagatgttaaagccctattgtcaagtctgttgggttttacatatccttccccagtggaatccgaacctcgccaaatcaaaacaagctttcaagaatcagcaacttcaacactctcacaagttgagactggagaagcaaaaagtggatgtgaggtttgtatgaggtccaaagggcagaaattggatgatactgccactcctttccaagggttttcattgattcaatcggacgaggaagatatttggtgggtgaggaaaggcacaaagttacaagaatctttcaacattgaacctgttcagaagtctgttaagcaaacttctaggggtagggcaaaagtggttcgtaaaacacaaagtcttgcacaacttgcagctgctagaattgaaggtagccaggggacatctaccagtcatgtctgtgaaagcaaaatgagctgtccccaccataaacctaatattgatggcgataatgttaaggattttgatcacacgagggtggcaaatctgactgaaattgggaagtcactaaaaagacttagattgcttgagaggcgatctgtctcttcttggttgttgaaaacagtaagacaacttattgaaggaaatgaaacaacggctgctaaagctaccaattccataagcattctttctttgcagtctgatgacaaaacgacatccaaatggaggctaggtgatgaagaactactgtcagttctctatttactggatacatgctgtgatttagtctcttgtgcaaggttccttgtatggttactagcgaaaattcgtggtggaatgggctcttcgggccaacctgggaggagttctatgcatacgaggaacagagatcaccaagtttgtcaggtcagcgaggcacttgtgttctcatctctgcttaggtacgagaacatacttcttgcggctgacatcctgcctgatgttctaagtgctttagtgaacagaaattctgtgtcagcaattgtcaggcatcctggttcaacagcttttgcttacgtacgatactttttgaagaaatatagagatgtggctggtgtggccaagtgggaaaaaagctttcggaccacttgtgatcagcgcctgttagctgagcttgataacgggcggtccattgatggcgaattgatttcttcttcgggggtttcagcaggcgaggagattgatgagcaggtccgccaaaagttgaatggaaggagttcaagacttgtgcagaatatgaaagaaatagtgcaacggcaagctgatgaaattcagcgcagtttgaaggaaaagaaagttctagcaactcccaggaatccacccacttttgagaaagaagatagctatcaaattgcacatgacattgtttcgggcttagtagaatgcatcaggcaaaatgggggtgcaaatccagatggagacctttcaacagttgcttctgctgtttctgcaattgttgcgaatgctgggcatgtgatagcaaaacatttggattttgcaggaggtaactatcaaggtgttaattctgtgagtaattcactaaatttcgttaggcacactttgcgtgtccatataaattctctttgcttgctgaaagaaactcttggggaccgcttcagccgtgcatttgaaatagctctggctgttgaaacttctggagctgttacagcagcttttgcttctccaaagatgcaccgcaatcagtttcaaccatctcctgaggcccatgatgcatatggaaatcatacaagtgatctcagcaactcagggaaaggttttgttgggagaactgctaaagtatctgctgctgtttctgctcttgtcgtgggggctgttgttcatggagctgttagtcttgagcggatggttgctgctttaaaaataaaagatggtttggatattctgcagctcctgagaggtttgaaatcaagttcgaatggtgtatcccgtcctactggaacttttaggattgaacattccacagatgttttggtacattggtttagggttctattggggaactgcagaactgtctatgatgggcttattgcagatattcttggagattcgtacattcttgcactctcaaggttgcagcagatgcttcctcttagtgtaatctttcctccggcctactcaatttttgccatggttctttggagacgatatatttttaaccgcgaagatccacagctttatcagtctctgtcaaacgcaataagcgatattaccagacatcaaccttttcgggagatttgcttccgcaatacacatcggctgtataatcttctggcttcagatgttggtgattcagagtttgcagcaatgcttgaaactcatagtcctgacaggaattcaaaaatactgccatttatacctctccgtgcccggctttttctggacgctcttattgattgcaacacaccaactattcagggagatggagcttcggagccttgtgaccccaaagataatgaattaaagctttcagagaggcttatgcaacttcttgatactcttcaacctgcaaagttccattggcaatgggttgagatgaggcttcttttagatgaacaagctcttatggaaaaagttgcagcaggcaagacagcacttgaatcacttcggtcgttatcccctaaagctgaggggtttaccctttctgatagtgaaaaagggtttactgaagtcattctgtcaaggctacttgctagacctgatgctgctcctctctattcagaagctgtccgccttcttggcaagcttcaggagtcccttgttatggatgtgaaatggattttacaagggcaagatgctattcttggccgcaggtcaacaagacagcagcttgttcatattgcccaacgaaaagggctttcaacaaaggcacaggtttggaaaccatggggttggtccagcttgcttagcgatgttattcctaataaaactgcaaaaaggaagttggaagtcacatcaattgaggaaggtgaagttgtggatgatactgttgatgctaaaaggcctagcaagactccccctcatagtgttgatagaagctttgaagcgattagatccataaataaatatttaactgagaaagcccttgctgaattagtattgccatgcatcgacagaagttctgctgatatccgtggtatactttctgttgatctgatcaaacagatggggactatcagtgaacatatcaaagcaatagcacggaatggtgctaaacaagctggttcagtcccttcaggtaatgaagtgccatcaagcaaatcaagtggtcgtaaaggaattcgaggtggaagcccaaacattggcagaagagctccggttggtaatgacccaagccctccgtcggcttctgctctgagggcagcattgtggttacgcctccaattcatcattaggttgcttccagtaatcatggcagataggagcatgagacaaacacttgcttctgcaatcctaggcctgcttgcaacgcgcatgatttatgaagatgcagatctgccccttccacctaccaatgcaactgctttaaggcgggaggtggattccctgctggagcctcccctggacgtcctgcttgatcggcctggtgaaagtctttttgagaggcttttatgtgttctccatgcacttcttggcagctacaaaccaagttggctgaagtcaaggtcagcctctaggtcgacaattagaatccaacgagatttttccgcatttgataacgaagcagccgagggtttacagtctgcgttggatcacatggaattgcctgaaacaatcaggcggaggatccaagcagccatgcctcttcttccaccatcccggcacccttctttgcaatgtcaacctccgcagttgtcgttggctgcattaacaccactccagagcagtacatctggtgtaggtccgcaacagaaaagttgttctgcgagctgggtgcccactaacgtctcaggcagaagcaaggcggcgttgccttcgcatgatcctgaaatggaggtagatccatggaatctgctcgaagatggcacaagctgcccctcaacagcatctggaagccatggcgcgagtggagtgacgggtgaccatgctaatctgaaagcgtgcagctggcttaagggtgctgtgagggtgaggaggacagaactgacctacattggctctttagacgatgacacctgacgtgtgtatgattattttggtgaattgtggaggaaattagtctcacctgttggcactggagtgaatggtggaaaccaaccatggcccttggctttaggatggttgttgttggtgtagaatacatacacatcgctgcccccgttttgttttgttttgttttgttttagggccttgtgggggcggctgtatataatggaaaaacatttgatccattactgaggcatggcccgagaagacaccttcaaatgggcttctgtgtaagcttgcttatttgagaagtaggaagccatgcagtagattttgtatccaaaagccgtgtacttgtttttgtctgatatgtaatctagcgcatgtcacacatatgtattcccttcctttgattgaagggctaatggtatgatgtcttttttttttgataaaacatgaggggtgagagcccctactggaaattaaataaaaaaatatgtacaaggagttacacgtttcttaattactcctgttctaaaatatagttttttctaaccctctttttttatgtccacattcaaataaatgagaggt

SEQ ID NO: 81954 - DNA, 7938 bp, Zea Mays
cacaaattcagctactcttgtcctgacgatcacggccacggagggagggagagtcaacggtcagtgcgggggctatggtttgctttcttcccccgagcgcaagcgcaacccccgcaccaaacagacaacagcagtacagcagagcaaagcaaagaggaacaccatttcccttgcctgcttgccaacccaccaccaccaccaccaccacccacgaaggcagcagcaacccagcaccaccgatccatccatccactcgtcattcctccgccccgccgctcgccttcacccatctccgaccccgctccgccaccaaaccctaggctaccagctcttcccaccccgtgtgctccgctcccctgagggcggctcgcgcgccatttctccgctcgatttcctaaaaccgtactctcggattcgggatcgggccgcgacggggcctcctcttgctctcgctcttccgtccggtcggccgctgaggacaataaaggaggttgcgctcatgccgggggcgccgctcaggtgacttgctggggggccatgcataggtactccagcaacagcgctgggttcagcggtggcagggacggcgcgaggttggaagcctcgcccttctcgtcctcctcctctgggtaccctgtcagctccaggcggcagcagcagctagttccatacaagctaaagtgtgacaaagatccacttaataacaagtatgtctaacttatcgaccaaagccacttcacatcaatgagagagctaacgactcttctcctatttgcatgttttttttttaatctcagactggttatgattctcttcctttttttggccacccctatcagctttgacatgatatctgcttataaaacgacgatttcatatattgttcttctatttataactaagaactgttgatttgtcccacgatatggtttcgttggatccttgttgctccttttacatgtctcttctgtaggcttgggccacctgacttctatccacaaacaccaaactgtcccgaagagacattaaccaaagagtatgcacaagctgggtacaaggagactgttgaaggaattgaggaagcaagagagattgtactcagccagatcccgtacttctgtaagccagatgctgtcataaagtgcaaggaggcactaaagaagcgtttaagagcgatcaatgaatctcgtgctcaaaagagaaaggctggccaagtttatggagttcctctttctggatctctactgatcaagcctggagtttacccagagcaaagaccatgtaatgaggacgcccgcagaaaatggattgaggcccttgctcagccaaacaagcgactgcgttcattgtctgagcacgttcctcatggttaccgtaggaaatcactttttgaaggtctaattcgatataatgttccgttgctaagagcaacatggtttattaaagtcacatacctgaaccagctacagacccgacagacacctaacagtatttcagtagcgggttctgataaccaacgctctaatcagtggacaaaggatgttgttgaatatttacaacatattttggacgaattttgttctaaagagggtgcattcgtgcatccatcttttagagagcagtcatcaccaggacctactgctggaaccaatcagataaaaatgaaaactgaagcatctccagctgctggagacattgaagaacccttggtgcacttcaaatggcggtatatggttcgtctcatccaatggcatctcacagaagaattgcttgttccctcagtacttatcgaatggctatctaaccaactccaggagagagattcagttgacgttttagaacttctcttgcctattatgcttggtctggttgacaccattactctctcacaaacatatgtgcgcatgtttgtggagctactagtgagacgtctcaatgatgcttctgttgttgatagtccaaaaggaccttcagtttcttctgttatagcagagttactgcggtacatggtacttgcagtgccagatacatttatttctttggattgctttcctctcccatcttttgtggttcctgatgtatatggtagaggtgctttgttgaagataactagcagtggtggaatttcaagttctaaaaggtgtgatgcttatcggtatttgtcctgtggttatgctgtttgttcaattcaaaaacgtgcatatgatctcgcaacagttgctaaccctaaccttcaagcacgtggtgcagccaaagtggtacaggctttggacatagctcttgtcacaggaaatttgtcagtggcatattcttcactctttaatgatttatctgatacgttaatggaagagagatggattaaagaagtcagccccagtctgcagtcttctctgatgtggattgggactgttgagctatcccttatctgttctatatttttcctttgtgaatgggcgacatgtgattatcgtgattgtcgagcatctccctctcggaatgtgaaatttacaggaagaagagatttgtctcagatacatatggcagtgtctatcttgaagaataaaatggatgagatgaataatttgtctcgttctaagagtagcactcgcgttaccctgaataatatcaccaaaggttcttcactgaccgatgcttgtttgacagcagctgctgtggatgacacttctggattgcaaagtaatgcaaagaatgtggatgagaagaaggatacgaatgatatctttgaaagccctggtccactgcatgatatcattgtgtgttggttggatcagcatgaagttagcagtgttgcaggttttacccgggtggatgttctcatcgtagaacttatccgcaatggtatattttttcctcaggcttatgtcaggcagctaattattagtggaattactgacaagaacgacacaatgttggatgttgaaagaaaaaggaggcatcacagaactttgaagcagcttcctgggtcttctttatttgatattcttgaggaaactaggaccgtggaagagcaacagttatatgagatgatgtcgacatactccagcgagcggcgccttgttctctctgaactttcatgtgatcactcattttatgcaagtggcagaggcgagtatactgcaagttcctgcattcggaagcagagtgatcttccacttgcatcaggaggtgataagcatggaagagtgccagaacaagtagaagatgttaaagccctattgtcaagtctgttgggttttacatatccttccccagtggaatccgaacctcgccaaatcaaaacaagctttcaagaatcagcaacttcaacactctcacaagttgagactggagaagcaaaaagtggatgtgaggtttgtatgaggtccaaagggcagaaattggatgatactgccactcctttccaagggttttcattgattcaatcggacgaggaagatatttggtgggtgaggaaaggcacaaagttacaagaatctttcaacattgaacctgttcagaagtctgttaagcaaacttctaggggtagggcaaaagtggttcgtaaaacacaaagtcttgcacaacttgcagctgctagaattgaaggtagccaggggacatctaccagtcatgtctgtgaaagcaaaatgagctgtccccaccataaacctaatattgatggcgataatgttaaggattttgatcacacgagggtggcaaatctgactgaaattgggaagtcactaaaaagacttagattgcttgagaggcgatctgtctcttcttggttgttgaaaacagtaagacaacttattgaaggaaatgaaacaacggctgctaaagctaccaattccataagcattctttctttgcagtctgatgacaaaacgacatccaaatggaggctaggtgatgaagaactactgtcagttctctatttactggatacatgctgtgatttagtctcttgtgcaaggttccttgtatggttactagcgaaaattcgtggtggaatgggctcttcgggccaacctgggaggagttctatgcatacgaggaacagagatcaccaagtttgtcaggtacgagaacatacttcttgcggctgacatcctgcctgatgttctaagtgctttagtgaacagaaattctgtgtcagcaattgtcaggcatcctggttcaacagcttttgcttacgtacgatactttttgaagaaatatagagatgtggctggtgtggccaagtgggaaaaaagctttcggaccacttgtgatcagcgcctgttagctgagcttgataacgggcggtccattgatggcgaattgatttcttcttcgggggtttcagcaggcgaggagattgatgagcaggtccgccaaaagttgaatggaaggagttcaagacttgtgcagaatatgaaagaaatagtgcaacggcaagctgatgaaattcagcgcagtttgaaggaaaagaaagttctagcaactcccaggaatccacccacttttgagaaagaagatagctatcaaattgcacatgacattgtttcgggcttagtagaatgcatcaggcaaaatgggggtgcaaatccagatggagacctttcaacagttgcttctgctgtttctgcaattgttgcgaatgctgggcatgtgatagcaaaacatttggattttgcaggaggtaactatcaaggtgttaattctgtgagtaattcactaaatttcgttaggcacactttgcgtgtccatataaattctctttgcttgctgaaagaaactcttggggaccgcttcagccgtgcatttgaaatagctctggctgttgaaacttctggagctgttacagcagcttttgcttctccaaagatgcaccgcaatcagtttcaaccatctcctgaggcccatgatgcatatggaaatcatacaagtgatctcagcaactcagggaaaggttttgttgggagaactgctaaagtatctgctgctgtttctgctcttgtcgtgggggctgttgttcatggagctgttagtcttgagcggatggttgctgctttaaaaataaaagatggtttggatattctgcagctcctgagaggtttgaaatcaagttcgaatggtgtatcccgtcctactggaacttttaggattgaacattccacagatgttttggtacattggtttagggttctattggggaactgcagaactgtctatgatgggcttattgcagatattcttggagattcgtacattcttgcactctcaaggttgcagcagatgcttcctcttagtgtaatctttcctccggcctactcaatttttgccatggttctttggagacgatatatttttaaccgcgaagatccacagctttatcagtctctgtcaaacgcaataagcgatattaccagacatcaaccttttcgggagatttgcttccgcaatacacatcggctgtataatcttctggcttcagatgttggtgattcagagtttgcagcaatgcttgaaactcatagtcctgacaggaattcaaaaatactgccatttatacctctccgtgcccggctttttctggacgctcttattgattgcaacacaccaactattcagggagatggagcttcggagccttgtgaccccaaagataatgaattaaagctttcagagaggcttatgcaacttcttgatactcttcaacctgcaaagttccattggcaatgggttgagatgaggcttcttttagatgaacaagctcttatggaaaaagttgcagcaggcaagacagcacttgaatcacttcggtcgttatcccctaaagctgaggggtttaccctttctgatagtgaaaaagggtttactgaagtcattctgtcaaggctacttgctagacctgatgctgctcctctctattcagaagctgtccgccttcttggcaagcttcaggagtcccttgttatggatgtgaaatggattttacaagggcaagatgctattcttggccgcaggtcaacaagacagcagcttgttcatattgcccaacgaaaagggctttcaacaaaggcacaggtttggaaaccatggggttggtccagcttgcttagcgatgttattcctaataaaactgcaaaaaggaagttggaagtcacatcaattgaggaaggtgaagttgtggatgatactgttgatgctaaaaggcctagcaagactccccctcatagtgttgatagaagctttgaagcgattagatccataaataaatatttaactgagaaagcccttgctgaattagtattgccatgcatcgacagaagttctgctgatatccgtggtatactttctgttgatctgatcaaacagatggggactatcagtgaacatatcaaagcaatagcacggaatggtgctaaacaagctggttcagtcccttcaggtaatgaagtgccatcaagcaaatcaagtggtcgtaaaggaattcgaggtggaagcccaaacattggcagaagagctccggttggtaatgacccaagccctccgtcggcttctgctctgagggcagcattgtggttacgcctccaattcatcattaggttgcttccagtaatcatggcagataggagcatgagacaaacacttgcttctgcaatcctaggcctgcttgcaacgcgcatgatttatgaagatgcagatctgccccttccacctaccaatgcaactgctttaaggcgggaggtggattccctgctggagcctcccctggacgtcctgcttgatcggcctggtgaaagtctttttgagaggcttttatgtgttctccatgcacttcttggcagctacaaaccaagttggctgaagtcaaggtcagcctctaggtcgacaattagaatccaacgagatttttccgcatttgataacgaagcagccgagggtttacagtctgcgttggatcacatggaattgcctgaaacaatcaggcggaggatccaagcagccatgcctcttcttccaccatcccggcacccttctttgcaatgtcaacctccgcagttgtcgttggctgcattaacaccactccagagcagtacatctggtgtaggtccgcaacagaaaagttgttctgcgagctgggtgcccactaacgtctcaggcagaagcaaggcggcgttgccttcgcatgatcctgaaatggaggtagatccatggaatctgctcgaagatggcacaagctgcccctcaacagcatctggaagccatggcgcgagtggagtgacgggtgaccatgctaatctgaaagcgtgcagctggcttaagggtgctgtgagggtgaggaggacagaactgacctacattggctctttagacgatgacacctgacgtgtgtatgattattttggtgaattgtggaggaaattagtctcacctgttggcactggagtgaatggtggaaaccaaccatggcccttggctttaggatggttgttgttggtgtagaatacatacacatcgctgcccccgttttgttttgttttgttttgttttagggccttgtgggggcggctgtatataatggaaaaacatttgatccattactgaggcatggcccgagaagacaccttcaaatgggcttctgtgtaagcttgcttatttgagaagtaggaagccatgcagtagattttgtatccaaaagccgtgtacttgtttttgtctgatatgtaatctagcgcatgtcacacatatgtattcccttcctttgattgaagggctaatggtatgatgtcttttttttttgataaaacatgaggggtgagagcccctactggaaattaaataaaaaaatatgtacaaggagttacacgtttcttaattactcctgttctaaaatatagttttttctaaccctctttttttatgtccacattcaaataaatgagaggt

SEQ ID NO: 81955 - DNA, 7672 bp, Zea Mays
cacaaattcagctactcttgtcctgacgatcacggccacggagggagggagagtcaacggtcagtgcgggggctatggtttgctttcttcccccgagcgcaagcgcaacccccgcaccaaacagacaacagcagtacagcagagcaaagcaaagaggaacaccatttcccttgcctgcttgccaacccaccaccaccaccaccaccacccacgaaggcagcagcaacccagcaccaccgatccatccatccactcgtcattcctccgccccgccgctcgccttcacccatctccgaccccgctccgccaccaaaccctaggctaccagctcttcccaccccgtgtgctccgctcccctgagggcggctcgcgcgccatttctccgctcgatttcctaaaaccgtactctcggattcgggatcgggccgcgacggggcctcctcttgctctcgctcttccgtccggtcggccgctgaggacaataaaggaggttgcgctcatgccgggggcgccgctcaggtgacttgctggggggccatgcataggtactccagcaacagcgctgggttcagcggtggcagggacggcgcgaggttggaagcctcgcccttctcgtcctcctcctctgggtaccctgtcagctccaggcggcagcagcagctagttccatacaagctaaagtgtgacaaagatccacttaataacaagcttgggccacctgacttctatccacaaacaccaaactgtcccgaagagacattaaccaaagagtatgcacaagctgggtacaaggagactgttgaaggaattgaggaagcaagagagattgtactcagccagatcccgtacttctgtaagccagatgctgtcataaagtgcaaggaggcactaaagaagcgtttaagagcgatcaatgaatctcgtgctcaaaagagaaaggctggccaagtttatggagttcctctttctggatctctactgatcaagcctggagtttacccagagcaaagaccatgtaatgaggacgcccgcagaaaatggattgaggcccttgctcagccaaacaagcgactgcgttcattgtctgagcacgttcctcatggttaccgtaggaaatcactttttgaaggtctaattcgatataatgttccgttgctaagagcaacatggtttattaaagtcacatacctgaaccagctacagacccgacagacacctaacagtatttcagtagcgggttctgataaccaacgctctaatcagtggacaaaggatgttgttgaatatttacaacatattttggacgaattttgttctaaagagggtgcattcgtgcatccatcttttagagagcagtcatcaccaggacctactgctggaaccaatcagataaaaatgaaaactgaagcatctccagctgctggagacattgaagaacccttggtgcacttcaaatggcggtatatggttcgtctcatccaatggcatctcacagaagaattgcttgttccctcagtacttatcgaatggctatctaaccaactccaggagagagattcagttgacgttttagaacttctcttgcctattatgcttggtctggttgacaccattactctctcacaaacatatgtgcgcatgtttgtggagctactagtgagacgtctcaatgatgcttctgttgttgatagtccaaaaggaccttcagtttcttctgttatagcagagttactgcggtacatggtacttgcagtgccagatacatttatttctttggattgctttcctctcccatcttttgtggttcctgatgtatatggtagaggtgctttgttgaagataactagcagtggtggaatttcaagttctaaaaggtgtgatgcttatcggtatttgtcctgtggttatgctgtttgttcaattcaaaaacgtgcatatgatctcgcaacagttgctaaccctaaccttcaagcacgtggtgcagccaaagtggtacaggctttggacatagctcttgtcacaggaaatttgtcagtggcatattcttcactctttaatgatttatctgatacgttaatggaagagagatggattaaagaagtcagccccagtctgcagtcttctctgatgtggattgggactgttgagctatcccttatctgttctatatttttcctttgtgaatgggcgacatgtgattatcgtgattgtcgagcatctccctctcggaatgtgaaatttacaggaagaagagatttgtctcagatacatatggcagtgtctatcttgaagaataaaatggatgagatgaataatttgtctcgttctaagagtagcactcgcgttaccctgaataatatcaccaaaggttcttcactgaccgatgcttgtttgacagcagctgctgtggatgacacttctggattgcaaagtaatgcaaagaatgtggatgagaagaaggatacgaatgatatctttgaaagccctggtccactgcatgatatcattgtgtgttggttggatcagcatgaagttagcagtgttgcaggttttacccgggtggatgttctcatcgtagaacttatccgcaatggtatattttttcctcaggcttatgtcaggcagctaattattagtggaattactgacaagaacgacacaatgttggatgttgaaagaaaaaggaggcatcacagaactttgaagcagcttcctgggtcttctttatttgatattcttgaggaaactaggaccgtggaagagcaacagttatatgagatgatgtcgacatactccagcgagcggcgccttgttctctctgaactttcatgtgatcactcattttatgcaagtggcagaggcgagtatactgcaagttcctgcattcggaagcagagtgatcttccacttgcatcaggaggtgataagcatggaagagtgccagaacaagtagaagatgttaaagccctattgtcaagtctgttgggttttacatatccttccccagtggaatccgaacctcgccaaatcaaaacaagctttcaagaatcagcaacttcaacactctcacaagttgagactggagaagcaaaaagtggatgtgaggtttgtatgaggtccaaagggcagaaattggatgatactgccactcctttccaagggttttcattgattcaatcggacgaggaagatatttggtgggtgaggaaaggcacaaagttacaagaatctttcaacattgaacctgttcagaagtctgttaagcaaacttctaggggtagggcaaaagtggttcgtaaaacacaaagtcttgcacaacttgcagctgctagaattgaaggtagccaggggacatctaccagtcatgtctgtgaaagcaaaatgagctgtccccaccataaacctaatattgatggcgataatgttaaggattttgatcacacgagggtggcaaatctgactgaaattgggaagtcactaaaaagacttagattgcttgagaggcgatctgtctcttcttggttgttgaaaacagtaagacaacttattgaaggaaatgaaacaacggctgctaaagctaccaattccataagcattctttctttgcagtctgatgacaaaacgacatccaaatggaggctaggtgatgaagaactactgtcagttctctatttactggatacatgctgtgatttagtctcttgtgcaaggttccttgtatggttactagcgaaaattcgtggtggaatgggctcttcgggccaacctgggaggagttctatgcatacgaggaacagagatcaccaagtttgtcaggtacgagaacatacttcttgcggctgacatcctgcctgatgttctaagtgctttagtgaacagaaattctgtgtcagcaattgtcaggcatcctggttcaacagcttttgcttacgtacgatactttttgaagaaatatagagatgtggctggtgtggccaagtgggaaaaaagctttcggaccacttgtgatcagcgcctgttagctgagcttgataacgggcggtccattgatggcgaattgatttcttcttcgggggtttcagcaggcgaggagattgatgagcaggtccgccaaaagttgaatggaaggagttcaagacttgtgcagaatatgaaagaaatagtgcaacggcaagctgatgaaattcagcgcagtttgaaggaaaagaaagttctagcaactcccaggaatccacccacttttgagaaagaagatagctatcaaattgcacatgacattgtttcgggcttagtagaatgcatcaggcaaaatgggggtgcaaatccagatggagacctttcaacagttgcttctgctgtttctgcaattgttgcgaatgctgggcatgtgatagcaaaacatttggattttgcaggaggtaactatcaaggtgttaattctgtgagtaattcactaaatttcgttaggcacactttgcgtgtccatataaattctctttgcttgctgaaagaaactcttggggaccgcttcagccgtgcatttgaaatagctctggctgttgaaacttctggagctgttacagcagcttttgcttctccaaagatgcaccgcaatcagtttcaaccatctcctgaggcccatgatgcatatggaaatcatacaagtgatctcagcaactcagggaaaggttttgttgggagaactgctaaagtatctgctgctgtttctgctcttgtcgtgggggctgttgttcatggagctgttagtcttgagcggatggttgctgctttaaaaataaaagatggtttggatattctgcagctcctgagaggtttgaaatcaagttcgaatggtgtatcccgtcctactggaacttttaggattgaacattccacagatgttttggtacattggtttagggttctattggggaactgcagaactgtctatgatgggcttattgcagatattcttggagattcgtacattcttgcactctcaaggttgcagcagatgcttcctcttagtgtaatctttcctccggcctactcaatttttgccatggttctttggagacgatatatttttaaccgcgaagatccacagctttatcagtctctgtcaaacgcaataagcgatattaccagacatcaaccttttcgggagatttgcttccgcaatacacatcggctgtataatcttctggcttcagatgttggtgattcagagtttgcagcaatgcttgaaactcatagtcctgacaggaattcaaaaatactgccatttatacctctccgtgcccggctttttctggacgctcttattgattgcaacacaccaactattcagggagatggagcttcggagccttgtgaccccaaagataatgaattaaagctttcagagaggcttatgcaacttcttgatactcttcaacctgcaaagttccattggcaatgggttgagatgaggcttcttttagatgaacaagctcttatggaaaaagttgcagcaggcaagacagcacttgaatcacttcggtcgttatcccctaaagctgaggggtttaccctttctgatagtgaaaaagggtttactgaagtcattctgtcaaggctacttgctagacctgatgctgctcctctctattcagaagctgtccgccttcttggcaagcttcaggagtcccttgttatggatgtgaaatggattttacaagggcaagatgctattcttggccgcaggtcaacaagacagcagcttgttcatattgcccaacgaaaagggctttcaacaaaggcacaggtttggaaaccatggggttggtccagcttgcttagcgatgttattcctaataaaactgcaaaaaggaagttggaagtcacatcaattgaggaaggtgaagttgtggatgatactgttgatgctaaaaggcctagcaagactccccctcatagtgttgatagaagctttgaagcgattagatccataaataaatatttaactgagaaagcccttgctgaattagtattgccatgcatcgacagaagttctgctgatatccgtggtatactttctgttgatctgatcaaacagatggggactatcagtgaacatatcaaagcaatagcacggaatggtgctaaacaagctggttcagtcccttcaggtaatgaagtgccatcaagcaaatcaagtggtcgtaaaggaattcgaggtggaagcccaaacattggcagaagagctccggttggtaatgacccaagccctccgtcggcttctgctctgagggcagcattgtggttacgcctccaattcatcattaggttgcttccagtaatcatggcagataggagcatgagacaaacacttgcttctgcaatcctaggcctgcttgcaacgcgcatgatttatgaagatgcagatctgccccttccacctaccaatgcaactgctttaaggcgggaggtggattccctgctggagcctcccctggacgtcctgcttgatcggcctggtgaaagtctttttgagaggcttttatgtgttctccatgcacttcttggcagctacaaaccaagttggctgaagtcaaggtcagcctctaggtcgacaattagaatccaacgagatttttccgcatttgataacgaagcagccgagggtttacagtctgcgttggatcacatggaattgcctgaaacaatcaggcggaggatccaagcagccatgcctcttcttccaccatcccggcacccttctttgcaatgtcaacctccgcagttgtcgttggctgcattaacaccactccagagcagtacatctggtgtaggtccgcaacagaaaagttgttctgcgagctgggtgcccactaacgtctcaggcagaagcaaggcggcgttgccttcgcatgatcctgaaatggaggtagatccatggaatctgctcgaagatggcacaagctgcccctcaacagcatctggaagccatggcgcgagtggagtgacgggtgaccatgctaatctgaaagcgtgcagctggcttaagggtgctgtgagggtgaggaggacagaactgacctacattggctctttagacgatgacacctgacgtgtgtatgattattttggtgaattgtggaggaaattagtctcacctgttggcactggagtgaatggtggaaaccaaccatggcccttggctttaggatggttgttgttggtgtagaatacatacacatcgctgcccccgttttgttttgttttgttttgttttagggccttgtgggggcggctgtatataatggaaaaacatttgatccattactgaggcatggcccgagaagacaccttcaaatgggcttctgtgtaagcttgcttatttgagaagtaggaagccatgcagtagattttgtatccaaaagccgtgtacttgtttttgtctgatatgtaatctagcgcatgtcacacatatgtattcccttcctttgattgaagggctaatggtatgatgtcttttttttttgataaaacatgaggggtgagagcccctactggaaattaaataaaaaaatatgtacaaggagttacacgtttcttaattactcctgttctaaaatatagttttttctaaccctctttttttatgtccacattcaaataaatgagaggt

SEQ ID NO: 81956 - DNA, 7707 bp, Zea Mays
cacaaattcagctactcttgtcctgacgatcacggccacggagggagggagagtcaacggtcagtgcgggggctatggtttgctttcttcccccgagcgcaagcgcaacccccgcaccaaacagacaacagcagtacagcagagcaaagcaaagaggaacaccatttcccttgcctgcttgccaacccaccaccaccaccaccaccacccacgaaggcagcagcaacccagcaccaccgatccatccatccactcgtcattcctccgccccgccgctcgccttcacccatctccgaccccgctccgccaccaaaccctaggctaccagctcttcccaccccgtgtgctccgctcccctgagggcggctcgcgcgccatttctccgctcgatttcctaaaaccgtactctcggattcgggatcgggccgcgacggggcctcctcttgctctcgctcttccgtccggtcggccgctgaggacaataaaggaggttgcgctcatgccgggggcgccgctcaggtgacttgctggggggccatgcataggtactccagcaacagcgctgggttcagcggtggcagggacggcgcgaggttggaagcctcgcccttctcgtcctcctcctctgggtaccctgtcagctccaggcggcagcagcagctagttccatacaagctaaagtgtgacaaagatccacttaataacaagcttgggccacctgacttctatccacaaacaccaaactgtcccgaagagacattaaccaaagagtatgcacaagctgggtacaaggagactgttgaaggaattgaggaagcaagagagattgtactcagccagatcccgtacttctgtaagccagatgctgtcataaagtgcaaggaggcactaaagaagcgtttaagagcgatcaatgaatctcgtgctcaaaagagaaaggctggccaagtttatggagttcctctttctggatctctactgatcaagcctggagtttacccagagcaaagaccatgtaatgaggacgcccgcagaaaatggattgaggcccttgctcagccaaacaagcgactgcgttcattgtctgagcacgttcctcatggttaccgtaggaaatcactttttgaaggtctaattcgatataatgttccgttgctaagagcaacatggtttattaaagtcacatacctgaaccagctacagacccgacagacacctaacagtatttcagtagcgggttctgataaccaacgctctaatcagtggacaaaggatgttgttgaatatttacaacatattttggacgaattttgttctaaagagggtgcattcgtgcatccatcttttagagagcagtcatcaccaggacctactgctggaaccaatcagataaaaatgaaaactgaagcatctccagctgctggagacattgaagaacccttggtgcacttcaaatggcggtatatggttcgtctcatccaatggcatctcacagaagaattgcttgttccctcagtacttatcgaatggctatctaaccaactccaggagagagattcagttgacgttttagaacttctcttgcctattatgcttggtctggttgacaccattactctctcacaaacatatgtgcgcatgtttgtggagctactagtgagacgtctcaatgatgcttctgttgttgatagtccaaaaggaccttcagtttcttctgttatagcagagttactgcggtacatggtacttgcagtgccagatacatttatttctttggattgctttcctctcccatcttttgtggttcctgatgtatatggtagaggtgctttgttgaagataactagcagtggtggaatttcaagttctaaaaggtgtgatgcttatcggtatttgtcctgtggttatgctgtttgttcaattcaaaaacgtgcatatgatctcgcaacagttgctaaccctaaccttcaagcacgtggtgcagccaaagtggtacaggctttggacatagctcttgtcacaggaaatttgtcagtggcatattcttcactctttaatgatttatctgatacgttaatggaagagagatggattaaagaagtcagccccagtctgcagtcttctctgatgtggattgggactgttgagctatcccttatctgttctatatttttcctttgtgaatgggcgacatgtgattatcgtgattgtcgagcatctccctctcggaatgtgaaatttacaggaagaagagatttgtctcagatacatatggcagtgtctatcttgaagaataaaatggatgagatgaataatttgtctcgttctaagagtagcactcgcgttaccctgaataatatcaccaaaggttcttcactgaccgatgcttgtttgacagcagctgctgtggatgacacttctggattgcaaagtaatgcaaagaatgtggatgagaagaaggatacgaatgatatctttgaaagccctggtccactgcatgatatcattgtgtgttggttggatcagcatgaagttagcagtgttgcaggttttacccgggtggatgttctcatcgtagaacttatccgcaatggtatattttttcctcaggcttatgtcaggcagctaattattagtggaattactgacaagaacgacacaatgttggatgttgaaagaaaaaggaggcatcacagaactttgaagcagcttcctgggtcttctttatttgatattcttgaggaaactaggaccgtggaagagcaacagttatatgagatgatgtcgacatactccagcgagcggcgccttgttctctctgaactttcatgtgatcactcattttatgcaagtggcagaggcgagtatactgcaagttcctgcattcggaagcagagtgatcttccacttgcatcaggaggtgataagcatggaagagtgccagaacaagtagaagatgttaaagccctattgtcaagtctgttgggttttacatatccttccccagtggaatccgaacctcgccaaatcaaaacaagctttcaagaatcagcaacttcaacactctcacaagttgagactggagaagcaaaaagtggatgtgaggtttgtatgaggtccaaagggcagaaattggatgatactgccactcctttccaagggttttcattgattcaatcggacgaggaagatatttggtgggtgaggaaaggcacaaagttacaagaatctttcaacattgaacctgttcagaagtctgttaagcaaacttctaggggtagggcaaaagtggttcgtaaaacacaaagtcttgcacaacttgcagctgctagaattgaaggtagccaggggacatctaccagtcatgtctgtgaaagcaaaatgagctgtccccaccataaacctaatattgatggcgataatgttaaggattttgatcacacgagggtggcaaatctgactgaaattgggaagtcactaaaaagacttagattgcttgagaggcgatctgtctcttcttggttgttgaaaacagtaagacaacttattgaaggaaatgaaacaacggctgctaaagctaccaattccataagcattctttctttgcagtctgatgacaaaacgacatccaaatggaggctaggtgatgaagaactactgtcagttctctatttactggatacatgctgtgatttagtctcttgtgcaaggttccttgtatggttactagcgaaaattcgtggtggaatgggctcttcgggccaacctgggaggagttctatgcatacgaggaacagagatcaccaagtttgtcaggtcagcgaggcacttgtgttctcatctctgcttaggtacgagaacatacttcttgcggctgacatcctgcctgatgttctaagtgctttagtgaacagaaattctgtgtcagcaattgtcaggcatcctggttcaacagcttttgcttacgtacgatactttttgaagaaatatagagatgtggctggtgtggccaagtgggaaaaaagctttcggaccacttgtgatcagcgcctgttagctgagcttgataacgggcggtccattgatggcgaattgatttcttcttcgggggtttcagcaggcgaggagattgatgagcaggtccgccaaaagttgaatggaaggagttcaagacttgtgcagaatatgaaagaaatagtgcaacggcaagctgatgaaattcagcgcagtttgaaggaaaagaaagttctagcaactcccaggaatccacccacttttgagaaagaagatagctatcaaattgcacatgacattgtttcgggcttagtagaatgcatcaggcaaaatgggggtgcaaatccagatggagacctttcaacagttgcttctgctgtttctgcaattgttgcgaatgctgggcatgtgatagcaaaacatttggattttgcaggaggtaactatcaaggtgttaattctgtgagtaattcactaaatttcgttaggcacactttgcgtgtccatataaattctctttgcttgctgaaagaaactcttggggaccgcttcagccgtgcatttgaaatagctctggctgttgaaacttctggagctgttacagcagcttttgcttctccaaagatgcaccgcaatcagtttcaaccatctcctgaggcccatgatgcatatggaaatcatacaagtgatctcagcaactcagggaaaggttttgttgggagaactgctaaagtatctgctgctgtttctgctcttgtcgtgggggctgttgttcatggagctgttagtcttgagcggatggttgctgctttaaaaataaaagatggtttggatattctgcagctcctgagaggtttgaaatcaagttcgaatggtgtatcccgtcctactggaacttttaggattgaacattccacagatgttttggtacattggtttagggttctattggggaactgcagaactgtctatgatgggcttattgcagatattcttggagattcgtacattcttgcactctcaaggttgcagcagatgcttcctcttagtgtaatctttcctccggcctactcaatttttgccatggttctttggagacgatatatttttaaccgcgaagatccacagctttatcagtctctgtcaaacgcaataagcgatattaccagacatcaaccttttcgggagatttgcttccgcaatacacatcggctgtataatcttctggcttcagatgttggtgattcagagtttgcagcaatgcttgaaactcatagtcctgacaggaattcaaaaatactgccatttatacctctccgtgcccggctttttctggacgctcttattgattgcaacacaccaactattcagggagatggagcttcggagccttgtgaccccaaagataatgaattaaagctttcagagaggcttatgcaacttcttgatactcttcaacctgcaaagttccattggcaatgggttgagatgaggcttcttttagatgaacaagctcttatggaaaaagttgcagcaggcaagacagcacttgaatcacttcggtcgttatcccctaaagctgaggggtttaccctttctgatagtgaaaaagggtttactgaagtcattctgtcaaggctacttgctagacctgatgctgctcctctctattcagaagctgtccgccttcttggcaagcttcaggagtcccttgttatggatgtgaaatggattttacaagggcaagatgctattcttggccgcaggtcaacaagacagcagcttgttcatattgcccaacgaaaagggctttcaacaaaggcacaggtttggaaaccatggggttggtccagcttgcttagcgatgttattcctaataaaactgcaaaaaggaagttggaagtcacatcaattgaggaaggtgaagttgtggatgatactgttgatgctaaaaggcctagcaagactccccctcatagtgttgatagaagctttgaagcgattagatccataaataaatatttaactgagaaagcccttgctgaattagtattgccatgcatcgacagaagttctgctgatatccgtggtatactttctgttgatctgatcaaacagatggggactatcagtgaacatatcaaagcaatagcacggaatggtgctaaacaagctggttcagtcccttcaggtaatgaagtgccatcaagcaaatcaagtggtcgtaaaggaattcgaggtggaagcccaaacattggcagaagagctccggttggtaatgacccaagccctccgtcggcttctgctctgagggcagcattgtggttacgcctccaattcatcattaggttgcttccagtaatcatggcagataggagcatgagacaaacacttgcttctgcaatcctaggcctgcttgcaacgcgcatgatttatgaagatgcagatctgccccttccacctaccaatgcaactgctttaaggcgggaggtggattccctgctggagcctcccctggacgtcctgcttgatcggcctggtgaaagtctttttgagaggcttttatgtgttctccatgcacttcttggcagctacaaaccaagttggctgaagtcaaggtcagcctctaggtcgacaattagaatccaacgagatttttccgcatttgataacgaagcagccgagggtttacagtctgcgttggatcacatggaattgcctgaaacaatcaggcggaggatccaagcagccatgcctcttcttccaccatcccggcacccttctttgcaatgtcaacctccgcagttgtcgttggctgcattaacaccactccagagcagtacatctggtgtaggtccgcaacagaaaagttgttctgcgagctgggtgcccactaacgtctcaggcagaagcaaggcggcgttgccttcgcatgatcctgaaatggaggtagatccatggaatctgctcgaagatggcacaagctgcccctcaacagcatctggaagccatggcgcgagtggagtgacgggtgaccatgctaatctgaaagcgtgcagctggcttaagggtgctgtgagggtgaggaggacagaactgacctacattggctctttagacgatgacacctgacgtgtgtatgattattttggtgaattgtggaggaaattagtctcacctgttggcactggagtgaatggtggaaaccaaccatggcccttggctttaggatggttgttgttggtgtagaatacatacacatcgctgcccccgttttgttttgttttgttttgttttagggccttgtgggggcggctgtatataatggaaaaacatttgatccattactgaggcatggcccgagaagacaccttcaaatgggcttctgtgtaagcttgcttatttgagaagtaggaagccatgcagtagattttgtatccaaaagccgtgtacttgtttttgtctgatatgtaatctagcgcatgtcacacatatgtattcccttcctttgattgaagggctaatggtatgatgtcttttttttttgataaaacatgaggggtgagagcccctactggaaattaaataaaaaaatatgtacaaggagttacacgtttcttaattactcctgttctaaaatatagttttttctaaccctctttttttatgtccacattcaaataaatgagaggt

SEQ ID NO: 81957 - DNA, 7711 bp, Zea Mays
cacaaattcagctactcttgtcctgacgatcacggccacggagggagggagagtcaacggtcagtgcgggggctatggtttgctttcttcccccgagcgcaagcgcaacccccgcaccaaacagacaacagcagtacagcagagcaaagcaaagaggaacaccatttcccttgcctgcttgccaacccaccaccaccaccaccaccacccacgaaggcagcagcaacccagcaccaccgatccatccatccactcgtcattcctccgccccgccgctcgccttcacccatctccgaccccgctccgccaccaaaccctaggctaccagctcttcccaccccgtgtgctccgctcccctgagggcggctcgcgcgccatttctccgctcgatttcctaaaaccgtactctcggattcgggatcgggccgcgacggggcctcctcttgctctcgctcttccgtccggtcggccgctgaggacaataaaggaggttgcgctcatgccgggggcgccgctcaggtgacttgctggggggccatgcataggtactccagcaacagcgctgggttcagcggtggcagggacggcgcgaggttggaagcctcgcccttctcgtcctcctcctctgggtaccctgtcagctccaggcggcagcagcagctagttccatacaagctaaagtgtgacaaagatccacttaataacaagtatgtctaacttatcgaccaaagccacttcacatcaatgagagagctaacgactcttctcctatttgcatgttttttttttaatctcagactggttatgattctcttcctttttttggccacccctatcagctttgacatgatatctgcttataaaacgacgatttcatatattgttcttctatttataactaagaactgttgatttgtcccacgatatggtttcgttggatccttgttgctccttttacatgtctcttctgtaggcttgggccacctgacttctatccacaaacaccaaactgtcccgaagagacattaaccaaagagtatgcacaagctgggtacaaggagactgttgaaggaattgaggaagcaagagagattgtactcagccagatcccgtacttctgtaagccagatgctgtcataaagtgcaaggaggcactaaagaagcgtttaagagcgatcaatgaatctcgtgctcaaaagagaaaggctggccaagtttatggagttcctctttctggatctctactgatcaagcctggagtttacccagagcaaagaccatgtaatgaggacgcccgcagaaaatggattgaggcccttgctcagccaaacaagcgactgcgttcattgtctgagcacgttcctcatggttaccgtaggaaatcactttttgaaggtctaattcgatataatgttccgttgctaagagcaacatggtttattaaagtcacatacctgaaccagctacagacccgacagacacctaacagtatttcagtagcgggttctgataaccaacgctctaatcagtggacaaaggatgttgttgaatatttacaacatattttggacgaattttgttctaaagagggtgcattcgtgcatccatcttttagagagcagtcatcaccaggacctactgctggaaccaatcagataaaaatgaaaactgaagcatctccagctgctggagacattgaagaacccttggtgcacttcaaatggcggtatatggttcgtctcatccaatggcatctcacagaagaattgcttgttccctcagtacttatcgaatggctatctaaccaactccaggagagagattcagttgacgttttagaacttctcttgcctattatgcttggtctggttgacaccattactctctcacaaacatatgtgcgcatgtttgtggagctactagtgagacgtctcaatgatgcttctgttgttgatagtccaaaaggaccttcagtttcttctgttatagcagagttactgcggtacatggtacttgcagtgccagatacatttatttctttggattgctttcctctcccatcttttgtggttcctgatgtatatggtagaggtgctttgttgaagataactagcagtggtggaatttcaagttctaaaaggtgtgatgcttatcggtatttgtcctgtggttatgctgtttgttcaattcaaaaacgtgcatatgatctcgcaacagttgctaaccctaaccttcaagcacgtggtgcagccaaagtggtacaggctttggacatagctcttgtcacaggaaatttgtcagtggcatattcttcactctttaatgatttatctgatacgttaatggaagagagatggattaaagaagtcagccccagtctgcagtcttctctgatgtggattgggactgttgagctatcccttatctgttctatatttttcctttgtgaatgggcgacatgtgattatcgtgattgtcgagcatctccctctcggaatgtgaaatttacaggaagaagagatttgtctcagatacatatggcagtgtctatcttgaagaataaaatggatgagatgaataatttgtctcgttctaagagtagcactcgcgttaccctgaataatatcaccaaaggttcttcactgaccgatgcttgtttgacagcagctgctgtggatgacacttctggattgcaaagtaatgcaaagaatgtggatgagaagaaggatacgaatgatatctttgaaagccctggtccactgcatgatatcattgtgtgttggttggatcagcatgaagttagcagtgttgcaggttttacccgggtggatgttctcatcgtagaacttatccgcaatggtatattttttcctcaggcttatgtcaggcagctaattattagtggaattactgacaagaacgacacaatgttggatgttgaaagaaaaaggaggcatcacagaactttgaagcagcttcctgggtcttctttatttgatattcttgaggaaactaggaccgtggaagagcaacagttatatgagatgatgtcgacatactccagcgagcggcgccttgttctctctgaactttcatgtgatcactcattttatgcaagtggcagaggcgagtatactgcaagttcctgcattcggaagcagagtgatcttccacttgcatcaggaggtgataagcatggaagagtgccagaacaagtagaagatgttaaagccctattgtcaagtctgttgggttttacatatccttccccagtggaatccgaacctcgccaaatcaaaacaagctttcaagaatcagcaacttcaacactctcacaagttgagactggagaagcaaaaagtggatgtgaggtttgtatgaggtccaaagggcagaaattggatgatactgccactcctttccaagggttttcattgattcaatcggacgaggaagatatttggtgggtgaggaaaggcacaaagttacaagaatctttcaacattgaacctgttcagaagtctgttaagcaaacttctaggggtagggcaaaagtggttcgtaaaacacaaagtcttgcacaacttgcagctgctagaattgaaggtagccaggggacatctaccagtcatgtctgtgaaagcaaaatgagctgtccccaccataaacctaatattgatggcgataatgttaaggattttgatcacacgagggtggcaaatctgactgaaattgggaagtcactaaaaagacttagattgcttgagaggcgatctgtctcttcttggttgttgaaaacagtaagacaacttattgaaggaaatgaaacaacggctgctaaagctaccaattccataagcattctttctttgcagtctgatgacaaaacgacatccaaatggaggctaggtgatgaagaactactgtcagttctctatttactggatacatgctgtgatttagtctcttgtgcaaggttccttgtatggttactagcgaaaattcgtggtggaatgggctcttcgggccaacctgggaggagttctatgcatacgaggaacagagatcaccaagtttgtcaggtcagcgaggcacttgtgttctcatctctgcttaggtacgagaacatacttcttgcggctgacatcctgcctgatgttctaagtgctttagtgaacagaaattctgtgtcagcaattgtcaggcatcctggttcaacagcttttgcttacgtacgatactttttgaagaaatatagagatgtggctggtgtggccaagtgggaaaaaagctttcggaccacttgtgatcagcgcctgttagctgagcttgataacgggcggtccattgatggcgaattgatttcttcttcgggggtttcagcaggcgaggagattgatgagcaggtccgccaaaagttgaatggaaggagttcaagacttgtgcagaatatgaaagaaatagtgcaacggcaagctgatgaaattcagcgcagtttgaaggaaaagaaagttctagcaactcccaggaatccacccacttttgagaaagaagatagctatcaaattgcacatgacattgtttcgggcttagtagaatgcatcaggcaaaatgggggtgcaaatccagatggagacctttcaacagttgcttctgctgtttctgcaattgttgcgaatgctgggcatgtgatagcaaaacatttggattttgcaggaggtaactatcaaggtgttaattctgtgagtaattcactaaatttcgttaggcacactttgcgtgtccatataaattctctttgcttgctgaaagaaactcttggggaccgcttcagccgtgcatttgaaatagctctggctgttgaaacttctggagctgttacagcagcttttgcttctccaaagatgcaccgcaatcagtttcaaccatctcctgaggcccatgatgcatatggaaatcatacaagtgatctcagcaactcagggaaaggttttgttgggagaactgctaaagtatctgctgctgtttctgctcttgtcgtgggggctgttgttcatggagctgttagtcttgagcggatggttgctgctttaaaaataaaagatggtttggatattctgcagctcctgagaggtttgaaatcaagttcgaatggtgtatcccgtcctactggaacttttaggattgaacattccacagatgttttggtacattggtttagggttctattggggaactgcagaactgtctatgatgggcttattgcagatattcttggagattcgtacattcttgcactctcaaggttgcagcagatgcttcctcttagtgtaatctttcctccggcctactcaatttttgccatggttctttggagacgatatatttttaaccgcgaagatccacagctttatcagtctctgtcaaacgcaataagcgatattaccagacatcaaccttttcgggagatttgcttccgcaatacacatcggctgtataatcttctggcttcagatgttggtgattcagagtttgcagcaatgcttgaaactcatagtcctgacaggaattcaaaaatactgccatttatacctctccgtgcccggctttttctggacgctcttattgattgcaacacaccaactattcagggagatggagcttcggagccttgtgaccccaaagataatgaattaaagctttcagagaggcttatgcaacttcttgatactcttcaacctgcaaagttccattggcaatgggttgagatgaggcttcttttagatgaacaagctcttatggaaaaagttgcagcaggcaagacagcacttgaatcacttcggtcgttatcccctaaagctgaggggtttaccctttctgatagtgaaaaagggtttactgaagtcattctgtcaaggctacttgctagacctgatgctgctcctctctattcagaagctgtccgccttcttggcaagcttcaggagtcccttgttatggatgtgaaatggattttacaagggcaagatgctattcttggccgcaggtcaacaagacagcagcttgttcatattgcccaacgaaaagggctttcaacaaaggcacaggtttggaaaccatggggttggtccagcttgcttagcgatgttattcctaataaaactgcaaaaaggaagttggaagtcacatcaattgaggaaggtgaagttgtggatgatactgttgatgctaaaaggcctagcaagactccccctcatagtgttgatagaagctttgaagcgattagatccataaataaatatttaactgagaaagcccttgctgaattagtattgccatgcatcgacagaagttctgctgatatccgtggtatactttctgttgatctgatcaaacagatggggactatcagtgaacatatcaaagcaatagcacggaatggtgctaaacaagctggttcagtcccttcaggtaatgaagtgccatcaagcaaatcaagtggtcgtaaaggaattcgaggtggaagcccaaacattggcagaagagctccggttggtaatgacccaagccctccgtcggcttctgctctgagggcagcattgtggttacgcctccaattcatcattaggttgcttccagtaatcatggcagataggagcatgagacaaacacttgcttctgcaatcctaggcctgcttgcaacgcgcatgatttatgaagatgcagatctgccccttccacctaccaatgcaactgctttaaggcgggaggtggattccctgctggagcctcccctggacgtcctgcttgatcggcctggtgaaagtctttttgagaggcttttatgtgttctccatgcacttcttggcagctacaaaccaagttggctgaagtcaaggtcagcctctaggtcgacaattagaatccaacgagatttttccgcatttgataacgaagcagccgagggtttacagtctgcgttggatcacatggaattgcctgaaacaatcaggcggaggatccaagcagccatgcctcttcttccaccatcccggcacccttctttgcaatgtcaacctccgcagttgtcgttggctgcattaacaccactccagagcagtacattggctctttagacgatgacacctgacgtgtgtatgattattttggtgaattgtggaggaaattagtctcacctgttggcactggagtgaatggtggaaaccaaccatggcccttggctttaggatggttgttgttggtgtagaatacatacacatcgctgcccccgttttgttttgttttgttttgttttagggccttgtgggggcggctgtatataatggaaaaacatttgatccattactgaggcatggcccgagaagacaccttcaaatgggcttctgtgtaagcttgcttatttgagaagtaggaagccatgcagtagattttgtatccaaaagccgtgtacttgtttttgtctgatatgtaatctagcgcatgtcacacatatgtattcccttcctttgattgaagggctaatggtatgatgtcttttttttttgataaaacatgaggggtgagagcccctactggaaattaaataaaaaaatatgtacaaggagttacacgtttcttaattactcctgttctaaaatatagttttttctaaccctctttttttatgtccacattcaaataaatgagaggt

SEQ ID NO: 81958 - DNA, 7958 bp, Zea Mays
agctactcttgtcctgacgatcacggccacggagggagggagagtcaacggtcagtgcgggggctatggtttgctttcttcccccgagcgcaagcgcaacccccgcaccaaacagacaacagcagtacagcagagcaaagcaaagaggaacaccatttcccttgcctgcttgccaacccaccaccaccaccaccaccacccacgaaggcagcagcaacccagcaccaccgatccatccatccactcgtcattcctccgccccgccgctcgccttcacccatctccgaccccgctccgccaccaaaccctaggctaccagctcttcccaccccgtgtgctccgctcccctgagggcggctcgcgcgccatttctccgctcgatttcctaaaaccgtactctcggattcgggatcgggccgcgacggggcctcctcttgctctcgctcttccgtccggtcggccgctgaggacaataaaggaggttgcgctcatgccgggggcgccgctcaggtgacttgctggggggccatgcataggtactccagcaacagcgctgggttcagcggtggcagggacggcgcgaggttggaagcctcgcccttctcgtcctcctcctctgggtaccctgtcagctccaggcggcagcagcagctagttccatacaagctaaagtgtgacaaagatccacttaataacaagtatgtctaacttatcgaccaaagccacttcacatcaatgagagagctaacgactcttctcctatttgcatgttttttttttaatctcagactggttatgattctcttcctttttttggccacccctatcagctttgacatgatatctgcttataaaacgacgatttcatatattgttcttctatttataactaagaactgttgatttgtcccacgatatggtttcgttggatccttgttgctccttttacatgtctcttctgtaggcttgggccacctgacttctatccacaaacaccaaactgtcccgaagagacattaaccaaagagtatgcacaagctgggtacaaggagactgttgaaggaattgaggaagcaagagagattgtactcagccagatcccgtacttctgtaagccagatgctgtcataaagtgcaaggaggcactaaagaagcgtttaagagcgatcaatgaatctcgtgctcaaaagagaaaggctggccaagtttatggagttcctctttctggatctctactgatcaagcctggagtttacccagagcaaagaccatgtaatgaggacgcccgcagaaaatggattgaggcccttgctcagccaaacaagcgactgcgttcattgtctgagcacgttcctcatggttaccgtaggaaatcactttttgaaggtctaattcgatataatgttccgttgctaagagcaacatggtttattaaagtcacatacctgaaccagacccgacagacacctaacagtatttcagtagcgggttctgataaccaacgctctaatcagtggacaaaggatgttgttgaatatttacaacatattttggacgaattttgttctaaagagggtgcattcgtgcatccatcttttagagagcagtcatcaccaggacctactgctggaaccaatcagataaaaatgaaaactgaagcatctccagctgctggagacattgaagaacccttggtgcacttcaaatggcggtatatggttcgtctcatccaatggcatctcacagaagaattgcttgttccctcagtacttatcgaatggctatctaaccaactccaggagagagattcagttgacgttttagaacttctcttgcctattatgcttggtctggttgacaccattactctctcacaaacatatgtgcgcatgtttgtggagctactagtgagacgtctcaatgatgcttctgttgttgatagtccaaaaggaccttcagtttcttctgttatagcagagttactgcggtacatggtacttgcagtgccagatacatttatttctttggattgctttcctctcccatcttttgtggttcctgatgtatatggtagaggtgctttgttgaagataactagcagtggtggaatttcaagttctaaaaggtgtgatgcttatcggtatttgtcctgtggttatgctgtttgttcaattcaaaaacgtgcatatgatctcgcaacagttgctaaccctaaccttcaagcacgtggtgcagccaaagtggtacaggctttggacatagctcttgtcacaggaaatttgtcagtggcatattcttcactctttaatgatttatctgatacgttaatggaagagagatggattaaagaagtcagccccagtctgcagtcttctctgatgtggattgggactgttgagctatcccttatctgttctatatttttcctttgtgaatgggcgacatgtgattatcgtgattgtcgagcatctccctctcggaatgtgaaatttacaggaagaagagatttgtctcagatacatatggcagtgtctatcttgaagaataaaatggatgagatgaataatttgtctcgttctaagagtagcactcgcgttaccctgaataatatcaccaaaggttcttcactgaccgatgcttgtttgacagcagctgctgtggatgacacttctggattgcaaagtaatgcaaagaatgtggatgagaagaaggatacgaatgatatctttgaaagccctggtccactgcatgatatcattgtgtgttggttggatcagcatgaagttagcagtgttgcaggttttacccgggtggatgttctcatcgtagaacttatccgcaatggtatattttttcctcaggcttatgtcaggcagctaattattagtggaattactgacaagaacgacacaatgttggatgttgaaagaaaaaggaggcatcacagaactttgaagcagcttcctgggtcttctttatttgatattcttgaggaaactaggaccgtggaagagcaacagttatatgagatgatgtcgacatactccagcgagcggcgccttgttctctctgaactttcatgtgatcactcattttatgcaagtggcagaggcgagtatactgcaagttcctgcattcggaagcagagtgatcttccacttgcatcaggaggtgataagcatggaagagtgccagaacaagtagaagatgttaaagccctattgtcaagtctgttgggttttacatatccttccccagtggaatccgaacctcgccaaatcaaaacaagctttcaagaatcagcaacttcaacactctcacaagttgagactggagaagcaaaaagtggatgtgaggtttgtatgaggtccaaagggcagaaattggatgatactgccactcctttccaagggttttcattgattcaatcggacgaggaagatatttggtgggtgaggaaaggcacaaagttacaagaatctttcaacattgaacctgttcagaagtctgttaagcaaacttctaggggtagggcaaaagtggttcgtaaaacacaaagtcttgcacaacttgcagctgctagaattgaaggtagccaggggacatctaccagtcatgtctgtgaaagcaaaatgagctgtccccaccataaacctaatattgatggcgataatgttaaggattttgatcacacgagggtggcaaatctgactgaaattgggaagtcactaaaaagacttagattgcttgagaggcgatctgtctcttcttggttgttgaaaacagtaagacaacttattgaaggaaatgaaacaacggctgctaaagctaccaattccataagcattctttctttgcagtctgatgacaaaacgacatccaaatggaggctaggtgatgaagaactactgtcagttctctatttactggatacatgctgtgatttagtctcttgtgcaaggttccttgtatggttactagcgaaaattcgtggtggaatgggctcttcgggccaacctgggaggagttctatgcatacgaggaacagagatcaccaagtttgtcaggtcagcgaggcacttgtgttctcatctctgcttaggtacgagaacatacttcttgcggctgacatcctgcctgatgttctaagtgctttagtgaacagaaattctgtgtcagcaattgtcaggcatcctggttcaacagcttttgcttacgtacgatactttttgaagaaatatagagatgtggctggtgtggccaagtgggaaaaaagctttcggaccacttgtgatcagcgcctgttagctgagcttgataacgggcggtccattgatggcgaattgatttcttcttcgggggtttcagcaggcgaggagattgatgagcaggtccgccaaaagttgaatggaaggagttcaagacttgtgcagaatatgaaagaaatagtgcaacggcaagctgatgaaattcagcgcagtttgaaggaaaagaaagttctagcaactcccaggaatccacccacttttgagaaagaagatagctatcaaattgcacatgacattgtttcgggcttagtagaatgcatcaggcaaaatgggggtgcaaatccagatggagacctttcaacagttgcttctgctgtttctgcaattgttgcgaatgctgggcatgtgatagcaaaacatttggattttgcaggaggtaactatcaaggtgttaattctgtgagtaattcactaaatttcgttaggcacactttgcgtgtccatataaattctctttgcttgctgaaagaaactcttggggaccgcttcagccgtgcatttgaaatagctctggctgttgaaacttctggagctgttacagcagcttttgcttctccaaagatgcaccgcaatcagtttcaaccatctcctgaggcccatgatgcatatggaaatcatacaagtgatctcagcaactcagggaaaggttttgttgggagaactgctaaagtatctgctgctgtttctgctcttgtcgtgggggctgttgttcatggagctgttagtcttgagcggatggttgctgctttaaaaataaaagatggtttggatattctgcagctcctgagaggtttgaaatcaagttcgaatggtgtatcccgtcctactggaacttttaggattgaacattccacagatgttttggtacattggtttagggttctattggggaactgcagaactgtctatgatgggcttattgcagatattcttggagattcgtacattcttgcactctcaaggttgcagcagatgcttcctcttagtgtaatctttcctccggcctactcaatttttgccatggttctttggagacgatatatttttaaccgcgaagatccacagctttatcagtctctgtcaaacgcaataagcgatattaccagacatcaaccttttcgggagatttgcttccgcaatacacatcggctgtataatcttctggcttcagatgttggtgattcagagtttgcagcaatgcttgaaactcatagtcctgacaggaattcaaaaatactgccatttatacctctccgtgcccggctttttctggacgctcttattgattgcaacacaccaactattcagggagatggagcttcggagccttgtgaccccaaagataatgaattaaagctttcagagaggcttatgcaacttcttgatactcttcaacctgcaaagttccattggcaatgggttgagatgaggcttcttttagatgaacaagctcttatggaaaaagttgcagcaggcaagacagcacttgaatcacttcggtcgttatcccctaaagctgaggggtttaccctttctgatagtgaaaaagggtttactgaagtcattctgtcaaggctacttgctagacctgatgctgctcctctctattcagaagctgtccgccttcttggcaagcttcaggagtcccttgttatggatgtgaaatggattttacaagggcaagatgctattcttggccgcaggtcaacaagacagcagcttgttcatattgcccaacgaaaagggctttcaacaaaggcacaggtttggaaaccatggggttggtccagcttgcttagcgatgttattcctaataaaactgcaaaaaggaagttggaagtcacatcaattgaggaaggtgaagttgtggatgatactgttgatgctaaaaggcctagcaagactccccctcatagtgttgatagaagctttgaagcgattagatccataaataaatatttaactgagaaagcccttgctgaattagtattgccatgcatcgacagaagttctgctgatatccgtggtatactttctgttgatctgatcaaacagatggggactatcagtgaacatatcaaagcaatagcacggaatggtgctaaacaagctggttcagtcccttcaggtaatgaagtgccatcaagcaaatcaagtggtcgtaaaggaattcgaggtggaagcccaaacattggcagaagagctccggttggtaatgacccaagccctccgtcggcttctgctctgagggcagcattgtggttacgcctccaattcatcattaggttgcttccagtaatcatggcagataggagcatgagacaaacacttgcttctgcaatcctaggcctgcttgcaacgcgcatgatttatgaagatgcagatctgccccttccacctaccaatgcaactgctttaaggcgggaggtggattccctgctggagcctcccctggacgtcctgcttgatcggcctggtgaaagtctttttgagaggcttttatgtgttctccatgcacttcttggcagctacaaaccaagttggctgaagtcaaggtcagcctctaggtcgacaattagaatccaacgagatttttccgcatttgataacgaagcagccgagggtttacagtctgcgttggatcacatggaattgcctgaaacaatcaggcggaggatccaagcagccatgcctcttcttccaccatcccggcacccttctttgcaatgtcaacctccgcagttgtcgttggctgcattaacaccactccagagcagtacatctggtgtaggtccgcaacagaaaagttgttctgcgagctgggtgcccactaacgtctcaggcagaagcaaggcggcgttgccttcgcatgatcctgaaatggaggtagatccatggaatctgctcgaagatggcacaagctgcccctcaacagcatctggaagccatggcgcgagtggagtgacgggtgaccatgctaatctgaaagcgtgcagctggcttaagggtgctgtgagggtgaggaggacagaactgacctacattggctctttagacgatgacacctgacgtgtgtatgattattttggtgaattgtggaggaaattagtctcacctgttggcactggagtgaatggtggaaaccaaccatggcccttggctttaggatggttgttgttggtgtagaatacatacacatcgctgcccccgttttgttttgttttgttttgttttagggccttgtgggggcggctgtatataatggaaaaacatttgatccattactgaggcatggcccgagaagacaccttcaaatgggcttctgtgtaagcttgcttatttgagaagtaggaagccatgcagtagattttgtatccaaaagccgtgtacttgtttttgtctgatatgtaatctagcgcatgtcacacatatgtattcccttcctttgattgaagggctaatggtatgatgtcttttttttttgataaaacatgaggggtgagagcccctactggaaattaaataaaaaaatatgtacaaggagttacacgtttcttaattactcctgttctaaaatatagttttttctaaccctctttttttatgtccacattcaaataaatgagaggt

SEQ ID NO: 81959 - DNA, 7919 bp, Zea Mays
ggagagtcaacggtcagtgcgggggctatggtttgctttcttcccccgagcgcaagcgcaacccccgcaccaaacagacaacagcagtacagcagagcaaagcaaagaggaacaccatttcccttgcctgcttgccaacccaccaccaccaccaccaccacccacgaaggcagcagcaacccagcaccaccgatccatccatccactcgtcattcctccgccccgccgctcgccttcacccatctccgaccccgctccgccaccaaaccctaggctaccagctcttcccaccccgtgtgctccgctcccctgagggcggctcgcgcgccatttctccgctcgatttcctaaaaccgtactctcggattcgggatcgggccgcgacggggcctcctcttgctctcgctcttccgtccggtcggccgctgaggacaataaaggaggttgcgctcatgccgggggcgccgctcaggtgacttgctggggggccatgcataggtactccagcaacagcgctgggttcagcggtggcagggacggcgcgaggttggaagcctcgcccttctcgtcctcctcctctgggtaccctgtcagctccagcagcagctagttccatacaagctaaagtgtgacaaagatccacttaataacaagtatgtctaacttatcgaccaaagccacttcacatcaatgagagagctaacgactcttctcctatttgcatgttttttttttaatctcagactggttatgattctcttcctttttttggccacccctatcagctttgacatgatatctgcttataaaacgacgatttcatatattgttcttctatttataactaagaactgttgatttgtcccacgatatggtttcgttggatccttgttgctccttttacatgtctcttctgtaggcttgggccacctgacttctatccacaaacaccaaactgtcccgaagagacattaaccaaagagtatgcacaagctgggtacaaggagactgttgaaggaattgaggaagcaagagagattgtactcagccagatcccgtacttctgtaagccagatgctgtcataaagtgcaaggaggcactaaagaagcgtttaagagcgatcaatgaatctcgtgctcaaaagagaaaggctggccaagtttatggagttcctctttctggatctctactgatcaagcctggagtttacccagagcaaagaccatgtaatgaggacgcccgcagaaaatggattgaggcccttgctcagccaaacaagcgactgcgttcattgtctgagcacgttcctcatggttaccgtaggaaatcactttttgaaggtctaattcgatataatgttccgttgctaagagcaacatggtttattaaagtcacatacctgaaccagctacagacccgacagacacctaacagtatttcagtagcgggttctgataaccaacgctctaatcagtggacaaaggatgttgttgaatatttacaacatattttggacgaattttgttctaaagagggtgcattcgtgcatccatcttttagagagcagtcatcaccaggacctactgctggaaccaatcagataaaaatgaaaactgaagcatctccagctgctggagacattgaagaacccttggtgcacttcaaatggcggtatatggttcgtctcatccaatggcatctcacagaagaattgcttgttccctcagtacttatcgaatggctatctaaccaactccaggagagagattcagttgacgttttagaacttctcttgcctattatgcttggtctggttgacaccattactctctcacaaacatatgtgcgcatgtttgtggagctactagtgagacgtctcaatgatgcttctgttgttgatagtccaaaaggaccttcagtttcttctgttatagcagagttactgcggtacatggtacttgcagtgccagatacatttatttctttggattgctttcctctcccatcttttgtggttcctgatgtatatggtagaggtgctttgttgaagataactagcagtggtggaatttcaagttctaaaaggtgtgatgcttatcggtatttgtcctgtggttatgctgtttgttcaattcaaaaacgtgcatatgatctcgcaacagttgctaaccctaaccttcaagcacgtggtgcagccaaagtggtacaggctttggacatagctcttgtcacaggaaatttgtcagtggcatattcttcactctttaatgatttatctgatacgttaatggaagagagatggattaaagaagtcagccccagtctgcagtcttctctgatgtggattgggactgttgagctatcccttatctgttctatatttttcctttgtgaatgggcgacatgtgattatcgtgattgtcgagcatctccctctcggaatgtgaaatttacaggaagaagagatttgtctcagatacatatggcagtgtctatcttgaagaataaaatggatgagatgaataatttgtctcgttctaagagtagcactcgcgttaccctgaataatatcaccaaaggttcttcactgaccgatgcttgtttgacagcagctgctgtggatgacacttctggattgcaaagtaatgcaaagaatgtggatgagaagaaggatacgaatgatatctttgaaagccctggtccactgcatgatatcattgtgtgttggttggatcagcatgaagttagcagtgttgcaggttttacccgggtggatgttctcatcgtagaacttatccgcaatggtatattttttcctcaggcttatgtcaggcagctaattattagtggaattactgacaagaacgacacaatgttggatgttgaaagaaaaaggaggcatcacagaactttgaagcagcttcctgggtcttctttatttgatattcttgaggaaactaggaccgtggaagagcaacagttatatgagatgatgtcgacatactccagcgagcggcgccttgttctctctgaactttcatgtgatcactcattttatgcaagtggcagaggcgagtatactgcaagttcctgcattcggaagcagagtgatcttccacttgcatcaggaggtgataagcatggaagagtgccagaacaagtagaagatgttaaagccctattgtcaagtctgttgggttttacatatccttccccagtggaatccgaacctcgccaaatcaaaacaagctttcaagaatcagcaacttcaacactctcacaagttgagactggagaagcaaaaagtggatgtgaggtttgtatgaggtccaaagggcagaaattggatgatactgccactcctttccaagggttttcattgattcaatcggacgaggaagatatttggtgggtgaggaaaggcacaaagttacaagaatctttcaacattgaacctgttcagaagtctgttaagcaaacttctaggggtagggcaaaagtggttcgtaaaacacaaagtcttgcacaacttgcagctgctagaattgaaggtagccaggggacatctaccagtcatgtctgtgaaagcaaaatgagctgtccccaccataaacctaatattgatggcgataatgttaaggattttgatcacacgagggtggcaaatctgactgaaattgggaagtcactaaaaagacttagattgcttgagaggcgatctgtctcttcttggttgttgaaaacagtaagacaacttattgaaggaaatgaaacaacggctgctaaagctaccaattccataagcattctttctttgcagtctgatgacaaaacgacatccaaatggaggctaggtgatgaagaactactgtcagttctctatttactggatacatgctgtgatttagtctcttgtgcaaggttccttgtatggttactagcgaaaattcgtggtggaatgggctcttcgggccaacctgggaggagttctatgcatacgaggaacagagatcaccaagtttgtcaggtcagcgaggcacttgtgttctcatctctgcttaggtacgagaacatacttcttgcggctgacatcctgcctgatgttctaagtgctttagtgaacagaaattctgtgtcagcaattgtcaggcatcctggttcaacagcttttgcttacgtacgatactttttgaagaaatatagagatgtggctggtgtggccaagtgggaaaaaagctttcggaccacttgtgatcagcgcctgttagctgagcttgataacgggcggtccattgatggcgaattgatttcttcttcgggggtttcagcaggcgaggagattgatgagcaggtccgccaaaagttgaatggaaggagttcaagacttgtgcagaatatgaaagaaatagtgcaacggcaagctgatgaaattcagcgcagtttgaaggaaaagaaagttctagcaactcccaggaatccacccacttttgagaaagaagatagctatcaaattgcacatgacattgtttcgggcttagtagaatgcatcaggcaaaatgggggtgcaaatccagatggagacctttcaacagttgcttctgctgtttctgcaattgttgcgaatgctgggcatgtgatagcaaaacatttggattttgcaggaggtaactatcaaggtgttaattctgtgagtaattcactaaatttcgttaggcacactttgcgtgtccatataaattctctttgcttgctgaaagaaactcttggggaccgcttcagccgtgcatttgaaatagctctggctgttgaaacttctggagctgttacagcagcttttgcttctccaaagatgcaccgcaatcagtttcaaccatctcctgaggcccatgatgcatatggaaatcatacaagtgatctcagcaactcagggaaaggttttgttgggagaactgctaaagtatctgctgctgtttctgctcttgtcgtgggggctgttgttcatggagctgttagtcttgagcggatggttgctgctttaaaaataaaagatggtttggatattctgcagctcctgagaggtttgaaatcaagttcgaatggtgtatcccgtcctactggaacttttaggattgaacattccacagatgttttggtacattggtttagggttctattggggaactgcagaactgtctatgatgggcttattgcagatattcttggagattcgtacattcttgcactctcaaggttgcagcagatgcttcctcttagtgtaatctttcctccggcctactcaatttttgccatggttctttggagacgatatatttttaaccgcgaagatccacagctttatcagtctctgtcaaacgcaataagcgatattaccagacatcaaccttttcgggagatttgcttccgcaatacacatcggctgtataatcttctggcttcagatgttggtgattcagagtttgcagcaatgcttgaaactcatagtcctgacaggaattcaaaaatactgccatttatacctctccgtgcccggctttttctggacgctcttattgattgcaacacaccaactattcagggagatggagcttcggagccttgtgaccccaaagataatgaattaaagctttcagagaggcttatgcaacttcttgatactcttcaacctgcaaagttccattggcaatgggttgagatgaggcttcttttagatgaacaagctcttatggaaaaagttgcagcaggcaagacagcacttgaatcacttcggtcgttatcccctaaagctgaggggtttaccctttctgatagtgaaaaagggtttactgaagtcattctgtcaaggctacttgctagacctgatgctgctcctctctattcagaagctgtccgccttcttggcaagcttcaggagtcccttgttatggatgtgaaatggattttacaagggcaagatgctattcttggccgcaggtcaacaagacagcagcttgttcatattgcccaacgaaaagggctttcaacaaaggcacaggtttggaaaccatggggttggtccagcttgcttagcgatgttattcctaataaaactgcaaaaaggaagttggaagtcacatcaattgaggaaggtgaagttgtggatgatactgttgatgctaaaaggcctagcaagactccccctcatagtgttgatagaagctttgaagcgattagatccataaataaatatttaactgagaaagcccttgctgaattagtattgccatgcatcgacagaagttctgctgatatccgtggtatactttctgttgatctgatcaaacagatggggactatcagtgaacatatcaaagcaatagcacggaatggtgctaaacaagctggttcagtcccttcaggtaatgaagtgccatcaagcaaatcaagtggtcgtaaaggaattcgaggtggaagcccaaacattggcagaagagctccggttggtaatgacccaagccctccgtcggcttctgctctgagggcagcattgtggttacgcctccaattcatcattaggttgcttccagtaatcatggcagataggagcatgagacaaacacttgcttctgcaatcctaggcctgcttgcaacgcgcatgatttatgaagatgcagatctgccccttccacctaccaatgcaactgctttaaggcgggaggtggattccctgctggagcctcccctggacgtcctgcttgatcggcctggtgaaagtctttttgagaggcttttatgtgttctccatgcacttcttggcagctacaaaccaagttggctgaagtcaaggtcagcctctaggtcgacaattagaatccaacgagatttttccgcatttgataacgaagcagccgagggtttacagtctgcgttggatcacatggaattgcctgaaacaatcaggcggaggatccaagcagccatgcctcttcttccaccatcccggcacccttctttgcaatgtcaacctccgcagttgtcgttggctgcattaacaccactccagagcagtacatctggtgtaggtccgcaacagaaaagttgttctgcgagctgggtgcccactaacgtctcaggcagaagcaaggcggcgttgccttcgcatgatcctgaaatggaggtagatccatggaatctgctcgaagatggcacaagctgcccctcaacagcatctggaagccatggcgcgagtggagtgacgggtgaccatgctaatctgaaagcgtgcagctggcttaagggtgctgtgagggtgaggaggacagaactgacctacattggctctttagacgatgacacctgacgtgtgtatgattattttggtgaattgtggaggaaattagtctcacctgttggcactggagtgaatggtggaaaccaaccatggcccttggctttaggatggttgttgttggtgtagaatacatacacatcgctgcccccgttttgttttgttttgttttgttttagggccttgtgggggcggctgtatataatggaaaaacatttgatccattactgaggcatggcccgagaagacaccttcaaatgggcttctgtgtaagcttgcttatttgagaagtaggaagccatgcagtagattttgtatccaaaagccgtgtacttgtttttgtctgatatgtaatctagcgcatgtcacacatatgtattcccttcctttgattgaagggctaatggtatgatgtcttttttttttgataaaacatgaggggtgagagcccctactggaaattaaataaaaaaatatgtacaaggagttacacgtttcttaattactcctgttctaaaatatagttttttctaaccctctttttttatgtccacattcaaataaatgagaggt

SEQ ID NO: 81960 - DNA, 8019 bp, Zea Mays
ggagagtcaacggtcagtgcgggggctatggtttgctttcttcccccgagcgcaagcgcaacccccgcaccaaacagacaacagcagtacagcagagcaaagcaaagaggaacaccatttcccttgcctgcttgccaacccaccaccaccaccaccaccacccacgaaggcagcagcaacccagcaccaccgatccatccatccactcgtcattcctccgccccgccgctcgccttcacccatctccgaccccgctccgccaccaaaccctaggctaccagctcttcccaccccgtgtgctccgctcccctgagggcggctcgcgcgccatttctccgctcgatttcctaaaaccgtactctcggattcgggatcgggccgcgacggggcctcctcttgctctcgctcttccgtccggtcggccgctgaggacaataaaggaggttgcgctcatgccgggggcgccgctcaggtgacttgctggggggccatgcataggtactccagcaacagcgctgggttcagcggtggcagggacggcgcgaggttggaagcctcgcccttctcgtcctcctcctctgggtaccctgtcagctccaggcggcagcagcagctagttccatacaagctaaagtgtgacaaagatccacttaataacaagtatgtctaacttatcgaccaaagccacttcacatcaatgagagagctaacgactcttctcctatttgcatgttttttttttaatctcagactggttatgattctcttcctttttttggccacccctatcagctttgacatgatatctgcttataaaacgacgatttcatatattgttcttctatttataactaagaactgttgatttgtcccacgatatggtttcgttggatccttgttgctccttttacatgtctcttctgtaggcttgggccacctgacttctatccacaaacaccaaactgtcccgaagagacattaaccaaagagtatgcacaagctgggtacaaggagactgttgaaggaattgagcttgataggaagcaagagagattgtactcagccagatcccgtacttctgtaagccagatgctgtcataaagtgcaaggaggcactaaagaagcgtttaagagcgatcaatgaatctcgtgctcaaaagagaaaggctggccaagtttatggagttcctctttctggatctctactgatcaagcctggagtttacccagagcaaagaccatgtaatgaggacgcccgcagaaaatggattgaggcccttgctcagccaaacaagcgactgcgttcattgtctgagcacgttcctcatggttaccgtaggaaatcactttttgaaggtctaattcgatataatgttccgttgctaagagcaacatggtttattaaagtcacatacctgaaccaggtttggaatctcttgtacccttctcttatttactatcaaatgccacattgcaccattgtgatgatgtgtattcaattttatatagctacagacccgacagacacctaacagtatttcagtagcgggttctgataaccaacgctctaatcagtggacaaaggatgttgttgaatatttacaacatattttggacgaattttgttctaaagagggtgcattcgtgcatccatcttttagagagcagtcatcaccaggacctactgctggaaccaatcagataaaaatgaaaactgaagcatctccagctgctggagacattgaagaacccttggtgcacttcaaatggcggtatatggttcgtctcatccaatggcatctcacagaagaattgcttgttccctcagtacttatcgaatggctatctaaccaactccaggagagagattcagttgacgttttagaacttctcttgcctattatgcttggtctggttgacaccattactctctcacaaacatatgtgcgcatgtttgtggagctactagtgagacgtctcaatgatgcttctgttgttgatagtccaaaaggaccttcagtttcttctgttatagcagagttactgcggtacatggtacttgcagtgccagatacatttatttctttggattgctttcctctcccatcttttgtggttcctgatgtatatggtagaggtgctttgttgaagataactagcagtggtggaatttcaagttctaaaaggtgtgatgcttatcggtatttgtcctgtggttatgctgtttgttcaattcaaaaacgtgcatatgatctcgcaacagttgctaaccctaaccttcaagcacgtggtgcagccaaagtggtacaggctttggacatagctcttgtcacaggaaatttgtcagtggcatattcttcactctttaatgatttatctgatacgttaatggaagagagatggattaaagaagtcagccccagtctgcagtcttctctgatgtggattgggactgttgagctatcccttatctgttctatatttttcctttgtgaatgggcgacatgtgattatcgtgattgtcgagcatctccctctcggaatgtgaaatttacaggaagaagagatttgtctcagatacatatggcagtgtctatcttgaagaataaaatggatgagatgaataatttgtctcgttctaagagtagcactcgcgttaccctgaataatatcaccaaaggttcttcactgaccgatgcttgtttgacagcagctgctgtggatgacacttctggattgcaaagtaatgcaaagaatgtggatgagaagaaggatacgaatgatatctttgaaagccctggtccactgcatgatatcattgtgtgttggttggatcagcatgaagttagcagtgttgcaggttttacccgggtggatgttctcatcgtagaacttatccgcaatggtatattttttcctcaggcttatgtcaggcagctaattattagtggaattactgacaagaacgacacaatgttggatgttgaaagaaaaaggaggcatcacagaactttgaagcagcttcctgggtcttctttatttgatattcttgaggaaactaggaccgtggaagagcaacagttatatgagatgatgtcgacatactccagcgagcggcgccttgttctctctgaactttcatgtgatcactcattttatgcaagtggcagaggcgagtatactgcaagttcctgcattcggaagcagagtgatcttccacttgcatcaggaggtgataagcatggaagagtgccagaacaagtagaagatgttaaagccctattgtcaagtctgttgggttttacatatccttccccagtggaatccgaacctcgccaaatcaaaacaagctttcaagaatcagcaacttcaacactctcacaagttgagactggagaagcaaaaagtggatgtgaggtttgtatgaggtccaaagggcagaaattggatgatactgccactcctttccaagggttttcattgattcaatcggacgaggaagatatttggtgggtgaggaaaggcacaaagttacaagaatctttcaacattgaacctgttcagaagtctgttaagcaaacttctaggggtagggcaaaagtggttcgtaaaacacaaagtcttgcacaacttgcagctgctagaattgaaggtagccaggggacatctaccagtcatgtctgtgaaagcaaaatgagctgtccccaccataaacctaatattgatggcgataatgttaaggattttgatcacacgagggtggcaaatctgactgaaattgggaagtcactaaaaagacttagattgcttgagaggcgatctgtctcttcttggttgttgaaaacagtaagacaacttattgaaggaaatgaaacaacggctgctaaagctaccaattccataagcattctttctttgcagtctgatgacaaaacgacatccaaatggaggctaggtgatgaagaactactgtcagttctctatttactggatacatgctgtgatttagtctcttgtgcaaggttccttgtatggttactagcgaaaattcgtggtggaatgggctcttcgggccaacctgggaggagttctatgcatacgaggaacagagatcaccaagtttgtcaggtcagcgaggcacttgtgttctcatctctgcttaggtacgagaacatacttcttgcggctgacatcctgcctgatgttctaagtgctttagtgaacagaaattctgtgtcagcaattgtcaggcatcctggttcaacagcttttgcttacgtacgatactttttgaagaaatatagagatgtggctggtgtggccaagtgggaaaaaagctttcggaccacttgtgatcagcgcctgttagctgagcttgataacgggcggtccattgatggcgaattgatttcttcttcgggggtttcagcaggcgaggagattgatgagcaggtccgccaaaagttgaatggaaggagttcaagacttgtgcagaatatgaaagaaatagtgcaacggcaagctgatgaaattcagcgcagtttgaaggaaaagaaagttctagcaactcccaggaatccacccacttttgagaaagaagatagctatcaaattgcacatgacattgtttcgggcttagtagaatgcatcaggcaaaatgggggtgcaaatccagatggagacctttcaacagttgcttctgctgtttctgcaattgttgcgaatgctgggcatgtgatagcaaaacatttggattttgcaggaggtaactatcaaggtgttaattctgtgagtaattcactaaatttcgttaggcacactttgcgtgtccatataaattctctttgcttgctgaaagaaactcttggggaccgcttcagccgtgcatttgaaatagctctggctgttgaaacttctggagctgttacagcagcttttgcttctccaaagatgcaccgcaatcagtttcaaccatctcctgaggcccatgatgcatatggaaatcatacaagtgatctcagcaactcagggaaaggttttgttgggagaactgctaaagtatctgctgctgtttctgctcttgtcgtgggggctgttgttcatggagctgttagtcttgagcggatggttgctgctttaaaaataaaagatggtttggatattctgcagctcctgagaggtttgaaatcaagttcgaatggtgtatcccgtcctactggaacttttaggattgaacattccacagatgttttggtacattggtttagggttctattggggaactgcagaactgtctatgatgggcttattgcagatattcttggagattcgtacattcttgcactctcaaggttgcagcagatgcttcctcttagtgtaatctttcctccggcctactcaatttttgccatggttctttggagacgatatatttttaaccgcgaagatccacagctttatcagtctctgtcaaacgcaataagcgatattaccagacatcaaccttttcgggagatttgcttccgcaatacacatcggctgtataatcttctggcttcagatgttggtgattcagagtttgcagcaatgcttgaaactcatagtcctgacaggaattcaaaaatactgccatttatacctctccgtgcccggctttttctggacgctcttattgattgcaacacaccaactattcagggagatggagcttcggagccttgtgaccccaaagataatgaattaaagctttcagagaggcttatgcaacttcttgatactcttcaacctgcaaagttccattggcaatgggttgagatgaggcttcttttagatgaacaagctcttatggaaaaagttgcagcaggcaagacagcacttgaatcacttcggtcgttatcccctaaagctgaggggtttaccctttctgatagtgaaaaagggtttactgaagtcattctgtcaaggctacttgctagacctgatgctgctcctctctattcagaagctgtccgccttcttggcaagcttcaggagtcccttgttatggatgtgaaatggattttacaagggcaagatgctattcttggccgcaggtcaacaagacagcagcttgttcatattgcccaacgaaaagggctttcaacaaaggcacaggtttggaaaccatggggttggtccagcttgcttagcgatgttattcctaataaaactgcaaaaaggaagttggaagtcacatcaattgaggaaggtgaagttgtggatgatactgttgatgctaaaaggcctagcaagactccccctcatagtgttgatagaagctttgaagcgattagatccataaataaatatttaactgagaaagcccttgctgaattagtattgccatgcatcgacagaagttctgctgatatccgtggtatactttctgttgatctgatcaaacagatggggactatcagtgaacatatcaaagcaatagcacggaatggtgctaaacaagctggttcagtcccttcaggtaatgaagtgccatcaagcaaatcaagtggtcgtaaaggaattcgaggtggaagcccaaacattggcagaagagctccggttggtaatgacccaagccctccgtcggcttctgctctgagggcagcattgtggttacgcctccaattcatcattaggttgcttccagtaatcatggcagataggagcatgagacaaacacttgcttctgcaatcctaggcctgcttgcaacgcgcatgatttatgaagatgcagatctgccccttccacctaccaatgcaactgctttaaggcgggaggtggattccctgctggagcctcccctggacgtcctgcttgatcggcctggtgaaagtctttttgagaggcttttatgtgttctccatgcacttcttggcagctacaaaccaagttggctgaagtcaaggtcagcctctaggtcgacaattagaatccaacgagatttttccgcatttgataacgaagcagccgagggtttacagtctgcgttggatcacatggaattgcctgaaacaatcaggcggaggatccaagcagccatgcctcttcttccaccatcccggcacccttctttgcaatgtcaacctccgcagttgtcgttggctgcattaacaccactccagagcagtacatctggtgtaggtccgcaacagaaaagttgttctgcgagctgggtgcccactaacgtctcaggcagaagcaaggcggcgttgccttcgcatgatcctgaaatggaggtagatccatggaatctgctcgaagatggcacaagctgcccctcaacagcatctggaagccatggcgcgagtggagtgacgggtgaccatgctaatctgaaagcgtgcagctggcttaagggtgctgtgagggtgaggaggacagaactgacctacattggctctttagacgatgacacctgacgtgtgtatgattattttggtgaattgtggaggaaattagtctcacctgttggcactggagtgaatggtggaaaccaaccatggcccttggctttaggatggttgttgttggtgtagaatacatacacatcgctgcccccgttttgttttgttttgttttgttttagggccttgtgggggcggctgtatataatggaaaaacatttgatccattactgaggcatggcccgagaagacaccttcaaatgggcttctgtgtaagcttgcttatttgagaagtaggaagccatgcagtagattttgtatccaaaagccgtgtacttgtttttgtctgatatgtaatctagcgcatgtcacacatatgtattcccttcctttgattgaagggctaatggtatgatgtcttttttttttgataaaacatgaggggtgagagcccctactggaaattaaataaaaaaatatgtacaaggagttacacgtttcttaattactcctgttctaaaatatagttttttctaaccctctttttttatgtccacattcaaataaatgagaggt

SEQ ID NO: 81961 - DNA, 7686 bp, Zea Mays
ctttcttcccccgagcgcaagcgcaacccccgcaccaaacagacaacagcagtacagcagagcaaagcaaagaggaacaccatttcccttgcctgcttgccaacccaccaccaccaccaccaccacccacgaaggcagcagcaacccagcaccaccgatccatccatccactcgtcattcctccgccccgccgctcgccttcacccatctccgaccccgctccgccaccaaaccctaggctaccagctcttcccaccccgtgtgctccgctcccctgagggcggctcgcgcgccatttctccgctcgatttcctaaaaccgtactctcggattcgggatcgggccgcgacggggcctcctcttgctctcgctcttccgtccggtcggccgctgaggacaataaaggaggttgcgctcatgccgggggcgccgctcaggtgacttgctggggggccatgcataggtactccagcaacagcgctgggttcagcggtggcagggacggcgcgaggttggaagcctcgcccttctcgtcctcctcctctgggtaccctgtcagctccaggcggcagcagcagctagttccatacaagctaaagtgtgacaaagatccacttaataacaagcttgggccacctgacttctatccacaaacaccaaactgtcccgaagagacattaaccaaagagtatgcacaagctgggtacaaggagactgttgaaggaattgagtttggacatattacaacagtatagtgcattgactgaaattaaattttcctgagcttgataggaagcaagagagattgtactcagccagatcccgtacttctgtaagccagatgctgtcataaagtgcaaggaggcactaaagaagcgtttaagagcgatcaatgaatctcgtgctcaaaagagaaaggctggccaagtttatggagttcctctttctggatctctactgatcaagcctggagtttacccagagcaaagaccatgtaatgaggacgcccgcagaaaatggattgaggcccttgctcagccaaacaagcgactgcgttcattgtctgagcacgttcctcatggttaccgtaggaaatcactttttgaaggtctaattcgatataatgttccgttgctaagagcaacatggtttattaaagtcacatacctgaaccagctacagacccgacagacacctaacagtatttcagtagcgggttctgataaccaacgctctaatcagtggacaaaggatgttgttgaatatttacaacatattttggacgaattttgttctaaagagggtgcattcgtgcatccatcttttagagagcagtcatcaccaggacctactgctggaaccaatcagataaaaatgaaaactgaagcatctccagctgctggagacattgaagaacccttggtgcacttcaaatggcggtatatggttcgtctcatccaatggcatctcacagaagaattgcttgttccctcagtacttatcgaatggctatctaaccaactccaggagagagattcagttgacgttttagaacttctcttgcctattatgcttggtctggttgacaccattactctctcacaaacatatgtgcgcatgtttgtggagctactagtgagacgtctcaatgatgcttctgttgttgatagtccaaaaggaccttcagtttcttctgttatagcagagttactgcggtacatggtacttgcagtgccagatacatttatttctttggattgctttcctctcccatcttttgtggttcctgatgtatatggtagaggtgctttgttgaagataactagcagtggtggaatttcaagttctaaaaggtgtgatgcttatcggtatttgtcctgtggttatgctgtttgttcaattcaaaaacgtgcatatgatctcgcaacagttgctaaccctaaccttcaagcacgtggtgcagccaaagtggtacaggctttggacatagctcttgtcacaggaaatttgtcagtggcatattcttcactctttaatgatttatctgatacgttaatggaagagagatggattaaagaagtcagccccagtctgcagtcttctctgatgtggattgggactgttgagctatcccttatctgttctatatttttcctttgtgaatgggcgacatgtgattatcgtgattgtcgagcatctccctctcggaatgtgaaatttacaggaagaagagatttgtctcagatacatatggcagtgtctatcttgaagaataaaatggatgagatgaataatttgtctcgttctaagagtagcactcgcgttaccctgaataatatcaccaaaggttcttcactgaccgatgcttgtttgacagcagctgctgtggatgacacttctggattgcaaagtaatgcaaagaatgtggatgagaagaaggatacgaatgatatctttgaaagccctggtccactgcatgatatcattgtgtgttggttggatcagcatgaagttagcagtgttgcaggttttacccgggtggatgttctcatcgtagaacttatccgcaatggtatattttttcctcaggcttatgtcaggcagctaattattagtggaattactgacaagaacgacacaatgttggatgttgaaagaaaaaggaggcatcacagaactttgaagcagcttcctgggtcttctttatttgatattcttgaggaaactaggaccgtggaagagcaacagttatatgagatgatgtcgacatactccagcgagcggcgccttgttctctctgaactttcatgtgatcactcattttatgcaagtggcagaggcgagtatactgcaagttcctgcattcggaagcagagtgatcttccacttgcatcaggaggtgataagcatggaagagtgccagaacaagtagaagatgttaaagccctattgtcaagtctgttgggttttacatatccttccccagtggaatccgaacctcgccaaatcaaaacaagctttcaagaatcagcaacttcaacactctcacaagttgagactggagaagcaaaaagtggatgtgaggtttgtatgaggtccaaagggcagaaattggatgatactgccactcctttccaagggttttcattgattcaatcggacgaggaagatatttggtgggtgaggaaaggcacaaagttacaagaatctttcaacattgaacctgttcagaagtctgttaagcaaacttctaggggtagggcaaaagtggttcgtaaaacacaaagtcttgcacaacttgcagctgctagaattgaaggtagccaggggacatctaccagtcatgtctgtgaaagcaaaatgagctgtccccaccataaacctaatattgatggcgataatgttaaggattttgatcacacgagggtggcaaatctgactgaaattgggaagtcactaaaaagacttagattgcttgagaggcgatctgtctcttcttggttgttgaaaacagtaagacaacttattgaaggaaatgaaacaacggctgctaaagctaccaattccataagcattctttctttgcagtctgatgacaaaacgacatccaaatggaggctaggtgatgaagaactactgtcagttctctatttactggatacatgctgtgatttagtctcttgtgcaaggttccttgtatggttactagcgaaaattcgtggtggaatgggctcttcgggccaacctgggaggagttctatgcatacgaggaacagagatcaccaagtttgtcaggtcagcgaggcacttgtgttctcatctctgcttaggtacgagaacatacttcttgcggctgacatcctgcctgatgttctaagtgctttagtgaacagaaattctgtgtcagcaattgtcaggcatcctggttcaacagcttttgcttacgtacgatactttttgaagaaatatagagatgtggctggtgtggccaagtgggaaaaaagctttcggaccacttgtgatcagcgcctgttagctgagcttgataacgggcggtccattgatggcgaattgatttcttcttcgggggtttcagcaggcgaggagattgatgagcaggtccgccaaaagttgaatggaaggagttcaagacttgtgcagaatatgaaagaaatagtgcaacggcaagctgatgaaattcagcgcagtttgaaggaaaagaaagttctagcaactcccaggaatccacccacttttgagaaagaagatagctatcaaattgcacatgacattgtttcgggcttagtagaatgcatcaggcaaaatgggggtgcaaatccagatggagacctttcaacagttgcttctgctgtttctgcaattgttgcgaatgctgggcatgtgatagcaaaacatttggattttgcaggaggtaactatcaaggtgttaattctgtgagtaattcactaaatttcgttaggcacactttgcgtgtccatataaattctctttgcttgctgaaagaaactcttggggaccgcttcagccgtgcatttgaaatagctctggctgttgaaacttctggagctgttacagcagcttttgcttctccaaagatgcaccgcaatcagtttcaaccatctcctgaggcccatgatgcatatggaaatcatacaagtgatctcagcaactcagggaaaggttttgttgggagaactgctaaagtatctgctgctgtttctgctcttgtcgtgggggctgttgttcatggagctgttagtcttgagcggatggttgctgctttaaaaataaaagatggtttggatattctgcagctcctgagaggtttgaaatcaagttcgaatggtgtatcccgtcctactggaacttttaggattgaacattccacagatgttttggtacattggtttagggttctattggggaactgcagaactgtctatgatgggcttattgcagatattcttggagattcgtacattcttgcactctcaaggttgcagcagatgcttcctcttagtgtaatctttcctccggcctactcaatttttgccatggttctttggagacgatatatttttaaccgcgaagatccacagctttatcagtctctgtcaaacgcaataagcgatattaccagacatcaaccttttcgggagatttgcttccgcaatacacatcggctgtataatcttctggcttcagatgttggtgattcagagtttgcagcaatgcttgaaactcatagtcctgacaggaattcaaaaatactgccatttatacctctccgtgcccggctttttctggacgctcttattgattgcaacacaccaactattcagggagatggagcttcggagccttgtgaccccaaagataatgaattaaagctttcagagaggcttatgcaacttcttgatactcttcaacctgcaaagttccattggcaatgggttgagatgaggcttcttttagatgaacaagctcttatggaaaaagttgcagcaggcaagacagcacttgaatcacttcggtcgttatcccctaaagctgaggggtttaccctttctgatagtgaaaaagggtttactgaagtcattctgtcaaggctacttgctagacctgatgctgctcctctctattcagaagctgtccgccttcttggcaagcttcaggagtcccttgttatggatgtgaaatggattttacaagggcaagatgctattcttggccgcaggtcaacaagacagcagcttgttcatattgcccaacgaaaagggctttcaacaaaggcacaggtttggaaaccatggggttggtccagcttgcttagcgatgttattcctaataaaactgcaaaaaggaagttggaagtcacatcaattgaggaaggtgaagttgtggatgatactgttgatgctaaaaggcctagcaagactccccctcatagtgttgatagaagctttgaagcgattagatccataaataaatatttaactgagaaagcccttgctgaattagtattgccatgcatcgacagaagttctgctgatatccgtggtatactttctgttgatctgatcaaacagatggggactatcagtgaacatatcaaagcaatagcacggaatggtgctaaacaagctggttcagtcccttcaggtaatgaagtgccatcaagcaaatcaagtggtcgtaaaggaattcgaggtggaagcccaaacattggcagaagagctccggttggtaatgacccaagccctccgtcggcttctgctctgagggcagcattgtggttacgcctccaattcatcattaggttgcttccagtaatcatggcagataggagcatgagacaaacacttgcttctgcaatcctaggcctgcttgcaacgcgcatgatttatgaagatgcagatctgccccttccacctaccaatgcaactgctttaaggcgggaggtggattccctgctggagcctcccctggacgtcctgcttgatcggcctggtgaaagtctttttgagaggcttttatgtgttctccatgcacttcttggcagctacaaaccaagttggctgaagtcaaggtcagcctctaggtcgacaattagaatccaacgagatttttccgcatttgataacgaagcagccgagggtttacagtctgcgttggatcacatggaattgcctgaaacaatcaggcggaggatccaagcagccatgcctcttcttccaccatcccggcacccttctttgcaatgtcaacctccgcagttgtcgttggctgcattaacaccactccagagcagtacatctggtgtaggtccgcaacagaaaagttgttctgcgagctgggtgcccactaacgtctcaggcagaagcaaggcggcgttgccttcgcatgatcctgaaatggaggtagatccatggaatctgctcgaagatggcacaagctgcccctcaacagcatctggaagccatggcgcgagtggagtgacgggtgaccatgctaatctgaaagcgtgcagctggcttaagggtgctgtgagggtgaggaggacagaactgacctacattggctctttagacgatgacacctgacgtgtgtatgattattttggtgaattgtggaggaaattagtctcacctgttggcactggagtgaatggtggaaaccaaccatggcccttggctttaggatggttgttgttggtgtagaatacatacacatcgctgcccccgttttgttttgttttgttttgttttagggccttgtgggggcggctgtatataatggaaaaacatttgatccattactgaggcatggcccgagaagacaccttcaaatgggcttctgtgtaagcttgcttatttgagaagtaggaagccatgcagtagattttgtatccaaaagccgtgtacttgtttttgtctgatatgtaatctagcgcatgtcacacatatgtattcccttcctttgattgaagggctaatggtatgatgtcttttttttttgataaaacatgaggggtgagagcccctactggaaattaaataaaaaaatatgtacaaggagttacacgtttcttaattactcctgttctaaaatatagttttttctaaccctctttttttatgtccacattcaaataaatgagaggt

SEQ ID NO: 81962 - DNA, 7527 bp, Zea Mays
gcagtacagcagagcaaagcaaagaggaacaccatttcccttgcctgcttgccaacccaccaccaccaccaccaccacccacgaaggcagcagcaacccagcaccaccgatccatccatccactcgtcattcctccgccccgccgctcgccttcacccatctccgaccccgctccgccaccaaaccctaggctaccagctcttcccaccccgtgtgctccgctcccctgagggcggctcgcgcgccatttctccgctcgatttcctaaaaccgtactctcggattcgggatcgggccgcgacggggcctcctcttgctctcgctcttccgtccggtcggccgctgaggacaataaaggaggttgcgctcatgccgggggcgccgctcaggtgacttgctggggggccatgcataggtactccagcaacagcgctgggttcagcggtggcagggacggcgcgaggttggaagcctcgcccttctcgtcctcctcctctgggtaccctgtcagctccaggcggcagcagcagctagttccatacaagctaaagtgtgacaaagatccacttaataacaagcttgggccacctgacttctatccacaaacaccaaactgtcccgaagagacattaaccaaagagtatgcacaagctgggtacaaggagactgttgaaggaattgaggaagcaagagagattgtactcagccagatcccgtacttctgtaagccagatgctgtcataaagtgcaaggagaagcgtttaagagcgatcaatgaatctcgtgctcaaaagagaaaggctggccaagtttatggagttcctctttctggatctctactgatcaagcctggagtttacccagagcaaagaccatgtaatgaggacgcccgcagaaaatggattgaggcccttgctcagccaaacaagcgactgcgttcattgtctgagcacgttcctcatggttaccgtaggaaatcactttttgaaggtctaattcgatataatgttccgttgctaagagcaacatggtttattaaagtcacatacctgaaccagacccgacagacacctaacagtatttcagtagcgggttctgataaccaacgctctaatcagtggacaaaggatgttgttgaatatttacaacatattttggacgaattttgttctaaagagggtgcattcgtgcatccatcttttagagagcagtcatcaccaggacctactgctggaaccaatcagataaaaatgaaaactgaagcatctccagctgctggagacattgaagaacccttggtgcacttcaaatggcggtatatggttcgtctcatccaatggcatctcacagaagaattgcttgttccctcagtacttatcgaatggctatctaaccaactccaggagagagattcagttgacgttttagaacttctcttgcctattatgcttggtctggttgacaccattactctctcacaaacatatgtgcgcatgtttgtggagctactagtgagacgtctcaatgatgcttctgttgttgatagtccaaaaggaccttcagtttcttctgttatagcagagttactgcggtacatggtacttgcagtgccagatacatttatttctttggattgctttcctctcccatcttttgtggttcctgatgtatatggtagaggtgctttgttgaagataactagcagtggtggaatttcaagttctaaaaggtgtgatgcttatcggtatttgtcctgtggttatgctgtttgttcaattcaaaaacgtgcatatgatctcgcaacagttgctaaccctaaccttcaagcacgtggtgcagccaaagtggtacaggctttggacatagctcttgtcacaggaaatttgtcagtggcatattcttcactctttaatgatttatctgatacgttaatggaagagagatggattaaagaagtcagccccagtctgcagtcttctctgatgtggattgggactgttgagctatcccttatctgttctatatttttcctttgtgaatgggcgacatgtgattatcgtgattgtcgagcatctccctctcggaatgtgaaatttacaggaagaagagatttgtctcagatacatatggcagtgtctatcttgaagaataaaatggatgagatgaataatttgtctcgttctaagagtagcactcgcgttaccctgaataatatcaccaaaggttcttcactgaccgatgcttgtttgacagcagctgctgtggatgacacttctggattgcaaagtaatgcaaagaatgtggatgagaagaaggatacgaatgatatctttgaaagccctggtccactgcatgatatcattgtgtgttggttggatcagcatgaagttagcagtgttgcaggttttacccgggtggatgttctcatcgtagaacttatccgcaatggtatattttttcctcaggcttatgtcaggcagctaattattagtggaattactgacaagaacgacacaatgttggatgttgaaagaaaaaggaggcatcacagaactttgaagcagcttcctgggtcttctttatttgatattcttgaggaaactaggaccgtggaagagcaacagttatatgagatgatgtcgacatactccagcgagcggcgccttgttctctctgaactttcatgtgatcactcattttatgcaagtggcagaggcgagtatactgcaagttcctgcattcggaagcagagtgatcttccacttgcatcaggaggtgataagcatggaagagtgccagaacaagtagaagatgttaaagccctattgtcaagtctgttgggttttacatatccttccccagtggaatccgaacctcgccaaatcaaaacaagctttcaagaatcagcaacttcaacactctcacaagttgagactggagaagcaaaaagtggatgtgaggtttgtatgaggtccaaagggcagaaattggatgatactgccactcctttccaagggttttcattgattcaatcggacgaggaagatatttggtgggtgaggaaaggcacaaagttacaagaatctttcaacattgaacctgttcagaagtctgttaagcaaacttctaggggtagggcaaaagtggttcgtaaaacacaaagtcttgcacaacttgcagctgctagaattgaaggtagccaggggacatctaccagtcatgtctgtgaaagcaaaatgagctgtccccaccataaacctaatattgatggcgataatgttaaggattttgatcacacgagggtggcaaatctgactgaaattgggaagtcactaaaaagacttagattgcttgagaggcgatctgtctcttcttggttgttgaaaacagtaagacaacttattgaaggaaatgaaacaacggctgctaaagctaccaattccataagcattctttctttgcagtctgatgacaaaacgacatccaaatggaggctaggtgatgaagaactactgtcagttctctatttactggatacatgctgtgatttagtctcttgtgcaaggttccttgtatggttactagcgaaaattcgtggtggaatgggctcttcgggccaacctgggaggagttctatgcatacgaggaacagagatcaccaagtttgtcaggtcagcgaggcacttgtgttctcatctctgcttaggtacgagaacatacttcttgcggctgacatcctgcctgatgttctaagtgctttagtgaacagaaattctgtgtcagcaattgtcaggcatcctggttcaacagcttttgcttacgtacgatactttttgaagaaatatagagatgtggctggtgtggccaagtgggaaaaaagctttcggaccacttgtgatcagcgcctgttagctgagcttgataacgggcggtccattgatggcgaattgatttcttcttcgggggtttcagcaggcgaggagattgatgagcaggtccgccaaaagttgaatggaaggagttcaagacttgtgcagaatatgaaagaaatagtgcaacggcaagctgatgaaattcagcgcagtttgaaggaaaagaaagttctagcaactcccaggaatccacccacttttgagaaagaagatagctatcaaattgcacatgacattgtttcgggcttagtagaatgcatcaggcaaaatgggggtgcaaatccagatggagacctttcaacagttgcttctgctgtttctgcaattgttgcgaatgctgggcatgtgatagcaaaacatttggattttgcaggaggtaactatcaaggtgttaattctgtgagtaattcactaaatttcgttaggcacactttgcgtgtccatataaattctctttgcttgctgaaagaaactcttggggaccgcttcagccgtgcatttgaaatagctctggctgttgaaacttctggagctgttacagcagcttttgcttctccaaagatgcaccgcaatcagtttcaaccatctcctgaggcccatgatgcatatggaaatcatacaagtgatctcagcaactcagggaaaggttttgttgggagaactgctaaagtatctgctgctgtttctgctcttgtcgtgggggctgttgttcatggagctgttagtcttgagcggatggttgctgctttaaaaataaaagatggtttggatattctgcagctcctgagaggtttgaaatcaagttcgaatggtgtatcccgtcctactggaacttttaggattgaacattccacagatgttttggtacattggtttagggttctattggggaactgcagaactgtctatgatgggcttattgcagatattcttggagattcgtacattcttgcactctcaaggttgcagcagatgcttcctcttagtgtaatctttcctccggcctactcaatttttgccatggttctttggagacgatatatttttaaccgcgaagatccacagctttatcagtctctgtcaaacgcaataagcgatattaccagacatcaaccttttcgggagatttgcttccgcaatacacatcggctgtataatcttctggcttcagatgttggtgattcagagtttgcagcaatgcttgaaactcatagtcctgacaggaattcaaaaatactgccatttatacctctccgtgcccggctttttctggacgctcttattgattgcaacacaccaactattcagggagatggagcttcggagccttgtgaccccaaagataatgaattaaagctttcagagaggcttatgcaacttcttgatactcttcaacctgcaaagttccattggcaatgggttgagatgaggcttcttttagatgaacaagctcttatggaaaaagttgcagcaggcaagacagcacttgaatcacttcggtcgttatcccctaaagctgaggggtttaccctttctgatagtgaaaaagggtttactgaagtcattctgtcaaggctacttgctagacctgatgctgctcctctctattcagaagctgtccgccttcttggcaagcttcaggagtcccttgttatggatgtgaaatggattttacaagggcaagatgctattcttggccgcaggtcaacaagacagcagcttgttcatattgcccaacgaaaagggctttcaacaaaggcacaggtttggaaaccatggggttggtccagcttgcttagcgatgttattcctaataaaactgcaaaaaggaagttggaagtcacatcaattgaggaaggtgaagttgtggatgatactgttgatgctaaaaggcctagcaagactccccctcatagtgttgatagaagctttgaagcgattagatccataaataaatatttaactgagaaagcccttgctgaattagtattgccatgcatcgacagaagttctgctgatatccgtggtatactttctgttgatctgatcaaacagatggggactatcagtgaacatatcaaagcaatagcacggaatggtgctaaacaagctggttcagtcccttcaggtaatgaagtgccatcaagcaaatcaagtggtcgtaaaggaattcgaggtggaagcccaaacattggcagaagagctccggttggtaatgacccaagccctccgtcggcttctgctctgagggcagcattgtggttacgcctccaattcatcattaggttgcttccagtaatcatggcagataggcctgcttgcaacgcgcatgatttatgaagatgcagatctgccccttccacctaccaatgcaactgctttaaggcgggaggtggattccctgctggagcctcccctggacgtcctgcttgatcggcctggtgaaagtctttttgagaggcttttatgtgttctccatgcacttcttggcagctacaaaccaagttggctgaagtcaaggtcagcctctaggtcgacaattagaatccaacgagatttttccgcatttgataacgaagcagccgagggtttacagtctgcgttggatcacatggaattgcctgaaacaatcaggcggaggatccaagcagccatgcctcttcttccaccatcccggcacccttctttgcaatgtcaacctccgcagttgtcgttggctgcattaacaccactccagagcagtacatctggtgtaggtccgcaacagaaaagttgttctgcgagctgggtgcccactaacgtctcaggcagaagcaaggcggcgttgccttcgcatgatcctgaaatggaggtagatccatggaatctgctcgaagatggcacaagctgcccctcaacagcatctggaagccatggcgcgagtggagtgacgggtgaccatgctaatctgaaagcgtgcagctggcttaagggtgctgtgagggtgaggaggacagaactgacctacattggctctttagacgatgacacctgacgtgtgtatgattattttggtgaattgtggaggaaattagtctcacctgttggcactggagtgaatggtggaaaccaaccatggcccttggctttaggatggttgttgttggtgtagaatacatacacatcgctgcccccgttttgttttgttttgttttgttttagggccttgtgggggcggctgtatataatggaaaaacatttgatccattactgaggcatggcccgagaagacaccttcaaatgggcttctgtgtaagcttgcttatttgagaagtaggaagccatgcagtagattttgtatccaaaagccgtgtacttgtttttgtctgatatgtaatctagcgcatgtcacacatatgtattcccttcctttgattgaagggctaatggtatgatgtcttttttttttgataaaacatgaggggtgagagcccctactggaaattaaataaaaaaatatgtacaaggagttacacgtttcttaattactcctgttctaaaatatagttttttctaaccctctttttttatgtccacattcaaataaatgagaggt

SEQ ID NO: 81963 - DNA, 7536 bp, Zea Mays
gcagtacagcagagcaaagcaaagaggaacaccatttcccttgcctgcttgccaacccaccaccaccaccaccaccacccacgaaggcagcagcaacccagcaccaccgatccatccatccactcgtcattcctccgccccgccgctcgccttcacccatctccgaccccgctccgccaccaaaccctaggctaccagctcttcccaccccgtgtgctccgctcccctgagggcggctcgcgcgccatttctccgctcgatttcctaaaaccgtactctcggattcgggatcgggccgcgacggggcctcctcttgctctcgctcttccgtccggtcggccgctgaggacaataaaggaggttgcgctcatgccgggggcgccgctcaggtgacttgctggggggccatgcataggtactccagcaacagcgctgggttcagcggtggcagggacggcgcgaggttggaagcctcgcccttctcgtcctcctcctctgggtaccctgtcagctccaggcggcagcagcagctagttccatacaagctaaagtgtgacaaagatccacttaataacaagcttgggccacctgacttctatccacaaacaccaaactgtcccgaagagacattaaccaaagagtatgcacaagctgggtacaaggagactgttgaaggaattgaggaagcaagagagattgtactcagccagatcccgtacttctgtaagccagatgctgtcataaagtgcaaggaggcactaaagaagcgtttaagagcgatcaatgaatctcgtgctcaaaagagaaaggctggccaagtttatggagttcctctttctggatctctactgatcaagcctggagtttacccagagcaaagaccatgtaatgaggacgcccgcagaaaatggattgaggcccttgctcagccaaacaagcgactgcgttcattgtctgagcacgttcctcatggttaccgtaggaaatcactttttgaaggtctaattcgatataatgttccgttgctaagagcaacatggtttattaaagtcacatacctgaaccagacccgacagacacctaacagtatttcagtagcgggttctgataaccaacgctctaatcagtggacaaaggatgttgttgaatatttacaacatattttggacgaattttgttctaaagagggtgcattcgtgcatccatcttttagagagcagtcatcaccaggacctactgctggaaccaatcagataaaaatgaaaactgaagcatctccagctgctggagacattgaagaacccttggtgcacttcaaatggcggtatatggttcgtctcatccaatggcatctcacagaagaattgcttgttccctcagtacttatcgaatggctatctaaccaactccaggagagagattcagttgacgttttagaacttctcttgcctattatgcttggtctggttgacaccattactctctcacaaacatatgtgcgcatgtttgtggagctactagtgagacgtctcaatgatgcttctgttgttgatagtccaaaaggaccttcagtttcttctgttatagcagagttactgcggtacatggtacttgcagtgccagatacatttatttctttggattgctttcctctcccatcttttgtggttcctgatgtatatggtagaggtgctttgttgaagataactagcagtggtggaatttcaagttctaaaaggtgtgatgcttatcggtatttgtcctgtggttatgctgtttgttcaattcaaaaacgtgcatatgatctcgcaacagttgctaaccctaaccttcaagcacgtggtgcagccaaagtggtacaggctttggacatagctcttgtcacaggaaatttgtcagtggcatattcttcactctttaatgatttatctgatacgttaatggaagagagatggattaaagaagtcagccccagtctgcagtcttctctgatgtggattgggactgttgagctatcccttatctgttctatatttttcctttgtgaatgggcgacatgtgattatcgtgattgtcgagcatctccctctcggaatgtgaaatttacaggaagaagagatttgtctcagatacatatggcagtgtctatcttgaagaataaaatggatgagatgaataatttgtctcgttctaagagtagcactcgcgttaccctgaataatatcaccaaaggttcttcactgaccgatgcttgtttgacagcagctgctgtggatgacacttctggattgcaaagtaatgcaaagaatgtggatgagaagaaggatacgaatgatatctttgaaagccctggtccactgcatgatatcattgtgtgttggttggatcagcatgaagttagcagtgttgcaggttttacccgggtggatgttctcatcgtagaacttatccgcaatggtatattttttcctcaggcttatgtcaggcagctaattattagtggaattactgacaagaacgacacaatgttggatgttgaaagaaaaaggaggcatcacagaactttgaagcagcttcctgggtcttctttatttgatattcttgaggaaactaggaccgtggaagagcaacagttatatgagatgatgtcgacatactccagcgagcggcgccttgttctctctgaactttcatgtgatcactcattttatgcaagtggcagaggcgagtatactgcaagttcctgcattcggaagcagagtgatcttccacttgcatcaggaggtgataagcatggaagagtgccagaacaagtagaagatgttaaagccctattgtcaagtctgttgggttttacatatccttccccagtggaatccgaacctcgccaaatcaaaacaagctttcaagaatcagcaacttcaacactctcacaagttgagactggagaagcaaaaagtggatgtgaggtttgtatgaggtccaaagggcagaaattggatgatactgccactcctttccaagggttttcattgattcaatcggacgaggaagatatttggtgggtgaggaaaggcacaaagttacaagaatctttcaacattgaacctgttcagaagtctgttaagcaaacttctaggggtagggcaaaagtggttcgtaaaacacaaagtcttgcacaacttgcagctgctagaattgaaggtagccaggggacatctaccagtcatgtctgtgaaagcaaaatgagctgtccccaccataaacctaatattgatggcgataatgttaaggattttgatcacacgagggtggcaaatctgactgaaattgggaagtcactaaaaagacttagattgcttgagaggcgatctgtctcttcttggttgttgaaaacagtaagacaacttattgaaggaaatgaaacaacggctgctaaagctaccaattccataagcattctttctttgcagtctgatgacaaaacgacatccaaatggaggctaggtgatgaagaactactgtcagttctctatttactggatacatgctgtgatttagtctcttgtgcaaggttccttgtatggttactagcgaaaattcgtggtggaatgggctcttcgggccaacctgggaggagttctatgcatacgaggaacagagatcaccaagtttgtcaggtacgagaacatacttcttgcggctgacatcctgcctgatgttctaagtgctttagtgaacagaaattctgtgtcagcaattgtcaggcatcctggttcaacagcttttgcttacgtacgatactttttgaagaaatatagagatgtggctggtgtggccaagtgggaaaaaagctttcggaccacttgtgatcagcgcctgttagctgagcttgataacgggcggtccattgatggcgaattgatttcttcttcgggggtttcagcaggcgaggagattgatgagcaggtccgccaaaagttgaatggaaggagttcaagacttgtgcagaatatgaaagaaatagtgcaacggcaagctgatgaaattcagcgcagtttgaaggaaaagaaagttctagcaactcccaggaatccacccacttttgagaaagaagatagctatcaaattgcacatgacattgtttcgggcttagtagaatgcatcaggcaaaatgggggtgcaaatccagatggagacctttcaacagttgcttctgctgtttctgcaattgttgcgaatgctgggcatgtgatagcaaaacatttggattttgcaggaggtaactatcaaggtgttaattctgtgagtaattcactaaatttcgttaggcacactttgcgtgtccatataaattctctttgcttgctgaaagaaactcttggggaccgcttcagccgtgcatttgaaatagctctggctgttgaaacttctggagctgttacagcagcttttgcttctccaaagatgcaccgcaatcagtttcaaccatctcctgaggcccatgatgcatatggaaatcatacaagtgatctcagcaactcagggaaaggttttgttgggagaactgctaaagtatctgctgctgtttctgctcttgtcgtgggggctgttgttcatggagctgttagtcttgagcggatggttgctgctttaaaaataaaagatggtttggatattctgcagctcctgagaggtttgaaatcaagttcgaatggtgtatcccgtcctactggaacttttaggattgaacattccacagatgttttggtacattggtttagggttctattggggaactgcagaactgtctatgatgggcttattgcagatattcttggagattcgtacattcttgcactctcaaggttgcagcagatgcttcctcttagtgtaatctttcctccggcctactcaatttttgccatggttctttggagacgatatatttttaaccgcgaagatccacagctttatcagtctctgtcaaacgcaataagcgatattaccagacatcaaccttttcgggagatttgcttccgcaatacacatcggctgtataatcttctggcttcagatgttggtgattcagagtttgcagcaatgcttgaaactcatagtcctgacaggaattcaaaaatactgccatttatacctctccgtgcccggctttttctggacgctcttattgattgcaacacaccaactattcagggagatggagcttcggagccttgtgaccccaaagataatgaattaaagctttcagagaggcttatgcaacttcttgatactcttcaacctgcaaagttccattggcaatgggttgagatgaggcttcttttagatgaacaagctcttatggaaaaagttgcagcaggcaagacagcacttgaatcacttcggtcgttatcccctaaagctgaggggtttaccctttctgatagtgaaaaagggtttactgaagtcattctgtcaaggctacttgctagacctgatgctgctcctctctattcagaagctgtccgccttcttggcaagcttcaggagtcccttgttatggatgtgaaatggattttacaagggcaagatgctattcttggccgcaggtcaacaagacagcagcttgttcatattgcccaacgaaaagggctttcaacaaaggcacaggtttggaaaccatggggttggtccagcttgcttagcgatgttattcctaataaaactgcaaaaaggaagttggaagtcacatcaattgaggaaggtgaagttgtggatgatactgttgatgctaaaaggcctagcaagactccccctcatagtgttgatagaagctttgaagcgattagatccataaataaatatttaactgagaaagcccttgctgaattagtattgccatgcatcgacagaagttctgctgatatccgtggtatactttctgttgatctgatcaaacagatggggactatcagtgaacatatcaaagcaatagcacggaatggtgctaaacaagctggttcagtcccttcaggtaatgaagtgccatcaagcaaatcaagtggtcgtaaaggaattcgaggtggaagcccaaacattggcagaagagctccggttggtaatgacccaagccctccgtcggcttctgctctgagggcagcattgtggttacgcctccaattcatcattaggttgcttccagtaatcatggcagataggagcatgagacaaacacttgcttctgcaatcctaggcctgcttgcaacgcgcatgatttatgaagatgcagatctgccccttccacctaccaatgcaactgctttaaggcgggaggtggattccctgctggagcctcccctggacgtcctgcttgatcggcctggtgaaagtctttttgagaggcttttatgtgttctccatgcacttcttggcagctacaaaccaagttggctgaagtcaaggtcagcctctaggtcgacaattagaatccaacgagatttttccgcatttgataacgaagcagccgagggtttacagtctgcgttggatcacatggaattgcctgaaacaatcaggcggaggatccaagcagccatgcctcttcttccaccatcccggcacccttctttgcaatgtcaacctccgcagttgtcgttggctgcattaacaccactccagagcagtacatctggtgtaggtccgcaacagaaaagttgttctgcgagctgggtgcccactaacgtctcaggcagaagcaaggcggcgttgccttcgcatgatcctgaaatggaggtagatccatggaatctgctcgaagatggcacaagctgcccctcaacagcatctggaagccatggcgcgagtggagtgacgggtgaccatgctaatctgaaagcgtgcagctggcttaagggtgctgtgagggtgaggaggacagaactgacctacattggctctttagacgatgacacctgacgtgtgtatgattattttggtgaattgtggaggaaattagtctcacctgttggcactggagtgaatggtggaaaccaaccatggcccttggctttaggatggttgttgttggtgtagaatacatacacatcgctgcccccgttttgttttgttttgttttgttttagggccttgtgggggcggctgtatataatggaaaaacatttgatccattactgaggcatggcccgagaagacaccttcaaatgggcttctgtgtaagcttgcttatttgagaagtaggaagccatgcagtagattttgtatccaaaagccgtgtacttgtttttgtctgatatgtaatctagcgcatgtcacacatatgtattcccttcctttgattgaagggctaatggtatgatgtcttttttttttgataaaacatgaggggtgagagcccctactggaaattaaataaaaaaatatgtacaaggagttacacgtttcttaattactcctgttctaaaatatagttttttctaaccctctttttttatgtccacattcaaataaatgagaggt

SEQ ID NO: 81964 - DNA, 2109 bp, Zea Mays
cttgtattcattttacctgtcaaaactaggaattatgagtgatggcgctacaatttcttaatagcactacccaggtgtctattgctgtcaaatcaacgaattgtcttgtttgccacaactgcctcagtggatatcgtatcaaagattgtgcaggtctcgaaaataactgggaaggctgtctgtgttctctcagtgtttggggccgttcaggattgctatctgctccactctgctgtcatcttaaatcacaagggtcctttagaaatcattcatgtgtttggatccattttgacatctgatagtcctggatttgggtgcttatctgcgactcttgcttgtggtgattgttctcttgtcggtggcattgcagttggacctctcatagctgcaacaccggtgcaggcaattgttgggagcttccacaatgatgctttccaggcaaacaagaaacctaagctcgttgcatgttaccccagttctcatgttaccgctggcactgggggcatgtgttgcgtcaattctaagattaccattggcagtttgagaaaacatgataccagttcttggtttcccattggcaatggaagcacaactcattccaattctcaagttactgttgatgatggaagcacaaatcaccccaattctcaggttactgttggcagtggaaacacacatcatcctaattcacaggtgaccattgacagtaggagcatgtgttgcctcagttttgaggctggcattggtagttggagtaaagatgatccaagttcttggtttcccattggcactgggagtacagatcactccaattttcaagttactgttggcactgggagcacacaataccccagctcccaggttcccactggcattgggagtgcatatcaatctgattttcatgtcacattgggtgacagaagcgcaagtatccccgattctcaggctactgttcactatgggattaaacatcaacccaattcctgtgtcagtgttggcaacgggagcacaggtagcgtcaattctcaggatattgttggacacggaagcacatataaccctgaatctctgcctgccattggcgacgggagcatgcataacaccaattttgaggtcgtggtaggagttgggagcacagacaagggcaattcacaggacacccttgttgatgggaacctgaatcgccccagttctatggtttctgttgacaacggaagctcctgttaccccaattgtaaggatgctgttggcgatacgtgtgctccatcctctgaaggctctaatccagaatatgcatcctgcactgtagtagtggaacagagtagattgagcagagacagatgtgaatctctcgcaagtgatggcttcttaacgtagcaacactttaggtgattgtttatgttttttctctgaagacagtagccaagtacatgtccttggacagcgagggtgactccagcagttcatccaaagtttatccataagcactgttatgcactgaagactgcactgttcgcagagtggagtttgaatatagctatgtgtatgggtaagctgttggagatagtgttatgcttttgtggatgaccgccaaagtatccttttgggatggtaggaagttttgaagtccagcagtagttgcgttctttgcagggacatggcagtgttgagaattgtggtgcagtctgttgtagctttagttgctaacagtgttggatttgtgctgaggtctgtcagatgagaaatcctaacatagcagaagggttcgttgagctttcaatatatatgatactgatgagattttatgaggcaagttgtcgggtatatctcgtgcagtaaagcagaatcaaggctccactgcaacagaaactgatcatgtgagtgtatgatagatgtcatggcgttagaccaacgatttgaaattgaaatgttgctaccatgtagaaagatgtgatatgtttagctagatggtctccagcagctcttctattacattatctattctacctcctatttcaaacttcaatctatctgcagttgcacgaccataaatacgatctgtcaaacttcgctctatctacagttgcacgaccataaacacgatctgct

SEQ ID NO: 81965 - DNA, 2856 bp, Zea Mays
ctgtgactgtgagtgagcagccccgtggagtggcggcaatcatcgctagcaagacgtgaagagttctcaagcaggaggcgtgtgacgtcagcaaggacaccagtgttttcagtggagtggtggcgccagcaggaggccggcgaggggtcttctcttctagtagatgatgattgatgtggacttgaatttggaagttctaggaggagtaggagtatataaactggaggaggagtggaggagaggagagccgaatgcgagcgcgatccatggctccaaatcgaatccaaagaaactagtagaagtaatgcgggcgagggatttgcacccgctgtgctgcctccccgccgccgacggaggaccccctccgcctccccttgctcatgcaccgccggccgtggctgggctgctctacaagtggaccaacatcggcaagggctggcgcccgcgctggttcgccatccgcggtgccgtcctcgcctactccaagattccacgccgctccacgtcgcccccctcctccgccacttcctccacagccacccggatcattgggcacgcccgatacggccacgacagccccgtcggcctcgtgcacctcaagatctcctcgttccgtgaaagcaagtcagatgacaggcggttctacctaattactccagccaagacgctgcagctgagaacagactctgctaatgaacgagcggcttggattgaagcccttgtttctgctcgagctgaatcttctcctgatgggggtttattgactaaccagaatgatgcatcattttctacggagaggcttagaaatcgcatgcacgaggaaggccttggtgaggaaataattaaagactgtgaacagattgtccattcagaattctcacagtatcacacacagatgaaacaacgctgtgaagaatatgtaagctttctcagcaggcttccacagcagtttgaggtacttagcgcagatgataatgctaatatgattgagctccactcgcacttgatgaaacctgactattgcagctctggacagggaaaatgtagtgagagcagcaatacagaatcttctgatgatgttgggcaacaggagttggatgaacttttggatgacgatgactatcaattttatgatacaaggcagagtttcagtgattcagcaggactttcttgcttgaacatgaaatgttcaaattctggcaaggatacctttctttatggtgataaatttgtgaaaccaaaagctggtacaggtgacagtgagtgcctgccaccgtttttcaagcgtcgcacgaagttgcctgatccagttgagaaggaaaaaagtgttagtctttggtcaatgatcaaggataatgtcggaagagatcttacacaagttagtcatcatccaatggtcatggcttgtcattgtgaaggaaaagggtggaaattttggggagacagcaatgtaaagagcaagttctgggggcaaacaatccagctggatcctgttggtgtgttatctgtagaatttgatgatggagaaattttccaatggagtaaggttacaacaacaattaataacgttatcattggtcaaatttattgtaatcactatggaacgatgagtataactgggaacaggggatattcatgcaagctgattttcaaacggcaatctttcgttgagcgcaaccctcggcaggttgaaggattggttaaggacggtgatggttcgacggtggcaagcctaatgggaaagtgggatgagaggatgtactgcagcgcatcagggcagaatgtgattctgttgtgggagaaaaatgaagcttcgactaatcccactcgctataacctctcatcgttcgcaataactctgaacgagttgactccagaactcaaggagagccttccaccaacggattcaagactcagaccagatcagcgacatgtagagaacggggagtatagtaaggccaatgctgagaagctgcgactggagaggaggcaacggatgtcacggaagatgcaggacaatggttggaaaccaagatggttccgaagggatgatgacacattccgctatgtgggaggttactgggaggcacgacagcagcggaaatgggacggatgtcatgatatatttggtgaattcgtgtgactcaacagtgaggctgctcggaccttttatatatatatatatataataataataatgataatgataataataatctctggtctcccatgataatattaatatgtatgtgcagtgtgactgaacagtgaacacatatatctcgcggattgctgttgtctgagttgtttgtgcgtcgttttaggctcggtcgtttcacttaaaactagatcaattttttttcttcttaattgaaatacaaaaaaattgttaccgctattatatacgcataattgattggaattgttgacattattggagcgtgtatgtatgtatgtatgtgtatcttcatgtagtagtatatatgtgtctaatacaacaagtagctagatagtcgaactggacaattgggctgtacactttgtcgggctgccgtggtccgccacccgcgtcttgccggactcgttggtaacgcgcatggactgtatcaatttggtttgtatgttctaccaatttccatcacatattttgctgtgcattcataattacaccgacatacatatacatataccgtcagctctaaatttcgagtgttaagtttcaaatagttggttttattacggtaaaaaatagataggagataaatattttgttcgttcaaataaatcaggaaacgaaatatgcttcttacatcctaaattacaagttattttaattttattaagatttaaaacata

SEQ ID NO: 81966 - DNA, 2253 bp, Zea Mays
ggaaggtgttgtacacatgtgcttgtggcgttgctcaattctagcctaccggagggcccaccctgataacctatgttgcttaatccaagtacttagcgcagatgataatgctaatatgattgagctccactcgcacttgatgaaacctgactattgcagctctggacagggaaaatgtagtgagagcagcaatacagaatcttctgatgatgttgggcaacaggagttggatgaacttttggatgacgatgactatcaattttatgatacaaggcagagtttcagtgattcagcaggactttcttgcttgaacatgaaatgttcaaattctggcaaggatacctttctttatggtgataaatttgtgaaaccaaaagctggtacaggtgacagtgagtgcctgccaccgtttttcaagcgtcgcacgaagttgcctgatccagttgagaaggaaaaaagtgttagtctttggtcaatgatcaaggataatgtcggaagagatcttacacaagtatgtcttccagtttactttaacgaaccattatcatctcttcaaaaatgctttgaggacttggagtattcttatttgttggatcgtgcatatgaatgtggcctaaagggggacaatttgatgagaattcttaatgttgctgcatttgcggtttctgggtatgcttcctcggttgggcgcccctgcaaacctttcaatccattgttaggggaaacctatgaagctgattaccctgaaaatggaatccgtttcttttctgaaaaggttagtcatcatccaatggtcatggcttgtcattgtgaaggaaaagggtggaaattttggggagacagcaatgtaaagagcaagttctgggggcaaacaatccagctggatcctgttggtgtgttatctgtagaatttgatgatggagaaattttccaatggagtaaggttacaacaacaattaataacgttatcattggtcaaatttattgtaatcactatggaacgatgagtataactgggaacaggggatattcatgcaagctgattttcaaacggcaatctttcgttgagcgcaaccctcggcaggttgaaggattggttaaggacggtgatggttcgacggtggcaagcctaatgggaaagtgggatgagaggatgtactgcagcgcatcagggcagaatgtgattctgttgtgggagaaaaatgaagcttcgactaatcccactcgctataacctctcatcgttcgcaataactctgaacgagttgactccagaactcaaggagagccttccaccaacggattcaagactcagaccagatcagcgacatgtagagaacggggagtatagtaaggccaatgctgagaagctgcgactggagaggaggcaacggatgtcacggaagatgcaggacaatggttggaaaccaagatggttccgaagggatgatgacacattccgctatgtgggaggttactgggaggcacgacagcagcggaaatgggacggatgtcatgatatatttggtgaattcgtgtgactcaacagtgaggctgctcggaccttttatatatatatatatataataataataatgataatgataataataatctctggtctcccatgataatattaatatgtatgtgcagtgtgactgaacagtgaacacatatatctcgcggattgctgttgtctgagttgtttgtgcgtcgttttaggctcggtcgtttcacttaaaactagatcaattttttttcttcttaattgaaatacaaaaaaattgttaccgctattatatacgcataattgattggaattgttgacattattggagcgtgtatgtatgtatgtatgtgtatcttcatgtagtagtatatatgtgtctaatacaacaagtagctagatagtcgaactggacaattgggctgtacactttgtcgggctgccgtggtccgccacccgcgtcttgccggactcgttggtaacgcgcatggactgtatcaatttggtttgtatgttctaccaatttccatcacatattttgctgtgcattcataattacaccgacatacatatacatataccgtcagctctaaatttcgagtgttaagtttcaaatagttggttttattacggtaaaaaatagataggagataaatattttgttcgttcaaataaatcaggaaacgaaatatgcttcttacatcctaaattacaagttattttaattttattaagatttaaaacata

SEQ ID NO: 81967 - DNA, 829 bp, Zea Mays
agccagctgtcttgttcctccgtccgggaggacgaggaggaggaggcgcatccctccatcctctgcgacttggtgcgtctctcgagctcgagtcgattgatgattcatcttcctagtctcgtctccgcgccattctccaaatccatctatcatcaccatcccgatcccagccccagccccagccccagccccgccagacccagacccgatgcagcaacagcaggacccagcacccgccgatcccgacccactgccgccccccgacctcggtgatgccgccgcctcgtccgcaacgcagacgatcccttcccgcaacgcctcctccaagtacgatttcgtcaaggtcaaggtctggctcggggagaacgccgaccactactacgtcctctccaggttcctcctcagcaggatgctcacagtcaccaagattcctaatcatgtcgccatcaagattgcccttgagctcaagaagctgcttgtcgacaacagcctgcttgatgtgtatatcccagagtgatctagaggctaatctgttcaagcttatggaaaaacggggatacggagaggagtatataaatcgctataaaatgatgacaaggttccatcatcaacgggttccactagtaattttggtgtgtggaactgcctgtactggaaaatcaacaatcgctacacaacttgctcagaggctcaatttgcctaatgttttgcaggtgggtttattatttatcttttccagtctatagctcatgtctcatgtgcctcgtttccttacccttgtgcaactgcagactgacatggtgtatgagctgctgcggacatcaacaga

SEQ ID NO: 81968 - DNA, 752 bp, Zea Mays
agccagctgtcttgttcctccgtccgggaggacgaggaggaggaggcgcatccctccatcctctgcgacttggtgcgtctctcgagctcgagtcgattgatgattcatcttcctagtctcgtctccgcgccattctccaaatccatctatcatcaccatcccgatcccagccccagccccagccccagccccgccagacccagacccgatgcagcaacagcaggacccagcacccgccgatcccgacccactgccgccccccgacctcggtgatgccgccgcctcgtccgcaacgcagacgatcccttcccgcaacgcctcctccaagtacgatttcgtcaaggtcaaggtctggctcggggagaacgccgaccactactacgtcctctccaggttcctcctcagcaggatgctcacagtcaccaagattcctaatcatgtcgccatcaagattgcccttgagctcaagaagctgcttgtcgacaacagcctgcttgatgtatcccagagtgatctagaggctaatctgttcaaggttagcttatggaaaaacggggatacggagaggagtatataaatcgctataaaatgatgacaaggttccatcatcaacgggttccactagtaattttggtgtgtggaactgcctgtactggaaaatcaacaatcgctacacaacttgctcagaggctcaatttgcctaatgttttgcagactgacatggtgtatgagctgctgcggacatcaacaga

SEQ ID NO: 81969 - DNA, 1536 bp, Zea Mays
cccaccaatacggcaacactgttgcccatttgagaacctgggccggtcctttgacctgtttggcatggatgaaggcttagatacataattatgctatgtagatttaagcatatctcttgtgctgtaaatgaactctcttgtgcatatgactatttgtatgatatggaaattatgcatcttgcagaaccatgttgatagactcgtttatttagatggaggcatatccattggatgacaaaactctggtgcttgttgtgtttaacacatttatgatgtctgggaatacatttggatccaagcatttatcttatggatgaggaaaagagtgatggtaattccaggacggagaagacagtaacagattctgaaaatccaggcatctctgtagaaaggaaggtcgaacatcaattcaaaaatggactagcagagaacagaatggattctactgaggacaacaaaaactttgtcaaaagcaaaaaaagcacgctggagaaaggtagaaccagtgaaggtctatcttatgctcagaaccacgaaaccaaggtccatgattctgcacgttctcaagaaaaaaatcccaaggatgaaagtgatgggcacaaagatttggaccaacagaagaataatgccaccaagaaagacaaacctgctgctgagccgataattgttccaattgtactgaggatgtctgattttgatcacaaagcattgctagaggaatggatagccactagagctttcagagataattgcattcctcaggtatctatggaagctttggtacacatacaatgtacaaacttacatttctttgaaattgttgtgcaacccttgtacttcttgtgattagttgatataaaatggtatgtcttatttgtccgcaatgcttgagatgttactaataagttgatgcatgatagagatgttactaataagcagtgattttgtgggacctactttcaggttggctacctcatgcaactaggtatctaactattacatggtgctaactttgtgatgtgttactcaggatcatcggaaacttataaacaaccttaagcttattcaggactacctttgttcttttgagtcacagggattgaccattgttgatatctcagcaaattcgtttcctcaaacattagattggcttcacagctatcttcttcagtgcatcgagcgaggtcttttggctgcgtgtttagaaagctgcaatcaaggtcaatgacactcttggatgtaacctgtccaaccacacctcagtgggcattatatgctggcaatggacactaagaatatcattgtaaaggattacgcatgagtctggatatcatctccaaccaagaccgatatgaaaataccatcgtgatgttgtcaataccagccataagcgtgggtctgtctgattggggttactcgcattaatattgtactgtattgtattagaggttatgcggcatactcataatctgaataagataacaaaatttggcattgtttgctttatctgaatataaacttgtaaagatttatcta

SEQ ID NO: 81970 - DNA, 1033 bp, Zea Mays
caaaactctggtgcttgttgtgtttaacacatttatgatgtctgggaatacatttggatccaagcatttatcttatggatgaggaaaagagtgatggtaattccaggacggagaagacagtaacagattctgaaaatccaggcatctctgtagaaaggaaggtcgaacatcaattcaaaaatggactagcagagaacagaatggattctactgaggacaacaaaaactttgtcaaaagcaaaaaaagcacgctggagaaaggtagaaccagtgaaggtctatcttatgctcagaaccacgaaaccaaggtccatgattctgcacgttctcaagaaaaaaatcccaaggatgaaagtgatgggcacaaagatttggaccaacagaagaataatgccaccaagaaagacaaacctgctgctgagccgataattgttccaattgtactgaggatgtctgattttgatcacaaagcattgctagaggaatggatagccactagagctttcagagataattgcattcctcaggatcatcggaaacttataaacaaccttaagcttattcaggactacctttgttcttttgagtcacagggattgaccattgttgatatctcagcaaattcgtttcctcaaacattagattggcttcacagctatcttcttcagtgcatcgagcgaggtcttttggctgcgtgtttagaaagctgcaatcaaggtcaatgacactcttggatgtaacctgtccaaccacacctcagtgggcattatatgctggcaatggacactaagaatatcattgtaaaggattacgcatgagtctggatatcatctccaaccaagaccgatatgaaaataccatcgtgatgttgtcaataccagccataagcgtgggtctgtctgattggggttactcgcattaatattgtactgtattgtattagaggttatgcggcatactcataatctgaataagataacaaaatttggcattgtttgctttatctgaatataaacttgtaaagatttatcta

SEQ ID NO: 81971 - DNA, 532 bp, Zea Mays
tatggaagctttggtacacatacaatgatcatcggaaacttataaacaaccttaagcttattcaggactacctttgttcttttgagtcacagggattgaccattgttgatatctcagcaaattcgtttcctcaaacattagattggcttcacagctatcttcttcagtgcatcgagcgaggtcttttggctgcgtgtttagaaagctgcaatcaaggtcaatgacactcttggatgtaacctgtccaaccacacctcagtgggcattatatgctggcaatggacactaagaatatcattgtaaaggattacgcatgagtctggatatcatctccaaccaagaccgatatgaaaataccatcgtgatgttgtcaataccagccataagcgtgggtctgtctgattggggttactcgcattaatattgtactgtattgtattagaggttatgcggcatactcataatctgaataagataacaaaatttggcattgtttgctttatctgaatataaacttgtaaagatttatcta

SEQ ID NO: 81972 - DNA, 5158 bp, Zea Mays
atcggtcggatactgaagtactgaacggttcgagtttggaacacttcattccgccccgtccccaatctctccatctccggctctccaccttccacaaatccccaaatcgccacatcaaatcgaatccacccaccacggaccacgcattcgccatggagtttcccaagcgagggcgagcttttctccaaggttccctgcgaaggagccccaaggcgacgatacctggagccgccacgggggccgacgagaacgcaagctctaagcatctcgtgccggtgggggccgcgtcgccgaagaggaagaaggtgctcggggagaggaacgacagcggcgtcgggggcatggagggcgccgcgtcggcaccagtgcagcagccaaagctcgcgttgagccccccgacgcccgcgagccgcgacgcggggccgtacgacccgaagacgaactacaccacgccgcggccggcgttcctgcgctacgaccccgaacggcgccgcgagatcctcctccgggtgtcgcgtgcggcagaggaatcaaagacaccagtttacccaaacacagcttcgacgccgacgcttttgaaatcccgacgcaccagatcaatttgctgctctagcggtggggatctcccagcggcgacgcaggcgacctcccccagcccctccgcgagctcttcaaggcggcggcgcatgggacctctccaagccggccagtccccctccacgagcggcgttgtccagggctccaggcagaaggccgtgccgacgagttccgccgaagcgctgactccctcagtccctcctcttcgagacgagcccctcctggattcccctccgcttccgccatctttcatatactcatctagtcatctgaaattgattcatcttagtaggaaggagccacaccatcgggcaccatcgggcgtagaaggtggagttgacgtcgaggaagagcgatacaagagctcggatgatgggcacaacaacagcttgagcatggaggttgagcagcgtcgagagttggggcaggagcgtcgtcatctgcggcatcgttggagaagacgtcgtccgccagagaggagacggtagtcgttgcttgtccgtcggagacgagacggcagtcgctgctcgtcgatggaattaggatccatatgaacaagcacaaattgataataatggagtaaatcttagaagtattgagatgcacggtacccaaatccatgcatcaagaaatgagcaaaaataacttcattggtgctcgacataggatatgtctactaaccggtgatttttcactggtttatcttcttttcttgaagcaatcctgccacaatcgaagctctatggtccttggattcaatggtggaggcctcgtactcatgcggatgagacgtggtgttgggagccatgatttggcagaagcatagatttggcagaaacgttctgcattcgcctccacgccatgcctttgtacaacccagatgaagaccccaagcctcattatcacattgggggtcagctgatgaaggtatatatcatgtttttaatacctctacaatcatgcatcttgtgaagtggaaactggagtccaactttgaagaagcatcgaaatgctaccacttaatttttctttggcaagaggtagcatcttctcctccgagcctaatcatatcaatatcactaatgtattccaacctcttcatcgcctcaatatgcccctttttcatggttgatttttcgaagtacacgtggcttggctttgacgaccgatcatcgcagtcatcttcatcaaattcaaactctttactatctttgctagactcttcggccagatcggctaaaatgtcttcaatgacttcgtcaaccgcagtagagtcctcaaccacaccaaccaaagcaccgctcgcaacgactgggatttctcatgccctcccaatagcatccgaagatgccacaatggccagctcgatactcgatttatccccttccattgctaatggaatgaacctggcaaagcatgaagattatgagaaagcagaaggctgaaaggagtttcggaggtagagaaagcaggagcagcaggtcagcaacaacagcaaatattgtacctcattgtcaggtcatcatctgacgcgagattcgaggaatcacattcattttttataatatgagctctaggaaggtgtttttcggacctatgtcgtgaggcctacttcgtttattccgtggtttgagctcgttataaaaaataaactaatatcgtgaggggctactgttgggagcctactcttgttgaaggtccccgaaacactaagatattgatcatctctaagtttatttcaggtgtcccaaagaaatgatagaaccacatgtcctatcaacgtgcacaaagatgaagctggaagcttcgatcttacgattcgaatacgaagctcttgatcggtcagatgaaggaggctttcggctagccaaatgaagggaaatcttaaatgcttgttcaataggtctataaggaaaaaagacggtgatgcccttagtggtttttgtagtttgtatgtataggaattgagggcatgattgtaattccatacaaagttgtatgccagatcatcactataaataaaggcaaagtgtcatgcatgagagggagaacattgggatcttagtaaccaggttcccagatcgatgggatcgagaaacgggaacgtggtacgtggtacgctactaaaactaggatttaacactactggaacgagattgttcccacgttcccggaacgaggaacgtggccaagttcccggttactaagattgggatcataattactccaccttcgaagatacactgcatttctgccttcgaaccattttcttaacttccgaaggtataactgtaagcatttgtaatcaaagaggagtaagaaaggaaatgcatcagtaatgacttgtctcgatcatatttacatgtcttgcttttcctcaattcacaattctaattatattcttcctttaatctatctggtcgttcgcttcggattgaagccagctgtttggactgctgcagctgcaatccatagagacagaaacactttagaagcagtagaagccggtacggattaaagccaagcaaacaggctaacttccatcaagggatagactgaaagaacgaagatccaatgcttctaaattgtgttgccccgttttgttccctcacaggaatctcaacaggtgaccaacagacggccatggcgacaatttggggatttagcggcaatagagaggattaggtcaagacggtgcttagaaagacaaaggagtagatacgatatatgctggaaagtaacaatgcaaatggatgacccaagaagtccaagcctgcgagatgatcttttttggagcaggctgcgaaagcttaagcgtcgcagggttttttcctttacgaagcgactagagaagtagaagtgacgcaaagttgcataatttgaatcgccggtctgataaagtagtcgagtcttcaacagtaagctgagtctatagactcagcgggttgcatgacatagtttgggacttgactagaagacagaagaactcgaacatagcaagatcatgaagattcaagattagaatttcatttgcctgattcaatgactcaaccaaataagactcgggtgctactgttaataatatatactagtgattcccaagtcaaattagacgagaagacacatacgatgggctctgagcccatggactcgacagtcacgaccagaaggaaggcctgtcggcaaaggaattctagaagaataaacatggcaaagatcttatcagaccgggagatatggtcgtgatcctagcacataaggaagaaattcatgtaaagatagagtttgattccctgttagactcagttaccaccttcatcttgtaaccaacccggatacaaaatcttataatctgccacccctctttagagtatacaaggaggatcaaagaagctccatgaggatagatctcatagcagataatacaatcacagtcacaaatagaacgtagggtattatctcaccttgagagcccgaacctatataaatcttcatgtctcctatgcctttaccttcaactttcgattacgcaacctgtagaagtaaccttcttacacatttatttgatctcctttagtagagcttcgtgctggtaacgaattgaggaccccttgctacaaagtgtagtccaagagctacttaactaggataaaactgaatacaaggagacaaatgaggagaatggtgttggttatctattttctcttctctaactctagtttgcatagtagagactccttttatatatagctaaaaatagagtttcaggtatatggaccgtgtgatctttctttatccttctcaacactacctactgatgagtttcaagtctaatgccaactgtggagcgcattgccttctccattatgggatgtggagagattcacaaacatctatggtgagtctcatgcgtataggaatgagctgacatgggatggcatgaattcttaggccctgtttggatccttggaattgaactccattctaataatcgtaataatttaggcatagatcagttaagttagtatggttttatatagaatatatgtgtatactattgttggtaatatgaggggggatatttatgtactacatttcagatacagaagagtgagccaacataagttgcagagtagaaacatggactagggatacacaaaatcaatttccaccccctcgtcctataaatttgggatatacttatatctaaactttggaagatggtggaatgtcaaattccaaaccaattaatctactatattacataaattccaattccttcaaaataaggaatccaactgacctctaaaggaaaccagaacgtgttgattgaagatgttatgaccgacagcctagcagccctaataaaattagttagtttttttagatggataagtatcagttagtttgtttagatggatagggataaggagtttgtttagatagataaggatttggtttgttaagatattagataaggacggttgctatctcagccctataaatgtaccccttcaatcaatgaaagattaagcaagcaaatcatcttgctcggcttccc

SEQ ID NO: 81973 - DNA, 856 bp, Zea Mays
gccacatagattttcatcaaaagagactgcagatgcaaacaacacttgtacatacatacacctcttagctaaatgtactaaaacctaattcatttggctccctcatctattcataggcgttttggtcccagagagaaggggcagtaaaagaaaaagaaaagacaaattgttgcagctagctacacataatcccagattcttctgatgtagtgggtttttacagagacatccctacgcttgggtcgaatcgtcagcatgacctacctgggttacaatctggcaatctgtctgtcgtcgctgaaagtagtatctgcaggaggaaaatggttggtagcagttgttcttcattagcaagtacatatcgacggatagtaactcataaaagaaactgtgttctcatggcatacacaaaaatgtcgattccatggagagatgagtgtttcctgagcaggcgttctattgtataccattctgatcgttgggagccaccttggtaaccaattcggggcatgtggatagccgcttcagagaggagaaaaataatgaaaacaaaataaccgaacctgatagtagctaaagagataattgcataagttcagtacttcaatgcaaaagaggagccataggattataaatttaaaatagctatacaaacatgctctcacggtttataattaagaaatcaaatagacgtttaggctgaacaggattttttggtgcgtacatattacttgaaacaacatacattttgacaactggcatgcgttgctgaagagatgagtggcattccgatattccaaggcatgctttagattgctaaacaattctatattaaggaaccaaacgagaacaatac

SEQ ID NO: 81974 - DNA, 361 bp, Zea Mays
cttattacagctcccattccaggtgtcatgtagggctctagtagagagtccagtaggccttatttattttctttcttctttttcttctttatttcttttttctgttgtgtttgtatttggtctaattttagacccttcttcttaattcaatgatacgcagctctcctgcgtgttcgaaaaaaaaatatactaccaagatcagtgtgacacacatcaaacacacattgattcctaaacttccacagctgccaggcaatgaggatgatgatagtattcatcccttttccttggggaacaccttaattattctgccccaccaggatgcaaaacaactgtatgtggcttggggtgctaagactgc

SEQ ID NO: 81975 - DNA, 1185 bp, Zea Mays
taaagaagttgacttgtgataaaattagagcgaagtgtaatttgaatggcaggcacaagacagagaagcaggtgggaagtcgacgcagttgtttgttgtggatgagttgcgtgtgttgctgctgccgcgcgtgcgtgtcccccgacggccccggaccacgactccctcctcccgccgccgccttctccttcgtcggggaccgaatgcagcgggtcgtcgtcatgcgccacggcgatcgcctcgaccattccgagcccatgtggcccgccaacaagccgcgcccctgggatccgcctctcgacgacgccggcctcctccgcgcctggaccgtcggcaagtgcatcagggccgccgccgccaagcagggatgggccctccaccgggtcctcgtctccccgttcctgcgatgccgacagaccgccgcgcgcgccgtcgccgcgctatgtgccgtccccgacgacgacgcgctgctcgcggtcggcgacccggccaatgtgtctatcgagtatggattgtctgagatgatgaacacccaagcaatgggcattactgttagcaagctggctcccaacgtcagcaagtggtttcctgacttgccagagcttgaagccgacttcccggctggaaccatcgaccattctgcagaaccaatctacccggaggtctctgctttccaactgagtttgcagtgttcaattcacctcttaaaccaaatcttggtctgcagctaccaaagtgggaggaatccatcatggaggcaagaagcagatacgcaagcataatcaaagctcttgctgacaaatatcctcatgaaaacctgctattagtaacacacggtgagggcgttggtgcatccatttcctactttgagatgggactagagatctacgacgtggagtactgtgcgtactctgttctggagaggcaggtgactgcagagcctggtgatgagcatgggggctttacctttaccgcggatagcttcaaggtcatgaccaagagtggtagcacaggcatacgatacgccccggtgtgagagggctggtttcttggttgagcaatatttttttaaaagcatgaataactggactgtctttttaatactttcgacttttagggttcatatcaatatggtttgctttatgggcatgtttggttcaacttttttatgacaatttttttttc

SEQ ID NO: 81976 - DNA, 1228 bp, Zea Mays
ctattgagtgagagggacgcactcaagctggccgcgctggacgttgtggagcctggcattcaccacctgcttcaccttgccgttgacgctgtccctcgggatccagatgccacctttcgccagccattcgttaaagctgtgcggtgctatctgtgttctgcgatagccgagggaggtctcgtgagctttggcggcagcaaccagggatgtctgggccatggagcgtggacgtggcctgggaacctcggtgctggctgaagaaacagaaggatgtcatggcccctgctgttattgcaaagggggaggacgtcatgtggacttctggtctaatctttggaaaaggagaggggattgtggggcttgaaacaaatttagggacacttcatattcaattgctgcctggttgcgcgccccgttcagtggaccacttcatcgagctcctgggcttgcgcaactgtgctggatgcagattttatcgtgcagaaggacgtgggaacgtctgggatgcaaaaggcgaccatgaaaaaaatgttgcatttggccccccatatgcattgcttcaaggaacactggaagttgatggtgtgcccttcaagaagataccaagagaagcatgtccggcggtgaaaagagggtccgttgcctgggtagggtcagggccagagttcctgatcagcttagcggaccacgaggagtggagggacgcctacaccgtgttcgggaatgtgcttcccatggacatggcgatcgctgaggagatgacactgctgccgacaagcacagacgtgtggagcaacgtgaaagtgaaggtgctgaaagatcctgtctacttcaaggtcaagagaagcagcaatgctagcgctgtctaggtgatgggcatatttcttcttgcttgtttggatggaaggctgtggcaacaccggcaaatggttgtttgaccatgaaaacctgtgttataactcacaggagacgatggtctcgcttcattgtgcaaagaaaggggagagttctaatacaacagtaatatactagcacagtagtaatatactagtacaatactcctagtacaaaggccggagattctctcttttttcctcgtgtagaacacgtgactcaacgagttcttcgtgtcttttagtttgcctcctgcgttttggcccgttaggcatctccagcatatcctatatcatatttctattttatcatctattttaaacttcactctgca

SEQ ID NO: 81977 - DNA, 1372 bp, Zea Mays
ttttaatagatatatatatagttcggacctgggcgggtaaagcgtgaacgcctgtacgacgcaacacgccgaggcggtggctgcggcggcggcgcgccggtatttcgattgtgaattccctcctgtctcctgaagcaagcgcagcaatgccagcgcttcccgcttttcccctcacccgccgcccatccgatgccgactgctgcaggggtatggagggcctcgagctctggggcccggcggtcaagtggggctcagaccaccgcctgccctccgccgccgcctgctgcgccgcctgcaaggccatgtgccctcaccctaaggacggggcctgccgctgcgactcgtgggtcttctgcggtgacgagcgcaaatgcaaggacaggctcggggagtgctggctgaagaaacagaaggatgtcatggcccctgctgttattgcaaagggggaggacgtcatgtggacttctggtctaatctttggaaaaggagaggggattgtggggcttgaaacaaatttagggacacttcatattcaattgctgcctggttgcgcgccccgttcagtggaccacttcatcgagctcctgggcttgcgcaactgtgctggatgcagattttatcgtgcagaaggacgtgggaacgtctgggatgcaaaaggcgaccatgaaaaaaatgttgcatttggccccccatatgcattgcttcaaggaacactggaagttgatggtgtgcccttcaagaagataccaagagaagcatgtccggcggtgaaaagagggtccgttgcctgggtagggtcagggccagagttcctgatcagcttagcggaccacgaggagtggagggacgcctacaccgtgttcgggaatgtgcttcccatggacatggcgatcgctgaggagatgacactgctgccgacaagcacagacgtgtggagcaacgtgaaagtgaaggtgctgaaagatcctgtctacttcaaggtcaagagaagcagcaatgctagcgctgtctaggtgatgggcatatttcttcttgcttgtttggatggaaggctgtggcaacaccggcaaatggttgtttgaccatgaaaacctgtgttataactcacaggagacgatggtctcgcttcattgtgcaaagaaaggggagagttctaatacaacagtaatatactagcacagtagtaatatactagtacaatactcctagtacaaaggccggagattctctcttttttcctcgtgtagaacacgtgactcaacgagttcttcgtgtcttttagtttgcctcctgcgttttggcccgttaggcatctccagcatatcctatatcatatttctattttatcatctattttaaacttcactctgca

SEQ ID NO: 81978 - DNA, 1450 bp, Zea Mays
ctgtggttattatccgattaggccccaatttaatttgggttttccgtttcgttacccactagaatcattcggcagacctgggcgggtaaagcgtgaacgcctgtacgacgcaacacgccgaggcggtggctgcggcggcggcgcgccgacgccgcggtcgcctcgtcctttccctcgtcgtcttcgttgctgtctccgccgccgcagccctcgcctacctatctttcccctctgccgggcggacatcgcccccggcggtccggacggaggccgactgctgcaggggtatggagggcctcgagctctggggcccggcggtcaagtggggctcagaccaccgcctgccctccgccgccgcctgctgcgccgcctgcaaggccatgtgccctcaccctaaggacggggcctgccgctgcgactcgtgggtcttctgcggtgacgagcgcaaatgcaaggacaggctcggggagtgctggctgaagaaacagaaggatgtcatggcccctgctgttattgcaaagggggaggacgtcatgtggacttctggtctaatctttggaaaaggagaggggattgtggggcttgaaacaaatttagggacacttcatattcaattgctgcctggttgcgcgccccgttcagtggaccacttcatcgagctcctgggcttgcgcaactgtgctggatgcagattttatcgtgcagaaggacgtgggaacgtctgggatgcaaaaggcgaccatgaaaaaaatgttgcatttggccccccatatgcattgcttcaaggaacactggaagttgatggtgtgcccttcaagaagataccaagagaagcatgtccggcggtgaaaagagggtccgttgcctgggtagggtcagggccagagttcctgatcagcttagcggaccacgaggagtggagggacgcctacaccgtgttcgggaatgtgcttcccatggacatggcgatcgctgaggagatgacactgctgccgacaagcacagacgtgtggagcaacgtgaaagtgaaggtgctgaaagatcctgtctacttcaaggtcaagagaagcagcaatgctagcgctgtctaggtgatgggcatatttcttcttgcttgtttggatggaaggctgtggcaacaccggcaaatggttgtttgaccatgaaaacctgtgttataactcacaggagacgatggtctcgcttcattgtgcaaagaaaggggagagttctaatacaacagtaatatactagcacagtagtaatatactagtacaatactcctagtacaaaggccggagattctctcttttttcctcgtgtagaacacgtgactcaacgagttcttcgtgtcttttagtttgcctcctgcgttttggcccgttaggcatctccagcatatcctatatcatatttctattttatcatctattttaaacttcactctgca

SEQ ID NO: 81979 - DNA, 1459 bp, Zea Mays
gtttcgttacccactagaatcattcgggtatttggcctacgaatttgggtattttggatttcgggctgtgaaatcgccaaacacctgagatctgctttttcggtctggtggaacgtggaattgcagcagacctgggcgggtaaagcgtgaacgcctgtacgacgcaacacgccgaggcggtggctgcggcggcggcgcgccgacgccgcggtcgcctcgtcctttccctcgtcgtcttcgttgctgtctccgccgccgcagccctcgcctacctatctttcccctctgccgggcggacatcgcccccggcggtccggacggaggccgactgctgcaggggtatggagggcctcgagctctggggcccggcggtcaagtggggctcagaccaccgcctgccctccgccgccgcctgctgcgccgcctgcaaggccatgtgccctcaccctaaggacggggcctgccgctgcgactcgtgggtcttctgcggtgacgagcgcaaatgcaaggacaggctcggggagtgctggctgaagaaacagaaggatgtcatggcccctgctgttattgcaaagggggaggacgtcatgtggacttctggtctaatctttggaaaaggagagttgctgcctggttgcgcgccccgttcagtggaccacttcatcgagctcctgggcttgcgcaactgtgctggatgcagattttatcgtgcagaaggacgtgggaacgtctgggatgcaaaaggcgaccatgaaaaaaatgttgcatttggccccccatatgcattgcttcaaggaacactggaagttgatggtgtgcccttcaagaagataccaagagaagcatgtccggcggtgaaaagagggtccgttgcctgggtagggtcagggccagagttcctgatcagcttagcggaccacgaggagtggagggacgcctacaccgtgttcgggaatgtgcttcccatggacatggcgatcgctgaggagatgacactgctgccgacaagcacagacgtgtggagcaacgtgaaagtgaaggtgctgaaagatcctgtctacttcaaggtcaagagaagcagcaatgctagcgctgtctaggtgatgggcatatttcttcttgcttgtttggatggaaggctgtggcaacaccggcaaatggttgtttgaccatgaaaacctgtgttataactcacaggagacgatggtctcgcttcattgtgcaaagaaaggggagagttctaatacaacagtaatatactagcacagtagtaatatactagtacaatactcctagtacaaaggccggagattctctcttttttcctcgtgtagaacacgtgactcaacgagttcttcgtgtcttttagtttgcctcctgcgttttggcccgttaggcatctccagcatatcctatatcatatttctattttatcatctattttaaacttcactctgca

SEQ ID NO: 81980 - DNA, 1405 bp, Zea Mays
gtttcgttacccactagaatcattcgggtatttggcctacgaatttgggtattttggatttcgggctgtgaaatcgccaaacacctgagatctgctttttcggtctggtggaacgtggaattgcagcagacctgggcgggtaaagcgtgaacgcctgtacgacgcaacacgccgaggcggtggctgcggcggcggcgcgccgacgccgcggtcgcctcgtcctttccctcgtcgtcttcgttgctgtctccgccgccgcagccctcgcctacctatctttcccctctgccgggcggacatcgcccccggcggtccggacggaggccgactgctgcaggggtatggagggcctcgagctctggggcccggcggtcaagtggggctcagaccaccgcctgccctccgccgccgcctgctgcgccgcctgcaaggccatgtgccctcaccctaaggacggggcctgccgctgcgactcgtgggtcttctgcggtgacgagcgcaaatgcaaggacaggctcggggaggggattgtggggcttgaaacaaatttagggacacttcatattcaattgctgcctggttgcgcgccccgttcagtggaccacttcatcgagctcctgggcttgcgcaactgtgctggatgcagattttatcgtgcagaaggacgtgggaacgtctgggatgcaaaaggcgaccatgaaaaaaatgttgcatttggccccccatatgcattgcttcaaggaacactggaagttgatggtgtgcccttcaagaagataccaagagaagcatgtccggcggtgaaaagagggtccgttgcctgggtagggtcagggccagagttcctgatcagcttagcggaccacgaggagtggagggacgcctacaccgtgttcgggaatgtgcttcccatggacatggcgatcgctgaggagatgacactgctgccgacaagcacagacgtgtggagcaacgtgaaagtgaaggtgctgaaagatcctgtctacttcaaggtcaagagaagcagcaatgctagcgctgtctaggtgatgggcatatttcttcttgcttgtttggatggaaggctgtggcaacaccggcaaatggttgtttgaccatgaaaacctgtgttataactcacaggagacgatggtctcgcttcattgtgcaaagaaaggggagagttctaatacaacagtaatatactagcacagtagtaatatactagtacaatactcctagtacaaaggccggagattctctcttttttcctcgtgtagaacacgtgactcaacgagttcttcgtgtcttttagtttgcctcctgcgttttggcccgttaggcatctccagcatatcctatatcatatttctattttatcatctattttaaacttcactctgca

SEQ ID NO: 81981 - DNA, 3361 bp, Zea Mays
tttcaatcccctttcatctacctctaccagcagaagctaactattttcatttccatacatttattcctcttcccagttctattagaacatcctccaaaatcacttggtaaatcaacgattatgccgtagccacagtagacagtggatcggggacacgcgagcatgatgaacttgctatgcaagttgaacttgagtgtttgtattctttcgggatggttctctcccgttcacctgggttcttacataccagcaaaactgtcaagacccgtcagggtccaagggggctgcggcaaggagcgtaggtcaaaggataaaaagattagttaagattatctagaaagattatcagttagtaagtttgttgagagtttttaagaacaattttaaggagataaggatttctagctagatagaggcggccagacggcctatttatgtaatcaatagatgagaaataaagtagacacaagtcgatctcgttgcataaggacaacttcattgcccagatcacaagcatctatttcgagaacaaacagctcactgaaatctggaagggtttagggtttagggctaggactgaggtacaataccctgtaacttgactagagaatttttatggcaaaactgaatagttttatgctcccaatggtaagtcattggactgtgaggggagagccagtcaaacccgagaatggcgtcaaaagcacataaatccaaaaccatcatatcattgcagaaactatgtcgttgaatccaccaacttaactggaatacctgattgtcagtcacgagagtttctccatttgccactcgtacttgtttaggtgccatggacaccgactgaataccacaagctgccaaaaaagatgcactgacaaaactgtgagaactaccactgtccaccaatattaacatgactttgttctggaccaaggctcgaagtttcaacgcttgaccatgatcagttccagttacaacgttgagagagaactggcaaaattcagatgttagagcatcctctagatccaactgatggagcacctcatcagttaaattcacatcgagatcattaactaccatggcatttacagctggtttggggcatttgagacattttatcagatggttggcgtcaaagggttcagaacactaaaagcataagttattggcccgacagtaatcacgtttctgtctccctttgctgtatggagatgctgctgggaagccagatctttgatcaaacttaggagtaaactgaccacttcctcgaggtgaatgctgtttggaaagcctgaatttgcccttgtccaataaggtttcctgaatcttagcattgcaaacggcttgctccatagttgtggtaaatgggattgcactgctgcaacaatatatggtttcaaatttctagtaaactgagtgacaaaacatcatgtcaaaaccagaattatgcatttccaacataaactgcagagactcaaactctgattggaattcctccaccgatccagtttggttcaactccaataaagtgtctaagacctgttcataatcataagccccaaataaactggtcccaattcatcatccccctattagcctatgaacctcaacccatctctgtgttctccctcatgtgcatggtggtagttgtgacccacaagtgcttaggaacattatagaggtgaaagaaatcttcgcactgacgtcgccagatcttaggatcacggccatgaaaatctggaaacacgagtttgggaacaacatgtcgatacccagtctgatcatcatggacaactcgatgtctatcatacgggggacggcgtggaatgtgttcaccagaatgtcaaggaaaaggttggggcctctagtgacgcgactgctgcgatcccatagatgaaacttcgaacgcatcctctgcttgccaattcagcgttagctgagccgcggcttgcccggtggcttcgatctgcttggcgagctgggattgatccttcaacacttgttccatagctttgaccccccaactccttgttcacttgcatgtgcgcctgaactcgtgggatgtcgcccgtcctggtgaagaggaggtcaatactctccgtcatgtgattccagcggttttcctcctgctttcgcgccgcctccatcgcctccaacacaaatcagggaaatcgacttccgtcgccggtgttgcgcgacagacagaagaatttcaccaacccaaccctgttatggtggcgatcaacggagtatgcaaaacggcgacagtcgcacagcaggaaagtgtctctgataccaattgtcgtgcccgtggccgtggtgatcgccgacgacgtgagaaacggtggatcggggacacacaagcacaatgagcttgcgagtgctggctgaagaaacagaaggatgtcatggcccctgctgttattgcaaagggggaggacgtcatgtggacttctggtctaatctttggaaaaggagaggggattgtggggcttgaaacaaatttagggacacttcatattcaattgctgcctggttgcgcgccccgttcagtggaccacttcatcgagctcctgggcttgcgcaactgtgctggatgcagattttatcgtgcagaaggacgtgggaacgtctgggatgcaaaaggcgaccatgaaaaaaatgttgcatttggccccccatatgcattgcttcaaggaacactggaagttgatggtgtgcccttcaagaagataccaagagaagcatgtccggcggtgaaaagagggtccgttgcctgggtagggtcagggccagagttcctgatcagcttagcggaccacgaggagtggagggacgcctacaccgtgttcgggaatgtgcttcccatggacatggcgatcgctgaggagatgacactgctgccgacaagcacagacgtgtggagcaacgtgaaagtgaaggtgctgaaagatcctgtctacttcaaggtcaagagaagcagcaatgctagcgctgtctaggtgatgggcatatttcttcttgcttgtttggatggaaggctgtggcaacaccggcaaatggttgtttgaccatgaaaacctgtgttataactcacaggagacgatggtctcgcttcattgtgcaaagaaaggggagagttctaatacaacagtaatatactagcacagtagtaatatactagtacaatactcctagtacaaaggccggagattctctcttttttcctcgtgtagaacacgtgactcaacgagttcttcgtgtcttttagtttgcctcctgcgttttggcccgttaggcatctccagcatatcctatatcatatttctattttatcatctattttaaacttcactctgca

SEQ ID NO: 81982 - DNA, 934 bp, Zea Mays
gacgacgtgagaaacggtggatcggggacacacaagcacaatgagcttgcgaggggattgtggggcttgaaacaaatttagggacacttcatattcaattgctgcctggttgcgcgccccgttcagtggaccacttcatcgagctcctgggcttgcgcaactgtgctggatgcagattttatcgtgcagaaggacgtgggaacgtctgggatgcaaaaggcgaccatgaaaaaaatgttgcatttggccccccatatgcattgcttcaaggaacactggaagttgatggtgtgcccttcaagaagataccaagagaagcatgtccggcggtgaaaagagggtccgttgcctgggtagggtcagggccagagttcctgatcagcttagcggaccacgaggagtggagggacgcctacaccgtgttcgggaatgtgcttcccatggacatggcgatcgctgaggagatgacactgctgccgacaagcacagacgtgtggagcaacgtgaaagtgaaggtgctgaaagatcctgtctacttcaaggtcaagagaagcagcaatgctagcgctgtctaggtgatgggcatatttcttcttgcttgtttggatggaaggctgtggcaacaccggcaaatggttgtttgaccatgaaaacctgtgttataactcacaggagacgatggtctcgcttcattgtgcaaagaaaggggagagttctaatacaacagtaatatactagcacagtagtaatatactagtacaatactcctagtacaaaggccggagattctctcttttttcctcgtgtagaacacgtgactcaacgagttcttcgtgtcttttagtttgcctcctgcgttttggcccgttaggcatctccagcatatcctatatcatatttctattttatcatctattttaaacttcactctgca

SEQ ID NO: 81983 - DNA, 1208 bp, Zea Mays
atgaccatggagcggctgctgtgggcgtccacgcaggcgctcggctgcggcggcaagcgcgacgaagccgggctggtggggcagctgggcgagtggctctgccgggccgcgctaccgccaccgcgggtgtgcggggcgcccggggggccgcccgttacggtgcgccgggtgcgcctgcgcgacggccgccacctggcctacgaggagtccggcgtgcccaaggaggtggcgcgctacaggatcatcttctcgcacggcttcgccggctcgcgcctcgcaggaagttgcggaggagctaggcgtgtacatggtgggcttcgaccgcgccggctacggcgagagcgacccgaacccttgccgctccgtgcggagcgcggcgctggacatggaggagctggccgacgcgctgggcctgggcgacaggttctacgccgtgggcgtctccctcggctgccacgccatgtggagcgcgctccgctacatcccgcacaggctggcgggcgccgccatgctggcgcccgtggtcaactactggtggcccgggctccccgcgggcccggcggcggaggcgtacgcgcggcaggcgcgcggggaccagtgggcgctgcgcgtggcgcaccacgcgcccgggctcctccactggtggatggcccagcgctggctacccacctccaccgtcgtcgacaacaccacccacctccccaacgggcgcgacgccgaggtccgccgcgcgctcgccgccgacggcacgctccggcggaagcgggaggcggccacacagcagggcgtgcacgagtcctaccaccgcgacatggccgtcatgttcggcaggtgggagttcgaccccatggacctgccggagccgccctgccccgtgcacctgtggcagggcgacgaggacggcctcgtgccggtcgtccttcagcgccacgtcgccggaaccctcgcgtgggtcaactaccacgagctccccggcaccggacacttcctgtccgccgtccctggcctcggggacaccgttctacggacactcttcggttcatcagccgccctggtagcgtagcatcaaccaagtacaggattattatttgatcatgagctctgaactcatgataggtgtgtcatttagcttttgttctttgttcctcttgtttcttttgtaaaattatgctgccaacaggcatctgtaaaatgaaagttcttctggc

SEQ ID NO: 81984 - DNA, 1370 bp, Zea Mays
cggaataataaaatcccccaacgactcgctcgagtgggagaggcggaggaggaggcagctttgtcgcggggcagcagcctacaagaacaagaggtcgcgccgctctagctctggttgggctctgcgccgcggggatcggcgtcggcaggaggaggacgaggaggggtggcggcgcgaccggcgggggcgaaggcggcgtcggtgagaagagaggagaccttaaggagagtttttacattgggcctcttgatgatggtgatatgcataacgatgtaaaccagtggccttctgaagagcgcttgccatcttggaaggagacaatgaagctatactttgcagctgttctggatactggcacaaggatactctctctagttgctttgggtttggatttggatgctgatttctttcataaaattggtgcattgaaatgcccgtcaacatttcttcggttattgcattaccctggtgaagtacatgagtctgatagtggaaactatggtgcgtcagctcactcggactatggtatgataactcttttagtgacagatggcactcctggcctgcagatatgcagggagaaggataggaatccccaactatgggaagatgttcatcatattgatggggcccttattattaatattggtgatttgctagagaggtggacgaattgtgctttcagatcaactttgcatcgtgttgttgcaatcggtaaagagcggtattcggtggctttctttcttgatccaaatcctgacacactggtgcagtgtttggaaagttgttgcagtgaagcatgtccaccaaggtttccacctatcaagagttgggactacatagccgggcgactaaattcaacttacaaataatcaccaccacgtttgtaatgctatgctcgtttacaacagcttgacaccacagtaatgtttgaacccaggattaaagatagttttcaagaaaggcggagctatgtatgtgagctggatctccatgtctcccctccccctagtgtctggaggagtgcactttctggatcacgcgtcgtcaggaagcaagcaagcaagcatacgcgcaattcccgctgcgcaattcccgatcgtaccctgctccaaatctttgtgcaagtctctgctcccttgaatgcaactgatgccaatcccatcaatctctttctttgaaaggagacatactgcttcctctagtttcatacctgctgaacacgatcaatggtttgcatgtactctaagatatacatgacccgcatgattgctatagtaaagactattaaaaatgaatttagctgacttcatttccctggtcaaagaaattgttgacattttgagtcagtttaatttcctcattagaag

SEQ ID NO: 81985 - DNA, 2009 bp, Zea Mays
ctctcaattcgacgtccagccgaagcaagaaaagatcataggggagagtatactcggtggggcttgtggttttctggagcattcctactagtctgtgttgtagctgccaagaaatgagcttggggacctgcccggccgcggccggcgacgcgacggcagaggagctgcttcaacgggcgcgggggctggtgccacccgcccttgccgctgcgcgcgcggccactggcttcggtgggcggtggaaggctatcgcagcgaggctggagaaggtgccaccgtgcctgtcggacctgtccagccacccctgcttttccaagaactcgctgtgtcgggagctgctgcagtcggtggctgcgactctagcagaggccgccgagctcggtgcgcgctgccacgagcctccgaaggcagggaagctgcagatgcagagcgacctcgacgctctggccgggaagctggacctcaacctcagggactgctcccttcttgtcaagactggcgtgctgtctgacgcgacggttccggcggccccggctgcgtgcgcacaggctgacgtgcgggagctgcttgccaggctgcagattgggcacgcagaggcgaagcaccgggctgtggatggcctgctcgatgctctgcgcgaggacgagaagagcgtactgtcggcgctcggccgtggcaacgtggccgccctggtgcagctgctcacggcgacggcgcccaaggtcagggagaaggccgccactgttctgtgcttgcttgccgagtctggcagctgcgagggcctactcatgtcagaaggcgcgctgccgccgctcgtccggctggccgagtccggcagcctcgttgggcgggagaaggctgtcatcacgctgcagcggctgtccatgtcggccgacatcgcccgcgcaatcgtcggccacagcggcgtccgcgctctgatcgacatgtgccagaccggggactccatcacacagtccgccgcggccggagcgctcaagaacatctccgcagtgccggaagtccggcaggcgctggccgaagaaggcgtcgtgcgagtcatggtgagcctgctggactccggcgtcgttctcggctccaaggagtacgccgcggagtgcctgcagaacctgacgtcaagcaacgacagcctgcggcgtgccgttgtgtccgagggcgggctacggagcctgcttgcctacctggacgggccgctgccgcaggaatcacccgtggcggcggtccggaacctggtgagcgcggtctcagcggacagcctggtgtcgctttgcgtgctcccgcgcctcgtccacgtgctccgtgacggttccgtgggtgctcagcaggctgccgcggcgaccatctgcaagatgtcgagctccatggacatgaagcggctggtgggcgagcacgggtgcatcccgctgctggtgcggctgctggaggccaagtcgaacggcgcacgtgaggcggcggcgcaggcggtggcgagcctgatggggtgccccccgaacgcgagggacatgaagaaggacgagaagagcgtggccaacctggtgcagctgctggacccgagcccccagaacacggccaagaagtacgccatctcctgcctgctggcgctttcgacgagcaagcggtgcaagaagctgatgatctcccacggcgctatcgggtacctgaagaagctctcggagtcggagaaggacgtggccggcgcgaagaagctgctcgagaagctggaccgaggaaggctacgcagcctgttcggcaggaagtagccaccaggcgatcgatcgttcttcatgtacaaagatcccgtccgtcctgtttgtgtcatagcctctatgactatgatgaagtgaagtgcggcaggcagctgttcgttcatgtgaagtccctaacaatggccaaacgaatttctttctagcggtcccctcgcaatgctaatataaaatttcttcatggtgtcgtgggcctcagagaacttctgaagatctgcgaaggagaaa

SEQ ID NO: 81986 - DNA, 1612 bp, Zea Mays
agatagaccttctagtattaatcaatattatgggggattatgaacctaaacagagttcacattagaaaaatctttttaatcaacatgaaagccggcagccacgcccacacgacaatcatttcacgggcggctcccgctccaagcttcagccaagccggagaagggggggagcctgtctccttcccgtggtggaacctcgtgttgccggaacctccgcgccgccgttgaatccatccgacaggcgtgcgtggagcacgggttcttttacgtgaccaaccacggggtggaccgcggcctgctcgaggcggtgttcgcggagagcaagaggttcttcgacctgcctatggaggataagaagggcgctgctccagggggcgcaaaccaccggggttacacgccgccctacgccgagaagctcgacgcctcttcccagttcgtaggagaccttaaggagagtttttacattgggcctcttgatgatggtgatatgcataacgatgtaaaccagtggccttctgaagagcgcttgccatcttggaaggagacaatgaagctatactttgcagctgttctggatactggcacaaggatactctctctagttgctttgggtttggatttggatgctgatttctttcataaaattggtgcattgaaatgcccgtcaacatttcttcggttattgcattaccctggtgaagtacatgagtctgatagtggaaactatggtgcgtcagctcactcggactatggtatgataactcttttagtgacagatggcactcctggcctgcagatatgcagggagaaggataggaatccccaactatgggaagatgttcatcatattgatggggcccttattattaatattggtgatttgctagagaggtggacgaattgtgctttcagatcaactttgcatcgtgttgttgcaatcggtaaagagcggtattcggtggctttctttcttgatccaaatcctgacacactggtgcagtgtttggaaagttgttgcagtgaagcatgtccaccaaggttttcatctctcaggtttccacctatcaagagttgggactacatagccgggcgactaaattcaacttacaaataatcaccaccacgtttgtaatgctatgctcgtttacaacagcttgacaccacagtaatgtttgaacccaggattaaagatagttttcaagaaaggcggagctatgtatgtgagctggatctccatgtctcccctccccctagtgtctggaggagtgcactttctggatcacgcgtcgtcaggaagcaagcaagcaagcatacgcgcaattcccgctgcgcaattcccgatcgtaccctgctccaaatctttgtgcaagtctctgctcccttgaatgcaactgatgccaatcccatcaatctctttctttgaaaggagacatactgcttcctctagtttcatacctgctgaacacgatcaatggtttgcatgtactctaagatatacatgacccgcatgattgctatagtaaagactattaaaaatgaatttagctgacttcatttccctggtcaaagaaattgttgacattttgagtcagtttaatttcctcattagaag

SEQ ID NO: 81987 - DNA, 1010 bp, Zea Mays
aaaaaacgttgattcctcacaacaaaataaagggatactggcacaaggatactctctctagttgctttgggtttggatttggatgctgatttctttcataaaattggtgcattgaaatgcccgtcaacatttcttcggttattgcattaccctggtgaagtacatgagtctgatagtggaaactatggtgcgtcagctcactcggactatggtatgataactcttttagtgacagatggcactcctggcctgcagatatgcagggagaaggataggaatccccaactatgggaagatgttcatcatattgatggggcccttattattaatattggtgatttgctagagaggtggacgaattgtgctttcaggtggctttctttcttgatccaaatcctgacacactggtgcagtgtttggaaagttgttgcagtgaagcatgtccaccaaggtttccacctatcaagagttgggactacatagccgggcgactaaattcaacttacaaataatcaccaccacgtttgtaatgctatgctcgtttacaacagcttgacaccacagtaatgtttgaacccaggattaaagatagttttcaagaaaggcggagctatgtatgtgagctggatctccatgtctcccctccccctagtgtctggaggagtgcactttctggatcacgcgtcgtcaggaagcaagcaagcaagcatacgcgcaattcccgctgcgcaattcccgatcgtaccctgctccaaatctttgtgcaagtctctgctcccttgaatgcaactgatgccaatcccatcaatctctttctttgaaaggagacatactgcttcctctagtttcatacctgctgaacacgatcaatggtttgcatgtactctaagatatacatgacccgcatgattgctatagtaaagactattaaaaatgaatttagctgacttcatttccctggtcaaagaaattgttgacattttgagtcagtttaatttcctcattagaag

SEQ ID NO: 81988 - DNA, 662 bp, Zea Mays
taagcacaaagatatccattcaggtggctttctttcttgatccaaatcctgacacactggtgcagtgtttggaaagttgttgcagtgaagcatgtccaccaaggtttccacctatcaagagttgggactacatagccgggcgactaaattcaacttacaaataatcaccaccacgtttgtaatgctatgctcgtttacaacagcttgacaccacagtaatgtttgaacccaggattaaagatagttttcaagaaaggcggagctatgtatgtgagctggatctccatgtctcccctccccctagtgtctggaggagtgcactttctggatcacgcgtcgtcaggaagcaagcaagcaagcatacgcgcaattcccgctgcgcaattcccgatcgtaccctgctccaaatctttgtgcaagtctctgctcccttgaatgcaactgatgccaatcccatcaatctctttctttgaaaggagacatactgcttcctctagtttcatacctgctgaacacgatcaatggtttgcatgtactctaagatatacatgacccgcatgattgctatagtaaagactattaaaaatgaatttagctgacttcatttccctggtcaaagaaattgttgacattttgagtcagtttaatttcctcattagaag

SEQ ID NO: 81989 - DNA, 1862 bp, Zea Mays
gtaatatttattcatagtatcatgccaaataaatagtacaatatataaatacataaataggcaataatttcgatctcaattactgcatgaaaatatttctcatcattttcatggttattttgaaccttttctatagttcaagaggtagtgttgaacttcttccttttttttttggtccatagtgtaattgaaaaaccttttgtctataaaatttatgaagcctgctagacatgtgaggcccatttcaacctacgaagggggcgctattagggttcccctatccagccgccaccgttgttctctcctctttttttctttctttcttactctcattttctctcatctaattgcggatgggagcactggagtagccacttgtgtttggacgggagcgcaacctgctcgcccgcatggcctgctggcttacggcggctgcggctcgcctgtcatagcggcggcggtccttgcccgcgcgcttgtgcctgctcgcggtggcatcggcggtccggccgggatgctcgcctgcggggcagcggcggccggcacggtgcccgcactctccttcggtggcgagacggcggcggcgagcccgcgctcgcacgcttgcgcgaccgtgttgcgacggcggcgccctgcgcccgcgctccaacgacggcgaggcagcgcgctttgctgtggaccgtggagcggcagcgactgagcttgcgcacgcgcgtgaccacgagtatgcactgccttggagtgggttgggttcacgcgttggcgttttggcggtggtgccagcgcccgcacccgtgctgcggcggcagcgaggtggcagcctggcaggtgtgcgtctcgctcctgcactacgagttaaggtcgtagtttgcttgctagtgcggcaacgacgtcaaccttagcactgtgttgccattcttttttttctttctttcgatgatgcagtaaaatcaatgagcgtattcaaagttccaacagcttcgtgccggtgaaaaaaaatctgcttgggatgctacttttctctttccttgtgtgctgtgtttttctagagggaataaaaagagattcaagagatacagagccttcctacttactttgcgaacttctgttgagagcattcgtgatgataacgtgttaagaaccctttgctaccgaatgtagtccaaaggcttcttaactcataaagacggaagacacaaagatataggaggaactgatattctcattcatgtattctgttcactggttacaacaaatggtagtgtcctcctctatatatagtgcatagttagggtttcggctagatgggccacatgggccttcggggtccaaactggtttcttaacagttctaaagcaattgggtgatttagtggagagtagctgatcaaacagaaatcattgagccggccatgtggcatctgcacatgagcacatcagatattgggaaacggcggtcgtggttggaatatttatttatttatatatttatttatttatttattattgtggctatggaggggggtgatcatagagtgcagaggatcaggagacgcacttatcaccgagtggtacgtttggtgagatttttgttttattttcttccacgaccataaggaacatagcatgtgccatggacggtacactaatgtctggacgcaactaccaccaacgagcacgggaccaccgccccttgcttgcgatgttatgttactaccaacgggggctccaatcatcttgcaagcaaaagaaaagaggacacaatctataaacaagattagaactagtcgctaaaaagcagaccttgttggcaaataattataggaaggaagattcttcttattgcatctgtacagaaattac

SEQ ID NO: 81990 - DNA, 2082 bp, Zea Mays
ccctatccagccgccaccgttgttctctcctctttttttctttctttcttactctcattttctctcatctaattgcggatgggagcactggagtagccacttgtgtttggacgggagcgcaacctgctcgcccgcatggcctgctggcttacggcggctgcggctcgcctgtcatagcggcggcggtccttgcccgcgcgcttgtgcctgctcgcggtggcatcggcggtccggccgggatgctcgcctgcggggcagcggcggccggcacggtgcccgcactctccttcggtggcgagacggcggcggcgagcccgcgctcgcacgcttgcgcgaccgtgttgcgacggcggcgccctgcgcccgcgctccaacgacggcgaggcagcgcgctttgctgtggaccgtggagcggcagcgactgagcttgcgcacgcgcgtgaccacgagtatgcactgccttggagtgggttgggttcacgcgttggcgttttggcggtggtgccagcgcccgcacccgtgctgcggcggcagcgaggtggcagcctggcagatcgtagacggtggagtcggcggcgtagcatccaagcacgcgcacgaagacggcgaacctctccatctcctggatggcctcgcggacgcgcgggtcgtgcgcggcgccctcgcagtccacgtagaggacgtgcgggaaggcgcgcagcgtgggtgcgccccgggcgctcgtgtccagtatcaccaccggcggccgctcgcctggtccggatccagcgccttcgttgttgatgacctccagcttggtgaggttgatgttgcgggaggagaaggcggagagcaccttgagcacgaccaccatggagccgccccggtgcgcgaccaccatgctggtcttggcgtcggcgtccacgcccagcgccacggccacaggcgacggcggcctggagaggagcaggaatcgcgtcacgttccaggactcgtcctggagcccgtgcgcgaggacctggagcccgtacaggtcggcggcgcgcgggctggcgatggcggctgtgtccagcatccgcttggaccgcagcatctccacggcgcccgccgtgtcctccacgggctcgcggtccaccccgaggcgggccagcgcgcgcccgcagtgcgccagcgccatggggtggctgatcacccgccgcacctcggcggcgcgcaccccgggcatggccagcaggcagtagtgcacgaacaggttgatctcctgcaccaccaccaggccgtgccgcaggagcaggtcgtagttgcgcagcgccgtcccctccatggtggactccacggggaggatggcgcggtcggcgccgccgcgctccacggcagccagcgcgtccgcgaaggcgcggcacgggaccgtgtcgcagccgggcagcgccgtcttggccgcgaactcgctgtaggcgcccggcgcgccctggaacgccacgcgcaggccggagccgtcctggcctccgccgcccgtgctcaccgagaggtggatccggtccgcatgcccgttcactcccttcttgccctggccgttgatgcgtgccttgccgttgggcgccggcctctcgggcgcgtcaccgttgaccttggccgcggcggtggggacgaaggaggaaggcctgtgccttgtccggcgggggctggggaggaggaggtgctttgggaggttgagggaggaggtgtaggccatagaacgcggcgccgggcggtgggatcggcggtgaggtttggggggggttacctttagcttgcttagccgacagggtggtgggcggaggctgttgacttttataacccgggaagcggccggcgtcctggtcccggtgctttgctgcctgcaaggctgcaactaacaataattgtcctctactaccgagcactgcccgttactggtcttttgttgccttggctgtgacgaccggccggtgcttctagatgatttggatttcctctagggcatgtttatttccttggaaatgaaactcattccatgagtaaaattctagatattagattcctaaagaaagtaatttcttagaatttgattcaattcaaattttt

SEQ ID NO: 81991 - DNA, 1196 bp, Zea Mays
cgtttccgaccgttttcatccctgccaagttgcacgttgcgctttctcctgtcgtcgccctcgcccaccaccttcggagctcggagactcggagtcttcccccacccccataacgtcctcttccgtgctctgcgttgccgcctgcgggcgccgcaagccgtgcgtgcccgcgggttccccgatttgtagtttatttacggaagtttacaattgatcaacaagacttagtccaaccctacttttcaaatcactatggttaccctttcctacagctgggcaagcgtagaatgtcagttcatggtgttgagtatgcatttggagcacatgactattcgattagtggagtttttgaggtggaacctcggcagtgtcctggtttcaaatttcggaaatcaatatgcatgggaactaccagcctggatcctctccaaatcagagagttcatggagattcagtcagtaaattacaatggtgatacctaccatttgataagtaaaaactgcaaccatttctgtgaggatatctgcaaaaggttgacaggaaattttattccaaaatgggtgaatcgacttgctagaatgggtgctgtttgcaactgcattctaccagagtccctcaagatcaacgcggccggtcatgacccagcttctcgagctgaagatagcgagagaaaaatgctgacaagttccttcagttgcttctgttcaatctctctatgccaaagacatttctcaacatcttcgccgtctctgcgttcctccgcgaacggcacttcttgggataccaagcagtccaattctacccgactgaagaagagctgacagttgaggtcctgtgtatcatatttaactcatgaggcacaaggatccttttttgtcagcaatctcttctacgaccttcatcagagaaggatgaagaggtattgattgataaggtgtttttgcatactcgagcgtcggatccagctgtgcttgaacatctgtacagagattgtgtagaaattatttcttacatttgaatttgaaatacagtgagctggaggaaactccaccctagacttttggaaaaaaacaaactccaaaaaaatcattgatgggtgctgcctctggagtccgaagtgatatttcgcctgtggtagtttgcaaatttggccatttttatacccttgcctatataaagttttatagttttgtttt

SEQ ID NO: 81992 - DNA, 1193 bp, Zea Mays
cgtttccgaccgttttcatccctgccaagttgcacgttgcgctttctcctgtcgtcgccctcgcccaccaccttcggagctcggagactcggagtcttcccccacccccataacgtcctcttccgtgctctgcgttgccgcctgcgggcgccgcaagccgtgcgtgcccgcgggttccccgatttgtttatttacggaagtttacaattgatcaacaagacttagtccaaccctacttttcaaatcactatggttaccctttcctacagctgggcaagcgtagaatgtcagttcatggtgttgagtatgcatttggagcacatgactattcgattagtggagtttttgaggtggaacctcggcagtgtcctggtttcaaatttcggaaatcaatatgcatgggaactaccagcctggatcctctccaaatcagagagttcatggagattcagtcagtaaattacaatggtgatacctaccatttgataagtaaaaactgcaaccatttctgtgaggatatctgcaaaaggttgacaggaaattttattccaaaatgggtgaatcgacttgctagaatgggtgctgtttgcaactgcattctaccagagtccctcaagatcaacgcggccggtcatgacccagcttctcgagctgaagatagcgagagaaaaatgctgacaagttccttcagttgcttctgttcaatctctctatgccaaagacatttctcaacatcttcgccgtctctgcgttcctccgcgaacggcacttcttgggataccaagcagtccaattctacccgactgaagaagagctgacagttgaggtcctgtgtatcatatttaactcatgaggcacaaggatccttttttgtcagcaatctcttctacgaccttcatcagagaaggatgaagaggtattgattgataaggtgtttttgcatactcgagcgtcggatccagctgtgcttgaacatctgtacagagattgtgtagaaattatttcttacatttgaatttgaaatacagtgagctggaggaaactccaccctagacttttggaaaaaaacaaactccaaaaaaatcattgatgggtgctgcctctggagtccgaagtgatatttcgcctgtggtagtttgcaaatttggccatttttatacccttgcctatataaagttttatagttttgtttt

SEQ ID NO: 81993 - DNA, 1375 bp, Zea Mays
agaacatagtacttggtgtctgtgattatctgctgagtgttggcataccaccaactttagtttatttacggaagtttacaattgatcaacaagacttagtccaaccctacttttcaaatcactatggttaccctttcctacagctgggcaagcgtagaatgtcaggtgtgttagctcctcccccccccccccttgtttgaatattatctgacgcataatggattttcttatcctacttccacttttccttgcatttatagtcataatgttgggctcaaagaaggaaaggaatctcagcatgcactttcaatcagaccagaaatcttctgctaaattttgtttgttttcaaaagtccaatctgccagcccaccaccagggaatacactggtttatctaaatgtgtatgatttgacaccagtaaacggctatgtttactgggctggtctaggggtatttcattctggcattgaagttcatggtgttgagtatgcatttggagcacatgactattcgattagtggagtttttgaggtggaacctcggcagtgtcctggtttcaaatttcggaaatcaatatgcatgggaactaccagcctggatcctctccaaatcagagagttcatggagattcagtcagtaaattacaatggtgatacctaccatttgataagtaaaaactgcaaccatttctgtgaggatatctgcaaaaggttgacaggaaattttattccaaaatgggtgaatcgacttgctagaatgggtgctgtttgcaactgcattctaccagagtccctcaagatcaacgcggccggtcatgacccagcttctcgagctgaagatagcgagagaaaaatgctgacaagttccttcagttgcttctgttcaatctctctatgccaaagacatttctcaacatcttcgccgtctctgcgttcctccgcgaacggcacttcttgggataccaagcagtccaattctacccgactgaagaagagctgacagttgaggtcctgtgtatcatatttaactcatgaggcacaaggatccttttttgtcagcaatctcttctacgaccttcatcagagaaggatgaagaggtattgattgataaggtgtttttgcatactcgagcgtcggatccagctgtgcttgaacatctgtacagagattgtgtagaaattatttcttacatttgaatttgaaatacagtgagctggaggaaactccaccctagacttttggaaaaaaacaaactccaaaaaaatcattgatgggtgctgcctctggagtccgaagtgatatttcgcctgtggtagtttgcaaatttggccatttttatacccttgcctatataaagttttatagttttgtttt

SEQ ID NO: 81994 - DNA, 3273 bp, Zea Mays
gttggcggcactgtacactggggattccgcgaagaaatgctcctctcgggcagaagtgttcgttccagggcttcagtatttttttaggaaactggagaggccgaagcccctacagttgtttcagggtcagggcttcagtgttgccatccagtttctcaaggtggatgccactgggggtttcttgacgagtacagggatgcgactactgtttataatccctgaagaggaaatatttttcgatctgtaccattgctttccaaagccacaatgcctgcttctgcttgcacacatcttgattctggttgtactaggaaatatacaaggttcaagaatattcacgcagtttatgatgaagattatgacagggatcctaagaggatcaaaactgaaatcattgattcggaactaagtgttggttctgtcagtgacaaggatagtgaacaagattgtgatgatgtatttctcaaggatctcaggactcagtgtaaagcaaagaattggaagacttcaaaaatcacatcggaaggatgtggcattaagaatcaggctaaaacagaagatgacattgatcttgataagcctcttattgcattgaaacaaaagagtccaaaaacatctcttgctaaggataatgtaaagatgaatgcactaagatcttctccatgtgctacgaaagaggaagatacaacatcacatagagacaagattcttagttcttccctgatcaaagcaacaatgcaagacccagtattagagaagcttggaaggaaatttgcagaactggagcagtctaaagttgttattgattgtactgaaatcgttggtgatcaaatttgttgtgttgaagtgaacaatacagctggagctctagcgagctgtgcaaaacctgatgtactttgtgaaataaaagctgaagatacaaattattctgaatttggaacttctatctgttccataaagaatcctgagcattcatcctttaagctgcaacagaagctggtagcgggtgatgactgtgtgcctcaatattgtttcatgactcgaccagctcaattagccgatgtttctgatcatccctgcgaacaaacctgcagtatcaacaattttgatgacattacagctgcaaaagcaattgaggtttcttcgttaggtctcactgatgaaacgagcaatcatcagaaaacatctgaaaatctaactgactcagatgtgtgtaagtcctctaccgcaaatgggtttatagcttgttctttcaatcagtcctgccatgatcttgtggatagcgatgaacattggaatttatttgttcatcggaatgagcctgtgaagcttttggaagagttgtcttctgttgatgaatcatgcgcagatactcaatctgatttatgtggaagcacaaaaatgaattgcacttcccttgagggggttgtgcagatgcaggctgagggccaattggattcaatagtctgctgtggtgtaaggccaaagcatatgttactagatatggaaattagacatacagaaactggtgtattcacctttgataagactattgacttggctcatcctgccaattttgttgcacaagatggaaggctagaaagtatagtatacgatgttttgaataatcatgcacaaaggacagcctctaaaaacgaatcttctgttggactcccagaaactgctgtgagtcagagctcacttattgacttcactgacaattgtgttgaagacaaaagggcttcagttgataaaattttacctcccaataatctagactggccattgaaggataagttaaattctacaacagactatgacatttgtaggcctattaatgatgatgaaggatcagaagaagaattagtgcctcaacatcagttataccagtcgtgtagtgataaattcaaccttagcagtgccatgccagagatttctaatgctgaagattcacaaaaaatatctgccggagctcaaaattcttctgctacctttttggaaactgatgggcgaattaaaaagccaaatttttttgtggatgaagaaccaattgaagaaaacactccaaaagtattactgtccaagagaaagattatgtcaccgatgtctcaggagaagctttgcagtgctctgactggcattgatttgtgtgatggagttcaaagatttaagagcaaaatcattattgaagatcatgataaaactacaatatcattgcctcaaccagcacacatgcaagacagatcaatgttgtccacagacaggagacttaagagcaggacttttgtctcccctacaagcaaaggagttctgaagtcaacaggatccccaccccatcaacatacaacttgctcttgcacgagaagttcaccagtggtcttagacaccgagaaagctgttgaattttcacaaagacagatgcatgatatagaaaatatagctgctaagcttatcaggagcttgaagcacatgaaaagtatagtggatgaaagtttgtcaacagaagcatattcattacttcctaattttaacattgctgagatcagagcagcctctgaggatgcattagaagtggagaggactacgaggaaatggctgtcgataatgaacaaagactgcagtcgcttttgtaaaatattgagcctagcaaagaagaacgatgtttctcatcctgaagcaccaaggaaacaaagaaaaataacgtttgcagatgaagctggaggaatgctctgccatgttaaggttttcaaggatggacaagcctctcttctttctgaatgccagagtgatttatagacatactaaactggttatcatcatgagatttgatcagaaaagcaacattcttgagtgttggcaatatcaaaaaagctgctcacttgaaccaaaataatgagaatgcttccattcaccttagaaacagatggagaagctagtgcatcttgaatgcacagtatgtgttttactgtaaattgattgatgacaatcttgtggcaactcagttattatccttgttttttaaacatatttagtgtaaaaacaattagagtgcttacatgctaacaacaatttttgtacattggatgcaatttatttttagactattttctaaagaacccctatgtttttatagaataggatgtgttgtctttaggtgcgatctaataaacaagatttgatataccatgttagtaccctagtcatttttatactaggtatgttgcatgtatattaagttcaatagtatgtaaagcggcaattttacaatgtttg

SEQ ID NO: 81995 - DNA, 1243 bp, Zea Mays
tgcagagaagcttggaatattcgttctcgtatctgtcatcttagctggagcctggtttggttattggggtgtccgtaaatttgtcctggcagaagatggatctgttgacgagggtgtggcttattttgttgagtgggctatcttgattgtttcagccgttatgatcctccagagttctctggactatctctttgcatttacaactctagtattatgtggaatcatcaaagtgattgcaagaattgagggaaagtcaaaagttttacgctatatattcgggggactttctgatggtacctctcgtaattcatcccgttatggagattttgatgaagactattctagcatgaatgaagatcgccaagatggatttggcaatcttcatggtggataccagagacatgcaccgagaagaaactcacctcttgcaggctcagcaaagacattatcgcaaggtgttgctatggatagcttctattctacatttcacactaccccagagaggatggaattcacaaaagaggaatatgaagcattcaccagaaaggagacgaagaaagctatgaagcaactgttgtcatcaccggatttcaacaggtgggcattggctaatgcagacaggatatctgtggctccaccaggaggaagctacagcagtaacaacagccagcagcggcatcgtttcttgggactgttttgagctgtgcctgcgtgtgtgtggtgtgctttcttagcagcaataggagtgctcattgctcagtgatgattccatgtgagttgattagcaaggtttaggataacatctgagtgttccactttgaggtggcagcaaatatgtagaatattgtagtttaggcgcatcttaggtccaaagtccaaatggcatctgtatcttgtaacattaagtggtactgtacagtgcccgaggtgagtgtatctcaacttgttgagctgaatttcacgttcgatcatcattatgacagtttgaatttattcaaatcatcattatgataggatgaaaagtattcaagtgttctatgcctgcatagaaagtaagttgtgttgaattgtcgtgtgcggtaagcagtggtttgggtttgtagttgattttgtaagggactctattctcatcaccgcctgtaaactaatgatctgctctggtttgttcaatatgcatgagtgatgccttgcctgccaagtataaaaatactgataggatttcttctcgtctacttttttgttc

SEQ ID NO: 81996 - DNA, 1298 bp, Zea Mays
atgaacagggaagtgcacccagaaaagttacccagcctgagaaatggaaaggacagacagagaagcttggaatattcgttctcgtatctgtcatcttagctggagcctggtttggttattggggtgtccgtaaatttgtcctggcagaagatggatctgttgacgagggtgtggcttattttgttgagtgggctatcttgattgtttcagccgttatgatcctccagagttctctggactatctctttgcatttacaactctagtattatgtggaatcatcaaagtgattgcaagaattgagggaaagtcaaaagttttacgctatatattcgggggactttctgatggtacctctcgtaattcatcccgttatggagattttgatgaagactattctagcatgaatgaagatcgccaagatggatttggcaatcttcatggtggataccagagacatgcaccgagaagaaactcacctcttgcaggctcagcaaagacattatcgcaaggtgttgctatggatagcttctattctacatttcacactaccccagagaggatggaattcacaaaagaggaatatgaagcattcaccagaaaggagacgaagaaagctatgaagcaactgttgtcatcaccggatttcaacaggtgggcattggctaatgcagacaggatatctgtggctccaccaggaggaagctacagcagtaacaacagccagcagcggcatcgtttcttgggactgttttgagctgtgcctgcgtgtgtgtggtgtgctttcttagcagcaataggagtgctcattgctcagtgatgattccatgtgagttgattagcaaggtttaggataacatctgagtgttccactttgaggtggcagcaaatatgtagaatattgtagtttaggcgcatcttaggtccaaagtccaaatggcatctgtatcttgtaacattaagtggtactgtacagtgcccgaggtgagtgtatctcaacttgttgagctgaatttcacgttcgatcatcattatgacagtttgaatttattcaaatcatcattatgataggatgaaaagtattcaagtgttctatgcctgcatagaaagtaagttgtgttgaattgtcgtgtgcggtaagcagtggtttgggtttgtagttgattttgtaagggactctattctcatcaccgcctgtaaactaatgatctgctctggtttgttcaatatgcatgagtgatgccttgcctgccaagtataaaaatactgataggatttcttctcgtctacttttttgttc

SEQ ID NO: 81997 - DNA, 1264 bp, Zea Mays
agactactgattgggaaagcgctactcccttcttggaatattcgttctcgtatctgtcatcttagctggagcctggtttggttattggggtgtccgtaaatttgtcctggcagaagatggatctgttgacgagggtgtggcttattttgttgagtgggctatcttgattgtttcagccgttatgatcctccagagttctctggactatctctttgcatttacaactctagtattatgtggaatcatcaaagtgattgcaagaattgagggaaagtcaaaagttttacgctatatattcgggggactttctgatggtacctctcgtaattcatcccgttatggagattttgatgaagactattctagcatgaatgaagatcgccaagatggatttggcaatcttcatggtggataccagagacatgcaccgagaagaaactcacctcttgcaggctcagcaaagacattatcgcaaggtgttgctatggatagcttctattctacatttcacactaccccagagaggatggaattcacaaaagaggaatatgaagcattcaccagaaaggagacgaagaaagctatgaagcaactgttgtcatcaccggatttcaacaggtgggcattggctaatgcagacaggatatctgtggctccaccaggaggaagctacagcagtaacaacagccagcagcggcatcgtttcttgggactgttttgagctgtgcctgcgtgtgtgtggtgtgctttcttagcagcaataggagtgctcattgctcagtgatgattccatgtgagttgattagcaaggtttaggataacatctgagtgttccactttgaggtggcagcaaatatgtagaatattgtagtttaggcgcatcttaggtccaaagtccaaatggcatctgtatcttgtaacattaagtggtactgtacagtgcccgaggtgagtgtatctcaacttgttgagctgaatttcacgttcgatcatcattatgacagtttgaatttattcaaatcatcattatgataggatgaaaagtattcaagtgttctatgcctgcatagaaagtaagttgtgttgaattgtcgtgtgcggtaagcagtggtttgggtttgtagttgattttgtaagggactctattctcatcaccgcctgtaaactaatgatctgctctggtttgttcaatatgcatgagtgatgccttgcctgccaagtataaaaatactgataggatttcttctcgtctacttttttgttc

SEQ ID NO: 81998 - DNA, 416 bp, Zea Mays
ctgtaactgcttccccgcgcacacacaaaaaaccgcccagccgcgcttctgccgctgccccgctcggccagctcacgcccacgtcgcctcctctctcaccaatatccgccgcgcttgccgcatgtcgagtctccccgagcagatcgccgttgtccctgcaccaagcacaccggagaactgacgtcggccacgaacctccgtcccaagaattgcggctcttgggaactgccgtgttcactccccgccgcgccggagctccgttaagccgttgccgcgacattctccgtcgagatccgtttcgagaattgcgatctgtttccgagcttcaagggatcaaagatcgagcgttggcgaccaagagatcaagctttttgaggtctacaacattgaacaccctgagcatctgtttggtgaag

SEQ ID NO: 81999 - DNA, 2787 bp, Zea Mays
cggagctgaactgcagactgctactagactgctggcgcggagtggaggacgagtggtgttgcccacgcagcgcagacgcagtctccttttcatcatcaagtccggagggagagccggagaaccggttcagccagcagagtcgccaaaacaaaagcaaaatgaggagctccgtctctgagcgcagcctcatcatcgagagcgacgacgacgacgacgaccatccccaatcccggtcatccgccgccgcccgcagcagaagacgccaccaccaacacgaggaggactccgccgcaggatccgactccgattccggttcctcctcgtcctcctgcggcaccccgcgcggtccggccaccgactcctcctacacccagcaatggccacagagctacaggcagtccatcgacattcttagtagcgtgcagtcaccaaatctgagcttcttgggaaccccaactctaagcagattgtccaactcttttcggggtaaaacccctgaaatcatctccaatcttgttaagccacttcttcgccccactacaagtgatgaccaccaccaccaccaccagcagcagcctgaagaaagaaagagttctcagtaccttctgccttcgagaaaaccatctttgcaacagattcctgaggatcaaaagccagtgccagttgctcatgaggtgtctccgtatcataaatgcacttacacccaagcagttgtgaatggaataaatgttctatgtggtgtgggaatcctatcaacaccttatgccatcaaacaaggcgggtggcttggactggtgatactctgtttatttgcaattctagcttggtatactggtgtgctcctgcgccgctgcctggacagcaaggagggccttgagacatacccagatattggtcatgccgcctttggagccaccggccgtatagccatctcaataatcctgtatgtggaactgtatgcctgttgcatcgagtatctgatattggaaggtgacaatttatcaaaattattccctaatgcgcacctgagcgttgggagcttgacaatgaactcccatgtacttttcacaatcttgactaccatcatagtcatgccgaccacttggcttcgtgaccttagctgcctgagctacctttcagctggaggtgtttttgcatcaatccttggagtcatctgcctattctgggtaggagttgttgataatgttggctttgagaacaaaggaactgctctgaacctccctggaatccctattgcaattggattgtatggttattgctactcagggcatggggtgtttccaaacatctactcttctctgaagaagcgcaatcagttcccttcaatcctttttacttgcattgggctgtctaccattttatttgctggtgcagcggtgatgggatacaaaatgtttggtgaagccacacagtctcagtttacactgaacttaccagagaatttagtggtttcaaagattgcagtttggaccacggtggcaaatccaataaccaaatatcctttcttatatttggctgggtaattctttgtttttcatgatacttgtcaaactttctatgtccttaacgaataatcacatatgcattaaccataaccccactgactatgagtttggaagagttgcttccaccaaatcaacagaagtactcaaacatagtcatgcttagatcagccctggtggtgtcaaccctcctcattgctctatctgtacccttttttggtaagttcatgagcgtatttggtacactaataaggtgtttggtttgagaaataagttagtccattatcttctcactcacttttttgtttggttttgtagaatggaataagttaatccattaccacatcattccttatgggggtgtttagtttgaggaatcactccattcaaaatgaggtgatgcatcataaattcattcctcatattagtactaactaactataaggaatgaggtggtgatgaatcaactcattacattccataaaccaaacaaaaaagtgaggagtgagaagatgatggactagcttattcatcaaaccaaacaacctatatagctagttagtactaacatgaggaatgagaatttgagaaatggactcatgatacaccacttcattttggatgaagtgatttctgaaaccaaacatcttctaagtcaccaatcaatcatgacaccaacctgttttttttgagttttgacaggacttgtgatggccttagttggttctttacttacgatgcttgtgacctatattctaccttgcgcgtgctttttagcaattcttaggagaaaagtgagctggcaccaggtagcagtatgctcgttcatcatcgtggttggggtttgctgcgcttgtgtgggaacatactcgtctctgtcaaagataatccagaactacacatgatacagttgttcctgcaatccaaatttatgtccaaactcaatgagccaaactgcccagcaaattagtcaagtcgatgtatcataaatttgtgagatgtccatgtttgcatgttaatggatcaacacaaataatacgtttgtggcaaggatttgagacaatatttctgaacaaaagatgaggttgattttgtgttgtggatgtctcgtgtcaagattctttgcgagcaaatggagaagaaaattaaattaagagaaggaacctgcattgttgttgttgggcagaagaattgcagcgaagaatgtgagggggtttgcttcctgcttttagggatcagtttttgaatccatgtttattcgttt

SEQ ID NO: 82000 - DNA, 2250 bp, Zea Mays
gctactagactgctggcgcggagtggaggacgagtggtgttgcccacgcagcgcagacgcagtctccttttcatcatcaagtccggagggagagccggagaaccggttcagccagcagagtcgccaaaacaaaagcaaaatgaggagctccgtctctgagcgcagcctcatcatcgagagcgacgacgacgacgacgaccatccccaatcccggtcatccgccgccgcccgcagcagaagacgccaccaccaacacgaggaggactccgccgcaggatccgactccgattccggttcctcctcgtcctcctgcggcaccccgcgcggtccggccaccgactcctcctacacccagcaatggccacagagctacaggcagtccatcgacattcttagtagcgtgcagtcaccaaatctgagcttcttgggaaccccaactctaagcagattgtccaactcttttcggggtaaaacccctgaaatcatctccaatcttgttaagccacttcttcgccccactacaagtgatgaccaccaccaccaccaccagcagcagcctgaagaaagaaagagttctcagtaccttctgccttcgagaaaaccatctttgcaacagattcctgaggatcaaaagccagtgccagttgctcatgaggtgtctccgtatcataaatgcacttacacccaagcagttgtgaatggaataaatgttctatgtggtgtgggaatcctatcaacaccttatgccatcaaacaaggcgggtggcttggactggtgatactctgtttatttgcaattctagcttggtatactggtgtgctcctgcgccgctgcctggacagcaaggagggccttgagacatacccagatattggtcatgccgcctttggagccaccggccgtatagccatctcaataatcctgtatgtggaactgtatgcctgttgcatcgagtatctgatattggaaggtgacaatttatcaaaattattccctaatgcgcacctgagcgttgggagcttgacaatgaactcccatgtacttttcacaatcttgactaccatcatagtcatgccgaccacttggcttcgtgaccttagctgcctgagctacctttcagctggaggtgtttttgcatcaatccttggagtcatctgcctattctgggtaggagttgttgataatgttggctttgagaacaaaggaactgctctgaacctccctggaatccctattgcaattggattgtatggttattgctactcagggcatggggtgtttccaaacatctactcttctctgaagaagcgcaatcagttcccttcaatcctttttacttgcggtgatgggatacaaaatgtttggtgaagccacacagtctcagtttacactgaacttaccagagaatttagtggtttcaaagattgcagtttggaccacggtggcaaatccaataaccaaatatcctttcttatatttggctgggtaattctttgtttttcatgatacttgtcaaactttctatgtccttaacgaataatcacatatgcattaaccataaccccactgactatgagtttggaagagttgcttccaccaaatcaacagaagtactcaaacatagtcatgcttagatcagccctggtggtgtcaaccctcctcattgctctatctgtacccttttttggacttgtgatggccttagttggttctttacttacgatgcttgtgacctatattctaccttgcgcgtgctttttagcaattcttaggagaaaagtgagctggcaccaggtagcagtatgctcgttcatcatcgtggttggggtttgctgcgcttgtgtgggaacatactcgtctctgtcaaagataatccagaactacacatgatacagttgttcctgcaatccaaatttatgtccaaactcaatgagccaaactgcccagcaaattagtcaagtcgatgtatcataaatttgtgagatgtccatgtttgcatgttaatggatcaacacaaataatacgtttgtggcaaggatttgagacaatatttctgaacaaaagatgaggttgattttgtgttgtggatgtctcgtgtcaagattctttgcgagcaaatggagaagaaaattaaattaagagaaggaacctgcattgttgttgttgggcagaagaattgcagcgaagaatgtgagggggtttgcttcctgcttttagggatcagtttttgaatccatgtttattcgttt

SEQ ID NO: 82001 - DNA, 2491 bp, Zea Mays
gctactagactgctggcgcggagtggaggacgagtggtgttgcccacgcagcgcagacgcagtctccttttcatcatcaagtccggagggagagccggagaaccggttcagccagcagagtcgccaaaacaaaagcaaaatgaggagctccgtctctgagcgcagcctcatcatcgagagcgacgacgacgacgacgaccatccccaatcccggtcatccgccgccgcccgcagcagaagacgccaccaccaacacgaggaggactccgccgcaggatccgactccgattccggttcctcctcgtcctcctgcggcaccccgcgcggtccggccaccgactcctcctacacccagcaatggccacagagctacaggaataaatgttctatgtggtgtgggaatcctatcaacaccttatgccatcaaacaaggcgggtggcttggactggtgatactctgtttatttgcaattctagcttggtatactggtgtgctcctgcgccgctgcctggacagcaaggagggccttgagacatacccagatattggtcatgccgcctttggagccaccggccgtatagccatctcaataatcctgtatgtggaactgtatgcctgttgcatcgagtatctgatattggaaggtgacaatttatcaaaattattccctaatgcgcacctgagcgttgggagcttgacaatgaactcccatgtacttttcacaatcttgactaccatcatagtcatgccgaccacttggcttcgtgaccttagctgcctgagctacctttcaggtctccatttatctgttgctttgcattttggttgacaatgcattgtcagtcagtgtgtattctttgcatttagttcagatgtctaccctcttggtgtaccactcatggtttctcactatgttgtgtttgtagctggaggtgtttttgcatcaatccttggagtcatctgcctattctgggtaggagttgttgataatgttggctttgagaacaaaggaactgctctgaacctccctggaatccctattgcaattggattgtatggttattgctactcagggcatggggtgtttccaaacatctactcttctctgaagaagcgcaatcagttcccttcaatcctttttacttgcattgggctgtctaccattttatttgctggtgcagcggtgatgggatacaaaatgtttggtgaagccacacagtctcagtttacactgaacttaccagagaatttagtggtttcaaagattgcagtttggaccacggtggcaaatccaataaccaaatatgcattaaccataaccccactgactatgagtttggaagagttgcttccaccaaatcaacagaagtactcaaacatagtcatgcttagatcagccctggtggtgtcaaccctcctcattgctctatctgtacccttttttggtaagttcatgagcgtatttggtacactaataaggtgtttggtttgagaaataagttagtccattatcttctcactcacttttttgtttggttttgtagaatggaataagttaatccattaccacatcattccttatgggggtgtttagtttgaggaatcactccattcaaaatgaggtgatgcatcataaattcattcctcatattagtactaactaactataaggaatgaggtggtgatgaatcaactcattacattccataaaccaaacaaaaaagtgaggagtgagaagatgatggactagcttattcatcaaaccaaacaacctatatagctagttagtactaacatgaggaatgagaatttgagaaatggactcatgatacaccacttcattttggatgaagtgatttctgaaaccaaacatcttctaagtcaccaatcaatcatgacaccaacctgttttttttgagttttgacaggacttgtgatggccttagttggttctttacttacgatgcttgtgacctatattctaccttgcgcgtgctttttagcaattcttaggagaaaagtgagctggcaccaggtagcagtatgctcgttcatcatcgtggttggggtttgctgcgcttgtgtgggaacatactcgtctctgtcaaagataatccagaactacacatgatacagttgttcctgcaatccaaatttatgtccaaactcaatgagccaaactgcccagcaaattagtcaagtcgatgtatcataaatttgtgagatgtccatgtttgcatgttaatggatcaacacaaataatacgtttgtggcaaggatttgagacaatatttctgaacaaaagatgaggttgattttgtgttgtggatgtctcgtgtcaagattctttgcgagcaaatggagaagaaaattaaattaagagaaggaacctgcattgttgttgttgggcagaagaattgcagcgaagaatgtgagggggtttgcttcctgcttttagggatcagtttttgaatccatgtttattcgttt

SEQ ID NO: 82002 - DNA, 1757 bp, Zea Mays
gctactagactgctggcgcggagtggaggacgagtggtgttgcccacgcagcgcagacgcagtctccttttcatcatcaagtccggagggagagccggagaaccggttcagccagcagagtcgccaaaacaaaagcaaaatgaggagctccgtctctgagcgcagcctcatcatcgagagcgacgacgacgacgacgaccatccccaatcccggtcatccgccgccgcccgcagcagaagacgccaccaccaacacgaggaggactccgccgcaggatccgactccgattccggttcctcctcgtcctcctgcggcaccccgcgcggtccggccaccgactcctcctacacccagcaatggccacagagctacaggaataaatgttctatgtggtgtgggaatcctatcaacaccttatgccatcaaacaaggcgggtggcttggactggtgatactctgtttatttgcaattctagcttggtatactggtgtgctcctgcgccgctgcctggacagcaaggagggccttgagacatacccagatattggtcatgccgcctttggagccaccggccgtatagccatctcaataatcctgtatgtggaactgtatgcctgttgcatcgagtatctgatattggaaggtgacaatttatcaaaattattccctaatgcgcacctgagcgttgggagcttgacaatgaactcccatgtacttttcacaatcttgactaccatcatagtcatgccgaccacttggcttcgtgaccttagctgcctgagctacctttcagctggaggtgtttttgcatcaatccttggagtcatctgcctattctgggtaggagttgttgataatgttggctttgagaacaaaggaactgctctgaacctccctggaatccctattgcaattggattgtatggttattgctactcagggcatggggtgtttccaaacatctactcttctctgaagaagcgcaatcagttcccttcaatcctttttacttgcattgggctgtctaccattttatttgctggtgcagcggtgatgggatacaaaatgtttggtgaagccacacagtctcagtttacactgaacttaccagagaatttagtggtttcaaagattgcagtttggaccacggtggcaaatccaataaccaaatatcctttcttatatttggctgggacttgtgatggccttagttggttctttacttacgatgcttgtgacctatattctaccttgcgcgtgctttttagcaattcttaggagaaaagtgagctggcaccaggtagcagtatgctcgttcatcatcgtggttggggtttgctgcgcttgtgtgggaacatactcgtctctgtcaaagataatccagaactacacatgatacagttgttcctgcaatccaaatttatgtccaaactcaatgagccaaactgcccagcaaattagtcaagtcgatgtatcataaatttgtgagatgtccatgtttgcatgttaatggatcaacacaaataatacgtttgtggcaaggatttgagacaatatttctgaacaaaagatgaggttgattttgtgttgtggatgtctcgtgtcaagattctttgcgagcaaatggagaagaaaattaaattaagagaaggaacctgcattgttgttgttgggcagaagaattgcagcgaagaatgtgagggggtttgcttcctgcttttagggatcagtttttgaatccatgtttattcgttt

SEQ ID NO: 82003 - DNA, 1574 bp, Zea Mays
caaaagccagtgccaattgctcatgaggtgtctctgtatcataaatgctcttacacacaggcagttgtgaatggaataaatgttctatgtggtgtgggaatcctatcaacaccttatgccatcaaacaaggcgggtggcttggactggtgatactctgtttatttgcaattctagcttggtatactggtgtgctcctgcgccgctgcctggacagcaaggagggccttgagacatacccagatattggtcatgccgcctttggagccaccggccgtatagccatctcaataatcctgtatgtggaactgtatgcctgttgcatcgagtatctgatattggaaggtgacaatttatcaaaattattccctaatgcgcacctgagcgttgggagcttgacaatgaactcccatgtacttttcacaatcttgactaccatcatagtcatgccgaccacttggcttcgtgaccttagctgcctgagctacctttcagctggaggtgtttttgcatcaatccttggagtcatctgcctattctgggtaggagttgttgataatgttggctttgagaacaaaggaactgctctgaacctccctggaatccctattgcaattggattgtatggttattgctactcagggcatggggtgtttccaaacatctactcttctctgaagaagcgcaatcagttcccttcaatcctttttacttgcattgggctgtctaccattttatttgctggtgcagcggtgatgggatacaaaatgtttggtgaagccacacagtctcagtttacactgaacttaccagagaatttagtggtttcaaagattgcagtttggaccacggtggcaaatccaataaccaaatatgcattaaccataaccccactgactatgagtttggaagagttgcttccaccaaatcaacagaagtactcaaacatagtcatgcttagatcagccctggtggtgtcaaccctcctcattgctctatctgtacccttttttggacttgtgatggccttagttggttctttacttacgatgcttgtgacctatattctaccttgcgcgtgctttttagcaattcttaggagaaaagtgagctggcaccaggtagcagtatgctcgttcatcatcgtggttggggtttgctgcgcttgtgtgggaacatactcgtctctgtcaaagataatccagaactacacatgatacagttgttcctgcaatccaaatttatgtccaaactcaatgagccaaactgcccagcaaattagtcaagtcgatgtatcataaatttgtgagatgtccatgtttgcatgttaatggatcaacacaaataatacgtttgtggcaaggatttgagacaatatttctgaacaaaagatgaggttgattttgtgttgtggatgtctcgtgtcaagattctttgcgagcaaatggagaagaaaattaaattaagagaaggaacctgcattgttgttgttgggcagaagaattgcagcgaagaatgtgagggggtttgcttcctgcttttagggatcagtttttgaatccatgtttattcgttt

SEQ ID NO: 82004 - DNA, 1400 bp, Zea Mays
cataaatgctcttacacacaggcagttgtgaatggaataaatgttctatgtggtgtgggaatcctatcaacaccttatgccatcaaacaaggcgggtggcttggactggtgatactctgtttatttgcaattctagcttggtatactggtgtgctcctgcgccgctgcctggacagcaaggagggccttgagacatacccagatattggtcatgccgcctttggagccaccggccgtatagccatctcaataatcctgtatgtggaactgtatgcctgttgcatcgagtatctgatattggaaggtgacaatttatcaaaattattccctaatgcgcacctgagcgttgggagcttgacaatgaactcccatgtacttttcacaatcttgactaccatcatagtcatgccgaccacttggcttcgtgaccttagctgcctgagctacctttcagctggaggtgtttttgcatcaatccttggagtcatctgcctattctggggcatggggtgtttccaaacatctactcttctctgaagaagcgcaatcagttcccttcaatcctttttacttgcggtgatgggatacaaaatgtttggtgaagccacacagtctcagtttacactgaacttaccagagaatttagtggtttcaaagattgcagtttggaccacggtggcaaatccaataaccaaatatgcattaaccataaccccactgactatgagtttggaagagttgcttccaccaaatcaacagaagtactcaaacatagtcatgcttagatcagccctggtggtgtcaaccctcctcattgctctatctgtacccttttttggacttgtgatggccttagttggttctttacttacgatgcttgtgacctatattctaccttgcgcgtgctttttagcaattcttaggagaaaagtgagctggcaccaggtagcagtatgctcgttcatcatcgtggttggggtttgctgcgcttgtgtgggaacatactcgtctctgtcaaagataatccagaactacacatgatacagttgttcctgcaatccaaatttatgtccaaactcaatgagccaaactgcccagcaaattagtcaagtcgatgtatcataaatttgtgagatgtccatgtttgcatgttaatggatcaacacaaataatacgtttgtggcaaggatttgagacaatatttctgaacaaaagatgaggttgattttgtgttgtggatgtctcgtgtcaagattctttgcgagcaaatggagaagaaaattaaattaagagaaggaacctgcattgttgttgttgggcagaagaattgcagcgaagaatgtgagggggtttgcttcctgcttttagggatcagtttttgaatccatgtttattcgttt

SEQ ID NO: 82005 - DNA, 1384 bp, Zea Mays
aaacaccatagctatcaacactaaggcctgttgcatcgagtatctgatattggaaggtgacaatttatcaaaattattccctaatgcgcacctgagcgttgggagcttgacaatgaactcccatgtacttttcacaatcttgactaccatcatagtcatgccgaccacttggcttcgtgaccttagctgcctgagctacctttcaggtctccatttatctgttgctttgcattttggttgacaatgcattgtcagtcagtgtgtattctttgcatttagttcagatgtctaccctcttggtgtaccactcatggtttctcactatgttgtgtttgtagctggaggtgtttttgcatcaatccttggagtcatctgcctattctgggtaggagttgttgataatgttggctttgagaacaaaggaactgctctgaacctccctggaatccctattgcaattggattgtatggttattgctactcagggcatggggtgtttccaaacatctactcttctctgaagaagcgcaatcagttcccttcaatcctttttacttgcggtgatgggatacaaaatgtttggtgaagccacacagtctcagtttacactgaacttaccagagaatttagtggtttcaaagattgcagtttggaccacggtggcaaatccaataaccaaatatgcattaaccataaccccactgactatgagtttggaagagttgcttccaccaaatcaacagaagtactcaaacatagtcatgcttagatcagccctggtggtgtcaaccctcctcattgctctatctgtacccttttttggacttgtgatggccttagttggttctttacttacgatgcttgtgacctatattctaccttgcgcgtgctttttagcaattcttaggagaaaagtgagctggcaccaggtagcagtatgctcgttcatcatcgtggttggggtttgctgcgcttgtgtgggaacatactcgtctctgtcaaagataatccagaactacacatgatacagttgttcctgcaatccaaatttatgtccaaactcaatgagccaaactgcccagcaaattagtcaagtcgatgtatcataaatttgtgagatgtccatgtttgcatgttaatggatcaacacaaataatacgtttgtggcaaggatttgagacaatatttctgaacaaaagatgaggttgattttgtgttgtggatgtctcgtgtcaagattctttgcgagcaaatggagaagaaaattaaattaagagaaggaacctgcattgttgttgttgggcagaagaattgcagcgaagaatgtgagggggtttgcttcctgcttttagggatcagtttttgaatccatgtttattcgttt

SEQ ID NO: 82006 - DNA, 634 bp, Zea Mays
ataagttaatccattaccacatcattccttatgggggtgtttagtttgaggaatcactccattcaaaatgaggacttgtgatggccttagttggttctttacttacgatgcttgtgacctatattctaccttgcgcgtgctttttagcaattcttaggagaaaagtgagctggcaccaggtagcagtatgctcgttcatcatcgtggttggggtttgctgcgcttgtgtgggaacatactcgtctctgtcaaagataatccagaactacacatgatacagttgttcctgcaatccaaatttatgtccaaactcaatgagccaaactgcccagcaaattagtcaagtcgatgtatcataaatttgtgagatgtccatgtttgcatgttaatggatcaacacaaataatacgtttgtggcaaggatttgagacaatatttctgaacaaaagatgaggttgattttgtgttgtggatgtctcgtgtcaagattctttgcgagcaaatggagaagaaaattaaattaagagaaggaacctgcattgttgttgttgggcagaagaattgcagcgaagaatgtgagggggtttgcttcctgcttttagggatcagtttttgaatccatgtttattcgttt

SEQ ID NO: 82007 - DNA, 2901 bp, Zea Mays
cgcagccgcccgacgaccgtggcccccaccgtcaccatctcctgccacagtgccaccgccatcactgccccgctcgggattccttcctatcgctgccgctgcaagccgttggtaacgaagctgcgataatggtgatggggctggggtcgaagcgtagggtggcggagggcggcacggagcccgaggaggagtcctcggaggagtacgaggtggaggaagtgtgcgaccacatcgcctcctcccgtggcagccgcctcgcgctcttcggctccgacctccgcctcggccgcttccgcccgcgccggcgcaggcgccgcccgctcgccggggaaggcgccgcggagggcttcctccacgacctcgtcatccaccccgacaacaggcttgtggaagtaaagaagaagtaagatacctgctgtggattcgcttgacacgggttaccaaggtcacagaattcttctggcgtttagagaaggacatacgtatcaactacctcttcactaggatagtgaagctcatagttgtggagctctactgtacgcacacagcagcctgtatcttctattacctggctacaacgcttcctgaatcaatggaaggatacacgtggattgggagtctgcagttgggggactacaagtttacacatttcagggagatcgatcttgccaagcgctatataacatcgttatacttcgccattgtcaccatggcaacagttggttacggtgacattcatgctgtcaacatcagggagatgatattcatcatgatctacgtttcctttgacatgattctaggagcttacctgattggtaacatgactgcgctcatcgtgaaaggctcgagaaccgagcggtttagggacaagatgaaagaagtgatcaggtatatgaacagaaataaacttggaaaggaaataagggaacagatcaaaggacacttgaggttgcagtatgagagcagctacactgaagcgtccgtccttcaggatatcccgatttctatccgtgcaaagatttctcaaacactgtataagccatatgttgaaagtattccgttgttcaagggatgttccgcagagttcatacaacagattgtgatcaggttgcaagaggagttcttcttaccaggagaggttatattggagcaaggaagtgcagtcgatcaattgtactttgtctgccacggtgcactggaaggtgttggcatcggtgaagacgggcaagaagagactctgctgatgctggagccagagagctcctttggcgagatctcaatcctctgcaacatcccgcagccctacacggtccgcgtctgtgagctctgccggctcctgcgtctcgacaagcagtccttcaccaacatcctggagatctacttcgtcgacggcaggaggatcctgagcaatctctccgagagcgagtatggcggacgggtgaagcagctggaatcggacatcacgttccacatcgggaagcaggaggcggagctcaccctgcgggtcaacagcgccgctttctacggcgacctgcaccagctgaaaagcctgatccgggcaggggctgatcccaagaacaccgactatgacggccgctcccctctgcatctggcggcttccagagggtacgaggacgtcgtgcaattcctcgtcaacgaaggcgtcgacatggaccttaccgaccaatttgggaacacgccgttgctggaggcagtgaagcaggggcaagaacgggtggcagcgctgctcttcgccaagggcgccaagctgagcctcaagaacgccggcagccacctgtgcacggcagtcgccaagggagactcggacttcattcggcgcaccctggcctacggcgccgacccaaactgcagggactacgaccaccgcacaccgctccacatcgccgccgccgagggcctgtacctcatcgccaagatgcttgtcgaggccggcgccagcgtgttcaccaccgacagatggggcaccactccgctggatgaagcgcgaaagtgcggcggccgcgtacttggggcgctgctggaggaggcgcgggccaacgagctggctatgttcccagaacgcggcgaggaagtcagggacaagatgcacccgcgacggtgctcggtgttcccgtaccacccgtggcgggcggccacgggcgaggagcggcgtattgagggagtggtcctgtggatcccgcacaccattgagagcctggttgcgttggcgcaggagaagctcggcttgccgggcccggcttcgcggctgcggttgctgcgcgaggacggggccagggtgctcgacgtcgatatggtcaatgacggccagaagctctacctggtcggaggcgaggacggcgatcagaaatatggtcagtagattggccatggaccaaccatggtgtacgtcacccattcttctcgcggagcattccctgcgtggcatttttcatgcatgccggtccttattttggctatatatatttgtgtgcagtagaagaaaacggaatcaagtccatcgtccctgctggacactgtacagaactacaaattcgcaattatgttagatgtgaaatggaaatgcaatgtgaagcaaactaaacaggataatccattcccgcgccgtcctgtgccgccgcagatggtccttgcagaccttggtgcgccgtcagctcgtggcgtcctgctgataggcactccgacccggcggccatccctgttgtgtttgttatatgggagaagccagtaataaaaccagtgttttaaaaagtgggataagagatttatcctcaggcttctcaaaagtgtaaatatcgggatatctgaatatagtgagatatatcgaactaaatagtataaattttcgctgctaaaaaagatatatcgaccgttataatcgac

SEQ ID NO: 82008 - DNA, 2438 bp, Zea Mays
cagctccacaagacaaccgcaaccgcagcagctagaccgacacgcactctactctcgcacacagccgccgggcgggcacagtgacgcggccacgcgggcgccggagctagggtttccctgatccggcagggccggggagccgccggaaaccgttgctcgatttcggcgccggaggcgcggcatcggtgtctccgaggacggcggacgcgaggcgggttggggagctgaggcgcggcgccgggggctcagatctggtatgaccgacggcggcgaagacgggaatgcggcggcgcccagggccccctcgcgccgaaggggacctgtgcgggccagcctcgatgccgacgagttcatggcgctgatgcacggctcggatcccgtcagggtcgagctcacccgcctggagaacgagctcagggacaaggagagggagcttggggaggcacagacggagatacgcgcactgcgcttgtcggagagggcgcgggagaaagccgtcgaggagatgaattggagaagatggctgagaaactcaagctgacagaatctctccttgaaagcaaaaaccttgaagttaaaaagataaatgatgagagaaaggctgcattggctgcccagtttgcagcagaagcaactttgcggagagtacatgcagcccagaaagatgatgacatgccaccaattgaagccattcttgcaccacttgaagctgagctaaagctttctcgccaggagattgcaaatctccaggatgacaacagagctttggatcgtctaacaaaacaaaaggaggcagctctgctagaagcagagaggactgtgcaaattgctatggcaaaagctgctatggttgacgatttgcaaaacaagaaccaagagttgatcaagcaaattgagatctgccatgaagaaaataaaatcttagataagctgcatcgccaaaagattgcagaagttgaaaagcttagccaaactgtgagggagttggaagaagctgttcttcaaggtggtgcaacggctaatgttgttcgagattaccagcgcagatttcaagaaataaatgaagaaaagagaacacttgaccgtgaacttgcacgtgcaaaagttacagcaaacagggttgcttctgttgtggccaatgagtggaaagattctaatgacaaggtgatgccagttaaacagtggcttgaagagcgtaggttcttgcagggggagatgcaacaacttcgtgacaagctagctgttgcagaacgtacagcacgatccgaagctcaactgaaggaaaaataccagttacgtttgaaagtactagaagatggactaagggggccaccaagtggctctagtcgtccaactactgaaggaaagagctttagcaatggcccttcccgccggttatcacttgcagcttggtcctgaagcatgctaaaggcacttcgaagtcatttgatggcggaactaggtcactagataggggaaaaatccatggaagtggagctcatttactcaacagatctacagatgctgttagagataaggagactagtgatagttggaagggcgatatggatgagagaactaatgagagggcagacaacaacacagatgagaaaagtaacgaaaccacaaataaaaactcagctgagacagtttctggtttcctatatgatatgctgcaaaaagaggtaatttctttgagaaagtcatgccatgaaaaggatcagattctaaaagataaagatgatgctattgagatgttagcaaagaaagtagacaccttaaccaaagcaatggaagtggaggctagaaaggtcagacgagaggttgcagccatggagaaagaagttgcagcaatgcgtgccagtaaagaacaagaaaccagagccaagctgcttggtacgaaaggctctggtagttcacaactgcttcctggaaggaacgcagcacgaactgggtcgatgcgcaacttccagtgatggcagcactaacacgaagcagcattcttggatagatccttctccgttccaccatttgttctattcctatcctattaattttgtgtctaaaattatagtagagtgagatgacccaacggtacctagatcagggtaaagagtaggctcggatctgatgagaccattgtgggagtgaaaccgagcctgtgtctaaccttgtggcgcgccctcttgtttctttgtccaggaagcgcacccgatgcttgtataggctggggccgctggggatcttcggatgcccagtctgcaatgtatcttgagtgctcagttacacaggacacccgttgcccaggttgtgaatattgtatcctctcacatgcttgtttgcgctgctcaatttgccccgtgttctggttggaatttttagcacggcttctggcttatccgaattctgttgattacgtacacatttattggcaactg

SEQ ID NO: 82009 - DNA, 2531 bp, Zea Mays
cagctccacaagacaaccgcaaccgcagcagctagaccgacacgcactctactctcgcacacagccgccgggcgggcacagtgacgcggccacgcgggcgccggagctagggtttccctgatccggcagggccggggagccgccggaaaccgttgctcgatttcggcgccggaggcgcggcatcggtgtctccgaggacggcggacgcgaggcgggttggggagctgaggcgcggcgccgggggctcagatctggtatgaccgacggcggcgaagacgggaatgcggcggcgcccagggccccctcgcgccgaaggggacctgtgcgggccagcctcgatgccgacgagttcatggcgctgatgcacggctcggatcccgtcagggtcgagctcacccgcctggagaacgagctcagggacaaggagagggagcttggggaggcacagacggagatacgcgcactgcgcttgtcggagagggcgcgggagaaagccgtcgaggagcttacagatgaattggagaagatggctgagaaactcaagctgacagaatctctccttgaaagcaaaaaccttgaagttaaaaagataaatgatgagagaaaggctgcattggctgcccagtttgcagcagaagcaactttgcggagagtacatgcagcccagaaagatgatgacatgccaccaattgaagccattcttgcaccacttgaagctgagctaaagctttctcgccaggagattgcaaatctccaggatgacaacagagctttggatcgtctaacaaaacaaaaggaggcagctctgctagaagcagagaggactgtgcaaattgctatggcaaaagctgctatggttgacgatttgcaaaacaagaaccaagagttgatcaagcaaattgagatctgccatgaagaaaataaaatcttagataagctgcatcgccaaaagattgcagaagttgaaaagcttagccaaactgtgagggagttggaagaagctgttcttcaaggtggtgcaacggctaatgttgttcgagattaccagcgcagatttcaagaaataaatgaagaaaagagaacacttgaccgtgaacttgcacgtgcaaaagttacagcaaacagggttgcttctgttgtggccaatgagtggaaagattctaatgacaaggtgatgccagttaaacagtggcttgaagagcgtaggttcttgcagggggagatgcaacaacttcgtgacaagctagctgttgcagaacgtacagcacgatccgaagctcaactgaaggaaaaataccagttacgtttgaaagtactagaagatggactaagggggccaccaagtggctctagtcgtccaactactgaaggaaagagctttagcaatggcccttcccgccggttatcacttggtggggctgataacatatcaaaattgtctccaaatggcttattgtcaaggagatctccgtcttttcattcaagatcatctcttttgtcaaacagcagcttggtcctgaagcatgctaaaggcacttcgaagtcatttgatggcggaactaggtcactagataggggaaaaatccatggaagtggagctcatttactcaacagatctacagatgctgttagagataaggagactagtgatagttggaagggcgatatggatgagagaactaatgagagggcagacaacaacacagatgagaaaagtaacgaaaccacaaataaaaactcagctgagacagtttctggtttcctatatgatatgctgcaaaaagaggtaatttctttgagaaagtcatgccatgaaaaggatcagattctaaaagataaagatgatgctattgagatgttagcaaagaaagtagacaccttaaccaaagcaatggaagtggaggctagaaaggtcagacgagaggttgcagccatggagaaagaagttgcagcaatgcgtgccagtaaagaacaagaaaccagagccaagctgcttggtacgaaaggctctggtagttcacaactgcttcctggaagcacgaactgggtcgatgcgcaacttccagtgatggcagcactaacacgaagcagcattcttggatagatccttctccgttccaccatttgttctattcctatcctattaattttgtgtctaaaattatagtagagtgagatgacccaacggtacctagatcagggtaaagagtaggctcggatctgatgagaccattgtgggagtgaaaccgagcctgtgtctaaccttgtggcgcgccctcttgtttctttgtccaggaagcgcacccgatgcttgtataggctggggccgctggggatcttcggatgcccagtctgcaatgtatcttgagtgctcagttacacaggacacccgttgcccaggttgtgaatattgtatcctctcacatgcttgtttgcgctgctcaatttgccccgtgttctggttggaatttttagcacggcttctggcttatccgaattctgttgattacgtacacatttattggcaactg

SEQ ID NO: 82010 - DNA, 2430 bp, Zea Mays
cagctccacaagacaaccgcaaccgcagcagctagaccgacacgcactctactctcgcacacagccgccgggcgggcacagtgacgcggccacgcgggcgccggagctagggtttccctgatccggcagggccggggagccgccggaaaccgttgctcgatttcggcgccggaggcgcggcatcggtgtctccgaggacggcggacgcgaggcgggttggggagctgaggcgcggcgccgggggctcagatctggtatgaccgacggcggcgaagacgggaatgcggcggcgcccagggccccctcgcgccgaaggggacctgtgcgggccagcctcgatgccgacgagttcatggcgctgatgcacggctcggatcccgtcagggtcgagctcacccgcctggagaacgagctcagggacaaggagagggagcttggggaggcacagacggagatacgcgcactgcgcttgtcggagagggcgcgggagaaagccgtcgaggagcttacagatgaattggagaagatggctgagaaactcaagctgacagaatctctccttgaaagcaaaaaccttgaagttaaaaagataaatgatgagagaaaggctgcattggctgcccagtttgcagcagaagcaactttgcggagagtacatgcagcccagaaagatgatgacatgccaccaattgaagccattcttgcaccacttgaagctgagctaaagctttctcgccaggaggatgacaacagagctttggatcgtctaacaaaacaaaaggaggcagctctgctagaagcagagaggactgtgcaaattgctatggcaaaagctgctatggttgacgatttgcaaaacaagaaccaagagttgatcaagcaaattgagatctgccatgaagaaaataaaatcttagataagctgcatcgccaaaagattgcagaagttgaaaagcttagccaaactgtgagggagttggaagaagctgttcttcaaggtggtgcaacggctaatgttgttcgagattaccagcgcagatttcaagaaataaatgaagaaaagagaacacttgaccgtgaacttgcacgtgcaaaagttacagcaaacagggttgcttctgttgtggccaatgagtggaaagattctaatgacaaggtgatgccagttaaacagtggcttgaagagcgtaggttcttgcagggggagatgcaacaacttcgtgacaagctagctgttgcagaacgtacagcacgatccgaagctcaactgaaggaaaaataccagttacgtttgaaagtactagaagatggactaagggggccaccaagtggctctagtcgtccaactactgaaggaaagagctttagcaatggcccttcccgccggttatcacttgcagcttggtcctgaagcatgctaaaggcacttcgaagtcatttgatggcggaactaggtcactagataggggaaaaatccatggaagtggagctcatttactcaacagatctacagatgctgttagagataaggagactagtgatagttggaagggcgatatggatgagagaactaatgagagggcagacaacaacacagatgagaaaagtaacgaaaccacaaataaaaactcagctgagacagtttctggtttcctatatgatatgctgcaaaaagaggtaatttctttgagaaagtcatgccatgaaaaggatcagattctaaaagataaagatgatgctattgagatgttagcaaagaaagtagacaccttaaccaaagcaatggaagtggaggctagaaaggtcagacgagaggttgcagccatggagaaagaagttgcagcaatgcgtgccagtaaagaacaagaaaccagagccaagctgcttggtacgaaaggctctggtagttcacaactgcttcctggaaggaacgcagcacgaactgggtcgatgcgcaacttccagtgatggcagcactaacacgaagcagcattcttggatagatccttctccgttccaccatttgttctattcctatcctattaattttgtgtctaaaattatagtagagtgagatgacccaacggtacctagatcagggtaaagagtaggctcggatctgatgagaccattgtgggagtgaaaccgagcctgtgtctaaccttgtggcgcgccctcttgtttctttgtccaggaagcgcacccgatgcttgtataggctggggccgctggggatcttcggatgcccagtctgcaatgtatcttgagtgctcagttacacaggacacccgttgcccaggttgtgaatattgtatcctctcacatgcttgtttgcgctgctcaatttgccccgtgttctggttggaatttttagcacggcttctggcttatccgaattctgttgattacgtacacatttattggcaactg

SEQ ID NO: 82011 - DNA, 2445 bp, Zea Mays
cagctccacaagacaaccgcaaccgcagcagctagaccgacacgcactctactctcgcacacagccgccgggcgggcacagtgacgcggccacgcgggcgccggagctagggtttccctgatccggcagggccggggagccgccggaaaccgttgctcgatttcggcgccggaggcgcggcatcggtgtctccgaggacggcggacgcgaggcgggttggggagctgaggcgcggcgccgggggctcagatctggtatgaccgacggcggcgaagacgggaatgcggcggcgcccagggccccctcgcgccgaaggggacctgtgcgggccagcctcgatgccgacgagttcatggcgctgatgcacggctcggatcccgtcagggtcgagctcacccgcctggagaacgagctcagggacaaggagagggagcttggggaggcacagacggagatacgcgcactgcgcttgtcggagagggcgcgggagaaagccgtcgaggagcttacagatgaattggagaagatggctgagaaactcaagctgacagaatctctccttgaaagcaaaaaccttgaagttaaaaagataaatgatgagagaaaggctgcattggctgcccagtttgcagcagaagcaactttgcggagagtacatgcagcccagaaagatgatgacatgccaccaattgaagccattcttgcaccacttgaagctgagctaaagctttctcgccaggagattgcaaatctccaggatgacaacagagctttggatcgtctaacaaaacaaaaggaggcagctctgctagaagcagagaggactgtgcaaattgctatggcaaaagctgctatggttgacgatttgcaaaacaagaaccaagagttgatcaagcaaattgagatctgccatgaagaaaataaaatcttagataagctgcatcgccaaaagattgcagaagttgaaaagcttagccaaactgtgagggagttggaagaagctgttcttcaaggtggtgcaacggctaatgttgttcgagattaccagcgcagatttcaagaaataaatgaagaaaagagaacacttgaccgtgaacttgcacgtgcaaaagttacagcaaacagggttgcttctgttgtggccaatgagtggaaagattctaatgacaaggtgatgccagttaaacagtggcttgaagagcgtaggttcttgcagggggagatgcaacaacttcgtgacaagctagctgttgcagaacgtacagcacgatccgaagctcaactgaaggaaaaataccagttacgtttgaaagtactagaagatggactaagggggccaccaagtggctctagtcgtccaactactgaaggaaagagctttagcaatggcccttcccgccggttatcacttgcagcttggtcctgaagcatgctaaaggcacttcgaagtcatttgatggcggaactaggtcactagataggggaaaaatccatggaagtggagctcatttactcaacagatctacagatgctgttagagataaggagactagtgatagttggaagggcgatatggatgagagaactaatgagagggcagacaacaacacagatgagaaaagtaacgaaaccacaaataaaaactcagctgagacagtttctggtttcctatatgatatgctgcaaaaagaggtaatttctttgagaaagtcatgccatgaaaaggatcagattctaaaagataaagatgatgctattgagatgttagcaaagaaagtagacaccttaaccaaagcaatggaagtggaggctagaaaggtcagacgagaggttgcagccatggagaaagaagttgcagcaatgcgtgccagtaaagaacaagaaaccagagccaagctgcttggtacgaaaggctctggtagttcacaactgcttcctggaaggaacgcagcacgaactgggtcgatgcgcaacttccagtgatggcagcactaacacgaagcagcattcttggatagatccttctccgttccaccatttgttctattcctatcctattaattttgtgtctaaaattatagtagagtgagatgacccaacggtacctagatcagggtaaagagtaggctcggatctgatgagaccattgtgggagtgaaaccgagcctgtgtctaaccttgtggcgcgccctcttgtttctttgtccaggaagcgcacccgatgcttgtataggctggggccgctggggatcttcggatgcccagtctgcaatgtatcttgagtgctcagttacacaggacacccgttgcccaggttgtgaatattgtatcctctcacatgcttgtttgcgctgctcaatttgccccgtgttctggttggaatttttagcacggcttctggcttatccgaattctgttgattacgtacacatttattggcaactg

SEQ ID NO: 82012 - DNA, 1881 bp, Zea Mays
cagctccacaagacaaccgcaaccgcagcagctagaccgacacgcactctactctcgcacacagccgccgggcgggcacagtgacgcggccacgcgggcgccggagctagggtttccctgatccggcagggccggggagccgccggaaaccgttgctcgatttcggcgccggaggcgcggcatcggtgtctccgaggacggcggacgcgaggcgggttggggagctgaggcgcggcgccgggggctcagatctggtatgaccgacggcggcgaagacgggaatgcggcggcgcccagggccccctcgcgccgaaggggacctgtgcgggccagcctcgatgccgacgagttcatggcgctgatgcacggctcggatcccgtcagggtcgagctcacccgcctggagaacgagctcagggacaaggagagggagcttggggaggcacagacggagatacgcgcactgcgcttgtcggagagggcgcgggagaaagccgtcgaggagcttacagatgaattggagaagatggctgagaaactcaagctgacagaatctctccttgaaagcaaaaaccttgaagttaaaaagataaatgatgagagaaaggctgcattggctgcccagtttgcagcagaagcaactttgcggagagtacatgcagcccagaaagatgatgacatgccaccaattgaagccattcttgcaccacttgaagctgagctaaagctttctcgccaggagattgcaaatctccaggatgacaacagagctttggatcgtctaacaaaacaaaaggaggcagctctgctagaagcagagaggactgtgcaaattgctatggcaaaagctgctatggttgacgatttgcaaaacaagaaccaagagttgatcaagcaaattgagatctgccatgaagaaaataaaatcttagataagctgcatcgccaaaagattgcagaagttgaaaagcttagccaaactgtgagggagttggaagaagctgttcttcaaggtggtgcaacggctaatgttgttcgagattaccagcgcagatttcaagaaataaatgaagaaaagagaacacttgaccgtgaacttgcacgtgcaaaagttacagcaaacagggttgcttctgttgtggccaatgagtggaaagattctaatgacaaggtgatgccagttaaacagtggcttgaagagcgtaggttcttgcagggggagatgcaacaacttcgtgacaagctagctgttgcagaacgtacagcacgatccgaagctcaactgaaggaaaaataccagttacgtttgaaagtactagaagatggactaagggggccaccaagtggctctagtcgtccaactactgaaggaaagagctttagcaatggcccttcccgccggttatcacttggtggggctgataacatatcaaaattgtctccaaatggcttattgtcaaggagatctccgtcttttcattcaagatcatctcttttgtcaaacagcagcttggtcctgaagcatgctaaaggcacttcgaagtcatttgatggcggaactaggtcactagataggggaaaaatccatggaagtggagctcatttactcaacagatctacagatgctgttagagataaggagactagtgatagttggaagggcgatatggatgagagaactaatgagagggcagacaacaacacagatgagaaaagtaacgaaaccacaaataaaaactcagctgagacagtttctggtttcctatatgatatgctgcaaaaagaggtaatttctttgagaaagtcatgccatgaaaaggatcagattctaaaagataaagatgatgctattgagtttgcttatctattgttgtctggcag

SEQ ID NO: 82013 - DNA, 1640 bp, Zea Mays
cggccatgaacgccaacgtgagggagagttgccgctgggcggagtgaaggttgttgccgctggccaatcggagggagtgccgtcgtctgagttaagaacacggccagggaggctcggcctatcctggcggatgtgtctgtggcgttgtttggaggggtgatcgatcggagggctggcaattgcttgccgacgatgaagcttcgtcaggggatcacactgctctgcggatggggttttcgccgcgctgtgcactgtaccagcgaggttacgggtcacccggagaccaatttggtgaagtatctgggatcccaagtctaaggcaagttatgcccttgatcactcttctttacctaataatattcttgttcatcaatgtgacatgcttaggttaatttgatgggacctaataggtttccctagtttgtttaccccaccccttgcagacaactgaactattgggtagacatgctattgctctacctggtcttgagattaatgttacatttgaattatgaccatattccaattatgttgttgttttagttattgttcatgacaagatcatcatgttaattggaacatggagcttaacttgagataaccgtgctaccacaagggtggaatgggacaccttggcttactaattaggaaatctagtggaggactaccttactgaaagggaaatatgcccttggaccatttctaagtattttggtgattaagtgcccaacacaaatggtttaagtgttcaattgtgccaaagactcaagcagtgaaaatcaagatacaaggtatgattctagacttagtacattagtttttgtgtactaacatatttgtctaagtgctagaatcagagaaaagacaaaacggaaaagacttgctggagcagccaagactctgcgcagtctaggtgcaccagactgtccagtggtgcaccggacagtgtccggtgcgccaggctggagtctggtcaactggctactctcgggtctcgacgacggcgaacgactaaaaatcaccggactgtccggtggtgcatcggactgtccggtgagccaacggtcggccgcgccaacggtcggccgcgcaatccgcgcgtgacgcgtggccgagctaacggtctgatgggggcaccggacagtgtccggtgcgccaacggctccaaatcttcaacggtcggctgcgccaatttaggaaagcaatctgcactggacactgaacagtgcctgtccggtggtgcaccggactgtccgggtgcgccacccgacagaaggcaagaattgccttcctggattgctctcaacggctcctagctgccttggggctataaaagggacccctaggcgcatggggagaacacccagcatactctgaacattctaagactcccgcactccattctcgcacactcgattgacattcttagtgatttgagctccgttctagtggtgaacttgttgtgtttcatttgagctcaagccttggcttgtgtgtgtgtgcgtattgctgggatttgtgtgtgttgcttccctcccttattctagtgctttcactttgatatttgttgtaagggcgagagactccaacttgtggagattcctcgcaaacggaaaagtgataagaaaaggaacaccgtg

SEQ ID NO: 82014 - DNA, 554 bp, Zea Mays
ctacgcccaggctcaagcgatagcgtgcgtgcatgagacttagatggcggcttcggaggcggcaacgacaatgttaaaaatagtttttctcacagaatttaaataactatcttgcttttcaggcattgccagaaatagctcaaaagattacatggttggagaatgaagataccttgcttgattcttctggcgagactgatcttgctgaacatcacaaattggggcttgatatatctgaaccggagaagaaaatcatttatgagatgatgagaccagagaggactttgttgtatttggttcctggaaggctggcccggaacccagggtctacacatcttataactgaaaaacacatgagcagcaagaaggtgagcaagaggaagcacgctagaatcattgacaagaagattgccaaaaagaagtctgaggctgtcgagtaccaaaagcttcttcccataggctcaaggaatagagaccgccacaatgagagcttggccaagagaagatccaagctttctacctctgccaagtcttcctctggcacctccgcttaa

SEQ ID NO: 82015 - DNA, 718 bp, Zea Mays
cggaatccgtgcggatcgaacgaactcggcctggaagggcgcggttctcccgccagctcttgcggaatccgcggcgctataaatcccgagccctgctccctcgcccgaccctgtgaacgaacgccgaggtccaccgtggtcacaagaacagaggagagagaaatcacgggaggaaacccaacgccgcgcgccgttggaagacctcacagccgccgcgtagccacttgccctcaccttcgtccagtgcccgattgacgccgccatcgtgtgctcgccaagagggttagtagccgccgtgatccatattgctgagcgaatccatgggagagagatggaacagagaggttgccgccaccattgatctgcgtcctcctcgttgctctggcctcgacgacgggtcctggggcatcgccggtgttcaccgcttccgtacgtggttttcccgggtgcgtttggcatgcgttgctggcgtaattcgtcgccggcgttcgaagaattgccgccaccgtgggcggacgacttcgcaacataaaatccggaacacaaaaaaacgccgcgaagatccgattctatgatgaactgaagcaagaaaaagagggaacacgaggaatccctaacgtttcccccgcttcgtcggcggcccgcgtacgcgagcgaacgcgggtcgccatcatcgtcatcgtcatcgtcctcgtccacgccgcgcgcccctcgttca

SEQ ID NO: 82016 - DNA, 596 bp, Zea Mays
atcacccatgttctcgaccacaatcctatagaaaactgattgaaagtgggcgatggaaattgaagtcaaatcggagatggtcaaacgccacaagggaaccagcctgtgaagtttctgaaccaactacgcttttaagagcagattgtagtagatgtgttgcagtgtgatgagcctacaaagtgcaggaagcagaaataagttatataacaagattagccccttagtttcatccgtggtggaaaaaacaagattagcccctgtgacatgataatagagacaataaagagttcatgtctgatttcttacaacaaatttgcttataaacagacatgtcacatgtgatataagctaagctatgaccggtcacaaaatataagttacaaacagtagtcctgtacagatttgcatataatcagagatgttgtatggatgctgtcagaaggcatgacacagatgaaagtaactatatatatgttacatattcttttttcttgtttattgaaaaccactgaaaattgatgtgatcaattaagaactgtagataatgcatttccaaataaacaaaatgaggaccaaattgaaaaggtcaaccacag

SEQ ID NO: 82017 - DNA, 1247 bp, Zea Mays
tcaaatttctaacaagcactcgctcttgcagttgtgaggcttatgggtcgtgctgcttctcacattacattggaatgcgctttgcaaacacaccccaatgctgcactcattggggaagaggttgctgcgaagaaagaaacccttaagaatgtcacaaactacattactgatatcatctgcaagcgtgcagatcttggttacaactatggtgttatccttataccagaaggcctgattgatttcatcccagaggttcaaaaactcatcgcggaattgaatgaaattttagcacatgatgttgttgatgaggcaggggcctggaaaagcaagcttcaggctgaatcaagggagctgtttgagtttttgcccaaaactattcaggagcaacttatgcttgaaagagatccccatggcaatgttcaggttgcaaaaattgaaactgagaaaatgcttattagcatggtggaaactgaactggagaagagaaaagctgaggggagatactctgcacatttcagaggacaagctcatttctttgggtacgaaggaagatgcggccttcctactaattttgattctaactattgctatgcattaggctatggtgctggtgcccttctccaaagtgggaagacaggacttatttcgtcggttggcaaccttgcggctccagtagaagaatggactgttggtggaacagcattgacatcactgatggatgttgagaggaggcacggcaagttcaagccagtgatcaagaaggctatggtggaactcgatgctgcacctttcaagaaatatgcatcgttgagggatgagtgggccatcaagaacagatacatcagccctgcggccctggaagcgatgactcgaaccacaccttgatgctggaactcggtgctgagttatagagacgcgtccttcacttatttttgttcttacagttttgggagtggagacttggacactgggtctcctggagcagcctgcagtgcagtctccatattgtgaattgtctaataagaggttcgatgggagttttttgggtaccgactggatgtggtagaaaataagaactggttctagtttttttgggtatgatttatgcagcaactgacttgtcttgtagccctgattctgttcccatgtttgcaatctcgtgagaacgaacaaattgtacactgtcgattgcttgcttccgttagcagattattgtacacggtcgtttgtccagtgatgtgtcctac

SEQ ID NO: 82018 - DNA, 1019 bp, Zea Mays
ccggtcttcacgcccgcgccacgccgcctggaccagagtcaccaaaccgcggacacgccacgaaagcacgaaccagggactcgcccgccattcgccaacccccacgaacccacggccctctccgacccgatcgccatcaccccacgcactcgcacccttcagggctaccccataaaaacgcccacgacggcgactggcctttcgattcgcccagggcaatattccccccggaccaaactagatcagcgaaacccactccgctctcccgagatcggacacatggcggcggcggcagtgacgtccaacggcggcgcagtggccgcgaacgggccggcgcccggcaggctggcctccgtgtacagcgaggtgcagacgagccggctcctgcacacgctgcccctcccctccgtcctccgctccaacttctcggtcgtcgacggccccgccagctccgccgcgggtaaccccgatgagatcgccaagctcttccccaacctgttcggccagccctcggcgtcgctggtgccttcggccgagcccgcggcgaccaggccgctaaaggtcggtgtcgtgctctctggtggacaggcgcccggcgggcacaatgtcatctgcggcatctttgattaccttcaggagcgtgcaaaaggtagcaccttgcttggattcaagggaggccctgctgggatcatgaagtgcaaatatgtggaactcacttcagactttgtgtatccctacagaaaccagggcggattcgatatgatctgcagtggaagggacaagattgaaacaccggagcagttcaagcaagctgaagacacagccaacaagcttgatttggatggacttgttgtcattggtggtgatgattcaaacaccaatgcctgccttcttggtgaatactttaggtcaaggaacctgaagactcttgttattggttgcccaaagactatcgatggagatctgaaaatgtaaggaggtaccaacaagctttggatttgatactgcttgcagggtat

SEQ ID NO: 82019 - DNA, 1434 bp, Zea Mays
aacctctctgatatcagcagcgagcctcctctctcggtctttctggaagcgacgtcggactcgagactcagctccactcaccaacgaggaatctggatagggcgacaagggttttgtcccggccaagacgcaacccatcccgcggtcatcaacagcatctccgatcgcgccagacgtggccactgctttcgtttctagttcacatgtgctcgcccgccacacgttggtttgcgactctcaaaacttacgttcaccatcttgtctcgtatgcctgctgtgtaaatggtaagcactccgcacactcaggttgttcgatgaaatgtgccaacaatattttttttgctcgtctaggacatcaaagtagatctgttgtcagccgtgcacctaggttgttcgacaaaatgtcccgacatttgttttgtcataccaccatgcattacatgttgtccttaaaacatatacgctactacaggatatttagacttcgttggtgatgactacatcaactaacttatatattttcatgcgtacattaactgttgtgcatgtctaacaagacgtattaattgtaattttatagctctcgcatccacttgaactacatcgtgattggttcacaatatccaaaaccttccgtgcggtgaattggcaggcttagtaaccgggaaccaggaacttggccacgttcctcgttccgggaacgttcgttccgttccgggaatgtgggaacaatctcgttccagtagtgttaaatcctagattttgtagcgtaccgcgtaccacgttctcgttcctcgatcccatcgatctgggaagcgtaccacgttcccgttcctcgatcccatcgatctgggaacctggttactaagggcaggacgaacttcatcattacagcctcggataagtacggatcaagttatatggtcaaatgtgtatttttcatattcatctttaaatcggctcatctgattatatgtcactcatatattccttttggtttctgaataatatatcaacaattcacgtcgaactgcggcatctgtttcccggctcctaaaagctcccggttgaagcgcttcatttactagataaatgtaaaggccatgttatacataatatttttttttcttccttcatcattagtaatatgggttttgttgttataaataattgtatggttcattttgctgtcatactgctcaaatgcctgatcggtaaggccatcctacttctaattatctacctaagtttttagtttttatgcttcggtttcaattttacagagtatggaaatacagtagcaatttgctttgttatctctgttaattaacagtgtccacaatatattctacttctttacaacatggataaggacacatgtttcatttgattgccatacacctgctatattctggatagacgacactatccatc

SEQ ID NO: 82020 - DNA, 5826 bp, Zea Mays
atccatttgaccaggattaatcccagagcaccccaggtttgtaaggaaaaaatgtgccatatggggccaagtagaccgacatcgagcaccatgcacggcaggacaacacaggggtatgcccagttcaagtagttagggagctgaggttgcttagggatggagtcaaattccgactgttatcagctaagtcagcagggaagagactatatgtattcaggatgtgtgcatggatcaatcaaaaagctaaaccctgaaccagttctttatcttgagccttgttcatgggctaagttcaagcatttggttcagcagctgcctgtttcactcatacagcctcgaacctgaccactttcccctccattgtggcaaaaggatgtgttctcttccttgaaaaatataagggcaaccacacggtaagcattgttagcccatacttcttaaatcatgcttcattgcaccaaacaaacaaactcccacaaacataaaaaactagaaaataattggctgcctagatcccaacattaaagtgatttaagatgcaaggcctgcatatcattgacattgaaatgatgtgcatcaatttgttagaatagaatgtgcttctatattatgctacgatcatatcagatcaggggtccagacagttgttctataataggggaagaccttaaccgactttgatggacaggtttgatctgttccagagagcatagatagcagagttagaattggagttggttaaggtagttgtacctaggttggactccctgtcatgttgtaatcccgatgacaatattctaccctatatatattcgtcccccttagccaaataggccagtgcgaacaacttaaacctggtatcgtgttttcttacacaattgacacaccaatgccatcaatgattgcaagtcgtccgactaatcgcgattaatcgcgattagtcgagttggtcgcctgttaacgactgattagccggatgactcgatcagggtttttggtcgtccagatcgtccaattagtcgtcgatcaaggcgattagtcgtccgattttgtagtttctagtcgttagtggctaggtttttgtattgggctacatgatgttttcggcccatctacaggaacatttactttggcctctcctcggccgaaaccctagcactgcctaaaccctgcttgtgcccctctgtcgcctgacgtttgctcgcctctctgcctacaccctctgcctgcgcccagtccattgagtccagaactccaaatcaccggcaattgctcgcttgcaatcacctccgcccctctgcctgctcgcatgctccagtctagatcaccagcgacagctccagatcaccggtggctccactctccagcaccagtgatgagatgagctcgtcatctcaaggttccccctgctcccctttctttgtatgaagaattggagattatgggatgtcaggttcaagttagtcacaactcacaataaagcaatctgttattttgtatatcttggttgtttattctaatttatataatgtatttatgtatgtgtgtgtgtatatatagtttatgtattaagagccctgaggctcccaacaattagagaaagccctggttggtgtctcttgttccagccatatacattcaatagtttcccaccgaaccgttgtggcccattaaccaaaccctgcgatcgcacaaagccgccgccgttttttcgccttccattcccgccttcctcgcactgtgcaaccgcatctgggcgatctgcgcccacgcgacggtgttccgcgccaccacaggctccaactccaatgagttcaactcctccaccgccccatcaccatgggcaacggctactcggcatctggggatgcagagcccgcccttgctgcctccaccgacccctcctcccgcctccactatggcaacacgtccctcaaggccgacgcctcagcgcccgcgcccattggctcagtattgggacgacccatggagacatgtgtagcatctacatcgtcggcaaggagcgcgggtggacgcgatggtctccactgcagagacggatacggagaaggaggcagcggcgaatggcgaggagctgcccgtcatgccctgggccacctctgtcgcaaggtgagctgttgaatcgcgtgggggctgtgtggtaattgttctctagagactacgtggacgacgaggtaaactctcatctcctcactctccctaccttgatgaagctcatatctcgcagcgtaggatggtgggttgaagggataggcccgggtgtgacgtctctgaagagaccaccaccggaatcgagatgcaggagaatactgcattttccctatcggttaaactattgcctgcaaatcattggaaattcgttggaaattgtacaagctctccaaaaaattggacggctcattttattaattttagcacctactgtcgcttctcaaaagtttgtgctggtccatagttttaaatagtcactgaatatttagatatgtagtttgattgaaaacataagtgataaatagtgaaatttactagaaccataaaagatattatcactttcttgcacaaaatgcataattccccgttgcctcacatttatcatatgtcaactatgcgagccttcgaaaaatatagtatctcatgggttcatttatgatcttagcacttgctgagagagggagtgattggtacagtaacgggtcaaatagggacctctaatgggctaggcccatatacactctaatacccccccccaggcgaaacactagccactgatgttgagactggaccgaaactccgtaaacaccatcgtcgggagccccttggtgaagacgtcggcgaattgggaggtggtcgggacgtgaaggatccgaacagctccacaggcgacccgttcgcggacgaagtgatgatcgatctcgacatgtttcgtgcgctggtgctggacggggttggtggagaggtagacggcgctgacgttgtcgcagaagaccaggatgctcgtggccagtggactgtgaagctcttggagcagctgacgaagtcaggccgcctcagccacgccgttggccacagcccgatactcgacctctgccccgcctgttctagcagcggccgtctccgataccatgagagagggagtgattggtacagtaaaccctagttggtacagtaacgggtcaaatagggacccctaatgggccaggcccatatacactctaacacttgctatggcctatagggtttacataggttcacagcttcttactgtccactaggcttctccagctgcattgtttgtaagggacagaaactagctaactgttgtgacttaattactccttcattttccctgttgattaaaccgatatctgaaaaacataagaatttcgctgccaaagatatacctatgttgatgattttagcaccttgtatcagttatcaacaattcgtgctgacttacaacttctaaaaaagtaaatagtcaacgaattcttggaattacaatttcttgaaaaacacatgggagaaacagtaaaattcggcagaccacaaaatatattgtctctttcttgcacaaatgctcaatctacctgtttactgacaagtatagtatgtcatctatgcaaattctaaataaaaaactatagtgccacatgggttagtttttatgatcttagcacttggaatggcttatatatgaggtttatgcatgttgacaagttaacatcccctagccttctccagctgcgttctctctctctctctctctctctctctctctctctctctctctctctctctctcttctctttttatcagatcaatgttttgaaaaaaagtgatttgtgcatttgaccctgctgtggcatcgcatccttcatgagtgttggattgctttctcgcgggaatctagagagggagtgtcgcacaactggctccattgtcgggggttgtgctcacgccatcagttttggagtctggaggaggtaggacactcgctattctcgttttgcccaaaatagaacatctcttccaacattgttactgtccaattgagttacatactgtcaaaatccatcagaaatatctaactgactgttgttatcggtagctctcctactcaatttgtcaatatctaactgattgttgatatatgcagggaggaaaagcagtgtcgcctgtttcattgtgttcatgatgattctttcagcaataggcatttttaggtagtaaaggaaacatttgtgctctggtttctgcaagaggtttgcacataaacagtttttattgcagtctaggctccaacctttggctgataaacactctcaccacaagcaacgaagaaataagaataaatgatgggatgtacagaaatctgaaaatgaataaatgatgtggcaggttgtaggagagcagcatgatctaagtgaatgcataactctactcatattatgcaatgggccataagtaaaggtgtgtcatccaaccagcctatgctaattaagcttatattcaaagataagcaaacctgtatcattgttcattcataagtatcattatatgcactatgctgtgaactgcaaaatgaaatacaatggaaagaagcaacagcatgttccatttatgacagagatattcccataagttcttcctgttatcatctcaaaccaagaatatgatgctagccttttctgttatattatctcgtaagtggtaatgtgtctagctcatgcttgagaagtaatgaagaaaacttgagcccagctttaaaacatgagaaaaaatatataacaatagtaaatagcatcaaaccgaagtctatatggcatccccttagcgtctttttctttgatatgtaaactccatgtgcgaaagggcctctagtgtaatggttaatgcttccgagtagcacctccaggtctcgggttcgatccccctcgagggcgaatttcgggcctggttaaaaaaatctcgggttatgtcctacgcgccaccctctgactgggacgttgcagagtgggtagtgacggcctgctagtgatgggggccagggttcggggattttctcggcctaaaccttgtttcggtctcttcttaatataataccggaagggcggtctttccctcccggccgagttttttatacgtaaactccatgtgtttttcagcatggtgcatgccaaataacaaagagataaagaatgcattttgtttatgcatcagctgtaggcaatcatgacacaaaatttagcaaagagcaaagatataaagtcattgtgtgtacttgcctgttctatgatggcaaagtagtgggagtttgcctgcattgagaaacaaaggaaattcaatgtagcttacttttaaagtaataaataaatatgacaaaatactttgttagaaaagaataaaccaacagaaagcgtagtgttataaaacacgataattaatatatctccagagtagatgttcattaacatataatgaagtagtacaatatctgttaaacaatgaatagcttaataaaaacaagctcacagcagaagcaacatgctaaaggaaaaacataaattaaatatgccggtgctgtttgtgatcatttagccataaccctgattgttgaatcttcttagcatgtgtactaatatatgcaaattcacgagcaacaatgcctggcagaatagttcacgtaatgctcaattgcccatagaatatgtagattttgtaagcttgaagtggccagttagaataagagcgacaactacacctgacactaggcctgaaatgacttctacgcatggaaactacaag

SEQ ID NO: 82021 - DNA, 1404 bp, Zea Mays
ctataagattgcaaaactgtgttgtgcttccatgccaatgacaatcgagcgtgatctccacatggccacagggaacggagaaactagctacacgaaaaactctaggattcaggagaaagttatgtttcagatcaagccagtccttgaggaggccactagagcagcatactcagctctcctccctcgaactatggtcgtggccgacttaggctgctcatcggggcctaacacactgcgcttcgtctccgaggtgattggcatcatagctcgccattgcaaagaacacgaccgacgacatgactacccacaacttcagttcttcctgaatgacctgccgggaaacgacttcaacaatctcttcctgctcatccagcagttcaataagtcgatggcaagaaaccacaagggtgaggcagctgaggcactgcctccgtgctatatctctggtttgtcaggctccttctacactaggatctttcctagcgaaagcgttcaccttttccactctttgttctccgttcactggcactctcaggcatcagaacaactgaaggacaccaaaaataaatgcctagatatctacatcacaaagaatatgccaccgtcgatggtgaagttgtttcaacagcagtttgagaaggacttctccctcttcctcaagctacgctacgaggaactcgtgtctggtggccaaatggttctaacatttattggaaggaagcatgaggatgtgttcactagagagcccaaccatcttcacggattgcttgcgcagtcactgaaatccctagttgatgagggtcttgtggagaaagaaaaacttgagtcattctatcttccgttctactcaccatcggttggtgaagtggaggcgattttgaagcaagttgggttgttcaacatgaatcatgttaaagtatttgagataaattgggatccctacgatgactcggaaagtgatgatgtgcataacagtatcgggagcggtgaaaatgttgctaagtgcctacgagcagttatggagtcgctggtcgcaagccaatttggagaacacatactcgacaagttattcaaagagttcgctcactgtattgccgaacaccttgagaatgaaaaaaccaagcatgttgttcttgtcctatcgatcgagaaagcaataattcatgtgtgaagtgtcttgtttctcactatctttccattattatcacatggtaatgtatgtttgttttgaatgtgcatgtttgtgtcactagtgtattgaatggcatggtgtttttgttgttttctttatcgcttctcctatattttagatgcatgaattttaaggtgatttcacgcaacactcttgcacaaggaattaatacaaataatttgctccttttatgatcttccattcatttttgt

SEQ ID NO: 82022 - DNA, 1470 bp, Zea Mays
ggcaaacttttctataagattgcaaaactgtgttgtgcttgtatgtgctgagctttggattgggtacttctcttctctccaccatagctgaagcctcggattgcaggttgcagccatgccaatgacaatcgagcgtgatctccacatggccacagggaacggagaaactagctacacgaaaaactctaggattcagatcaagccagtccttgaggaggccactagagcagcatactcagctctcctccctcgaactatggtcgtggccgacttaggctgctcatcggggcctaacacactgcgcttcgtctccgaggtgattggcatcatagctcgccattgcaaagaacacgaccgacgacatgactacccacaacttcagttcttcctgaatgacctgccgggaaacgacttcaacaatctcttcctgctcatccagcagttcaataagtcgatggcaagaaaccacaagggtgaggcagctgaggcactgcctccgtgctatatctctggtttgtcaggctccttctacactaggatctttcctagcgaaagcgttcaccttttccactctttgttctccgttcactggcactctcaggcatcagaacaactgaaggacaccaaaaataaatgcctagatatctacatcacaaagaatatgccaccgtcgatggtgaagttgtttcaacagcagtttgagaaggacttctccctcttcctcaagctacgctacgaggaactcgtgtctggtggccaaatggttctaacatttattggaaggaagcatgaggatgtgttcactagagagcccaaccatcttcacggattgcttgcgcagtcactgaaatccctagttgatgagggtcttgtggagaaagaaaaacttgagtcattctatcttccgttctactcaccatcggttggtgaagtggaggcgattttgaagcaagttgggttgttcaacatgaatcatgttaaagtatttgagataaattgggatccctacgatgactcggaaagtgatgatgtgcataacagtatcgggagcggtgaaaatgttgctaagtgcctacgagcagttatggagtcgctggtcgcaagccaatttggagaacacatactcgacaagttattcaaagagttcgctcactgtattgccgaacaccttgagaatgaaaaaaccaagcatgttgttcttgtcctatcgatcgagaaagcaataattcatgtgtgaagtgtcttgtttctcactatctttccattattatcacatggtaatgtatgtttgttttgaatgtgcatgtttgtgtcactagtgtattgaatggcatggtgtttttgttgttttctttatcgcttctcctatattttagatgcatgaattttaaggtgatttcacgcaacactcttgcacaaggaattaatacaaataatttgctccttttatgatcttccattcatttttgt

SEQ ID NO: 82023 - DNA, 1407 bp, Zea Mays
gtgtaataatagcgctgtaggatcggaggagcatgtgcaaaaaacatggcaaacttttctataagattgcaaaactgtgttgtgcttgtatgtgctgagctttggattgggtacttctcttctctccaccatagctgaagcctcggattgcaggttgcagccatgccaatgacaatcgagcgtgatctccacatggccacagggaacggagaaactagctacacgaaaaactctaggattcaggagaaagttatgtttcagatcaagccagtccttgaggaggccactagagcagcatactcagctctcctccctcgaactatggtcgtggccgacttaggctgctcatcggggcctaacacactgcgcttcgtctccgaggtgattggcatcatagctcgccattgcaaagaacacgaccgacgacatgactacccacaacttcagttcttcctgaatgacctgccgggaaacgacttcaacaatctcttcctgctcatccagcagttcaataagtcgatggcaagaaaccacaagggcatcagaacaactgaaggacaccaaaaataaatgcctagatatctacatcacaaagaatatgccaccgtcgatggtgaagttgtttcaacagcagtttgagaaggacttctccctcttcctcaagctacgctacgaggaactcgtgtctggtggccaaatggttctaacatttattggaaggaagcatgaggatgtgttcactagagagcccaaccatcttcacggattgcttgcgcagtcactgaaatccctagttgatgagggtcttgtggagaaagaaaaacttgagtcattctatcttccgttctactcaccatcggttggtgaagtggaggcgattttgaagcaagttgggttgttcaacatgaatcatgttaaagtatttgagataaattgggatccctacgatgactcggaaagtgatgatgtgcataacagtatcgggagcggtgaaaatgttgctaagtgcctacgagcagttatggagtcgctggtcgcaagccaatttggagaacacatactcgacaagttattcaaagagttcgctcactgtattgccgaacaccttgagaatgaaaaaaccaagcatgttgttcttgtcctatcgatcgagaaagcaataattcatgtgtgaagtgtcttgtttctcactatctttccattattatcacatggtaatgtatgtttgttttgaatgtgcatgtttgtgtcactagtgtattgaatggcatggtgtttttgttgttttctttatcgcttctcctatattttagatgcatgaattttaaggtgatttcacgcaacactcttgcacaaggaattaatacaaataatttgctccttttatgatcttccattcatttttgt

SEQ ID NO: 82024 - DNA, 1348 bp, Zea Mays
ttcatgtgtaataatagcgctgtaggatcggaggagcatgtgcaaaaaacatggcaaacttttctataagattgcaaaactgtgttgtgcttgttgcagccatgccaatgacaatcgagcgtgatctccacatggccacagggaacggagaaactagctacacgaaaaactctaggattcaggagaaagttatgtttcagatcaagccagtccttgaggaggccactagagcagcatactcagctctcctccctcgaactatggtcgtggccgacttaggctgctcatcggggcctaacacactgcgcttcgtctccgagttcaataagtcgatggcaagaaaccacaagggtgaggcagctgaggcactgcctccgtgctatatctctggtttgtcaggctccttctacactaggatctttcctagcgaaagcgttcaccttttccactctttgttctccgttcactggcactctcaggcatcagaacaactgaaggacaccaaaaataaatgcctagatatctacatcacaaagaatatgccaccgtcgatggtgaagttgtttcaacagcagtttgagaaggacttctccctcttcctcaagctacgctacgaggaactcgtgtctggtggccaaatggttctaacatttattggaaggaagcatgaggatgtgttcactagagagcccaaccatcttcacggattgcttgcgcagtcactgaaatccctagttgatgagggtcttgtggagaaagaaaaacttgagtcattctatcttccgttctactcaccatcggttggtgaagtggaggcgattttgaagcaagttgggttgttcaacatgaatcatgttaaagtatttgagataaattgggatccctacgatgactcggaaagtgatgatgtgcataacagtatcgggagcggtgaaaatgttgctaagtgcctacgagcagttatggagtcgctggtcgcaagccaatttggagaacacatactcgacaagttattcaaagagttcgctcactgtattgccgaacaccttgagaatgaaaaaaccaagcatgttgttcttgtcctatcgatcgagaaagcaataattcatgtgtgaagtgtcttgtttctcactatctttccattattatcacatggtaatgtatgtttgttttgaatgtgcatgtttgtgtcactagtgtattgaatggcatggtgtttttgttgttttctttatcgcttctcctatattttagatgcatgaattttaaggtgatttcacgcaacactcttgcacaaggaattaatacaaataatttgctccttttatgatcttccattcatttttgt

SEQ ID NO: 82025 - DNA, 2053 bp, Zea Mays
ttcaagacccgggtgctgaaagttgcagccgatgagaatagagcgtgatctccacatggccacaggggacggagaaactagctacacgaaaaattctaggattcaagagaaaactatgtttcagatcaagcctgtccttgaggaggccacaagagcagtatacacagctctccaccctcaaaccatggttgttgctgacttaggctgctcatctgggcctaacacattacgcttcgtatccgaggtgattggcatcatagctcgccattgcaaagaacatggccgacaacatgaccacccacagcttcagttcttcctgaatgacctgcccggaaacgacttcaacaatctcttccagctgatccagcagttcaataagctgacggcaataaaccacaagagtgaggcagccgaggcactgcctcctccgtgctatatctctgggttgcctggctcctactatactaggatcttccctagcgatagtgttcaccttttccattctttgttctgccttcagtggcgctctgaggcaccagagggcaacaaaaaaacatgcctagatatctacatcacaaagactatgtcaccgtcgatggtgaagttgtttcaacaacagtttcagaaggatttctccctcttcctcaggctacgctacgaggaactcgtgtccggtggccaaatggttctaacatttattggaaggaagcatgagaatgtgttcactggagagtctaaccatctttacggattgcttgcgcagtcactgaaatccctagttgatgagggtcttgtggagaaggaaaaacttgaatcattctatttaccaatgtattcaccatcggttggtgaagtggaggccatactaaagcaagttgggttgttcaacatgaatcatgtaaaagtattccagacaaattgggatccctacgatgacttggaaagtgatgttgtgcataacagtattaggagcggtgaaaatgttgctaagtgcctacgagcagttatgcagccgctagtcgcaagccaatttggagaacccattctcgataagttattcaaagagtacgctcgccgtgttgccaaacaccttgagaatgagaaaaccaagcatgctattattgtcctatccatcgagaaagcaattcacctgtgaagtgtattgtttctcactatctcgcttggcatgctactatttgtgtagaaaactttgtatgtatgtttttttgtgtgtttgtgtcactagtgtattgaattacatatggtgtttttgttgttttatttatcacttctcctgtattcctatattttatatgtctaagtttttaaggtgatttcatgcaacccttgtacaagcaattgatacaaataaattgcaccttttatgatctatgattcgtctttgtatcataatgtatatcaagccatgtagaacatatgtaatagaacgaagttatgttttaggttaagccagttcttgaggaggccagtcgaaaaagtacacacatctctcctctctcaaaccatggtcatggccaacgtaccactaccagaatccggctctttgccgagtgcaaattattgggcacttggcaaagcatgctttgtcgagtgccactctcggtgaactaagcctctcgacacagacctagtttgctgagagtgcaaacactcggcatagacaaactctcagcaaaggaggctttgccgagtgtcaagctctcggcgaaatgcgacgctcggcaaagggccatcagtagccgtctatagttgacgaccattaactttgccgagtgtcagcccttgacactcggcaaaatatcttcttggccaagtgtcatctaacaaacactcgacaaattatcttctttgcctgaagcactggacaaagcagttatgtccggtagtgtacactgcacattgggatgtaagagcaagtccaacaattctcgatatccaatccctaaaccaaaaaatagggaaaaaagaaaaaaacacagatacaatagcttcctagtctagctcccgatcgagtcatgtgcgtaacccaacc

SEQ ID NO: 82026 - DNA, 3388 bp, Zea Mays
atggatggtggcagcgcacttccagctacaccggcctcacagccatcatcgaccatactatctcaagcagggcaaggatcaggtgtcacacaaaacaagggggctgccttcatccacgagccgtcgctaacaccggagagtcgcaaagtttcgtctagcgccaagacaaccccacatcagggagacaacctgctgctaggaaaagaaattatccctgctccgcctaacgtggagacgccatcaggagcccacaacacccctggtgccgacactctccgcctgctgcctctaaaactagcaagttcgcaggatgacgcttacagtgtgctagatggatctacaaacaagattgacaaaagtgttaccggaaaaaggtctcgcacatcaccttccaagaaggctgccaagaaactttttagagatgaagtcataaccaatgacgatgctactggttcttcatcggttaatgtcgaggctggcaagaatgagaaaggttccactgtttaccaacaaaggttgttgtcatgtgattatgctgttgtatatggcttcagtttacctgctgcagaaagattcatagcgttggcaaacaaagagacgcttattgcaggtggtcctttcgtgcttccccttgcacacaaacacaaagtgaaaattcttcctgctgattctgagcactctgcaatatttcagaccagtgagtgtagcttggtggattgcctaaagtacttcgctgtggtggagcatcttgacagctatcgttgtgaccgttgttggcacatcattgctgccaaatatctttctcttagatcaaaagttgatgaggaaaagttgcagggatatgttccccctggagtcactgccatgttcatcatcttcacgagcaacaaagcagctgattatcagtcagtgcccgaaggtaacacctcagttgtttctcatccaaataccagtggagacaaagatgtgattgttgaaagaacgcatctaagccttaactttgtaatacatattagccaagacccctcggcgcgcccgcactttcggctgaggcgccatgcgccccgcgcgtccgccactgccaattcgtcgctcttgactctggaagaggtggctcgtgctgctaaggggaagagggcacatacggttatgctcacccagttgctcgctttggcaagccatgctttggcagaggcagaaaccaggcctgaacctaaggatctgtgggaagagccgataaacgctactatgtggagaccgtgttctgatcaaagggattggaaagcctcagagggaaccaatgggtacatcatgatcagtgcgaatggtggcataaaccagcaaagggttgcgatttgtaatgcagttacaatctctcggttgctcaatgcaactcttgtcctcccaaaattcttgtacagtaatgtgtggctggacaaaagtcagtttggcgatatatatcaggaggattattttatcaaatatctgaaatctgatattcagattgtaaaggatcttccagtagagctgcagtcattagacttggaggccatcggtagccttgttaatgatacaaatgtcatgaaagaggcaaagcccagtttatacgtaaaaaaaatactgccaattttactgagaaacagagttgttcactttataggatttggcaatcgcttatcttttgacccaataccttctgaccttcagagattgcgatgcagatgtaattttcacgctcttcgttttgtacacaaaattcaagaaactggtgcagttcttgtagagaggttgcatggccacagggcctcttcgtcacctttgaaggataatcttttaggccagtttgctatcaagtctgaccccagtacgaacaagagtgacgcatccaaatatctggctgttcatctccggtttgagattgatatggttgcatactcattgtgttactttggtggtggcaaagatgaggaagacgaactagaagcttatcgccaaattcactttcctgttctgtcagaactcaagaagacgacaaagttgccgtctgctgctttgttacggtctgaaggcaaatgtccccttgcacctgaagaggctgtgcttatgcttgctgctattggtttcaagcgcagcacaaatatatacattgcaggtgctgaaatttatggagggcaatataggatggctgcaataagtcgtctttatcctgctttagtaactaaagaaacccttctgtctccatcagagcttgaaccatttaggaacttctcatctcagttggcagccctagacttcattgcatgtgcagctgccgatgcatttgctatgactgacccaggaagtcaattctcttctcttgttcaaggttaccgcatgtactatggtggtgggaactttcccacaataaggccaaacaagcgccggctagccagcatacttgtgaagaatgccacgattgagtggaatgaatttgaaagtagagttaccattcaacaaatcaagctgccagagttctgccaaccttgtattgccatctccattgttgctatcgtgctccggctgaaatctgaatatatctgttgcccttgaactactttggaatcaaactgtaaaaaagaaaatacggtgattgggctcttgtttgtgtcagagaagcaatgtagctgactagctcatccattatcttactgctatggtctactgctaggcatcatgttggatttggagtatttggcagaacttcgtctcatgtttgatggaagtagaccagggactaaattttgcacctcgataacaatgctgccatatttttgattggggtcagctaaaccattctgtgaatgaaggtgcatcatctgcaggtgaatgtggaagtaatatgttgacctaactgagcaacaacattcttattgttgcttgcctcaattctactcgggttaccattcaacaaatcaggctgccagagttctgccaaccttgtattgccatcttcattgttgctatcgtgccaggtggcatcttgattccttttttaaccattcttttgttcattgtaccataagagacgcatatagttaggttttaagtttatcccaactgaaaggtttcattatcaacgagagaaatgttcctttttgtgcaatctttatatgtgctcatccaacggcacttgtatactaatgttttggctattttttttgtttccaaattttctttggcaatgccctgaaactgtgaatgaactcactcagactctgattcgcagagcgatgctcagaaccacctgatctctggtgttgtaatgaatgttgttggaaggcattttgtatggaaacctttggattgctagttacagttctgatctgaaataaagcctgatctccgggga

SEQ ID NO: 82027 - DNA, 3926 bp, Zea Mays
atggatggtggcagcgcacttccagctacaccggcctcacagccatcatcgaccatactatctcaagcagggcaaggatcaggtgtcacacaaaacaagggggctgccttcatccacgagccgtcgctaacaccggagagtcgcaaagtttcgtctagcgccaagacaaccccacatcagggagacaacctgctgctaggaaaagaaattatccctgctccgcctaacgtggagacgccatcaggagcccacaacacccctggtgccgacactctccgcctgctgcctctaaaactagcaagttcgcaggatgacgcttacagtgtgctagatggatctacaaacaagattgacaaaagtgttaccggaaaaaggtctcgcacatcaccttccaagaaggctgccaagaaactttttagagatgaagtcataaccaatgacgatgctactggttcttcatcggttaatgtcgaggctggcaagaatgagaaaggttccactgtttaccaacaaaggttgttgtcatgtgattatgctgttgtatatggcttcagtttacctgctgcagaaagattcatagcgttggcaaacaaagagacgcttattgcaggtggtcctttcgtgcttccccttgcacacaaacacaaagtgaaaattcttcctgctgattctgagcactctgcaatatttcagaccagtgagtgtagcttggtggattgcctaaagtacttcgctgtggtggagcatcttgacagctatcgttgtgaccgttgttggcacatcattgctgccaaatatctttctcttagatcaaaagttgatgaggaaaagttgcagggatatgttccccctggagtcactgccatgttcatcatcttcacgagcaacaaagcagctgattatcagtcagtgcccgaaggtaacacctcagttgtttctcatccaaataccagtggagacaaagatgtgattgttgaaagaacgcatctaagccttaactttgtaatacatattagccaagacccctcggcgcgcccgcactttcggctgaggcgccatgcgccccgcgcgtccgccactgccaattcgtcgctcttgactctggaagaggtggctcgtgctgctaaggggaagagggcacatacggttatgctcacccagttgctcgctttggcaagccatgctttggcagagaaaccaggcctgaacctaaggatctgtgggaagagccgataaacgctactatgtggagaccgtgttctgatcaaagggattggaaagcctcagagggaaccaatgggtacatcatgatcagtgcgaatggtggcataaaccagcaaagggttgcgatttgtaatgcagttacaatctctcggttgctcaatgcaactcttgtcctcccaaaattcttgtacagtaatgtgtggctggacaaaagtttggcgatatatatcaggaggattattttatcaaatatctgaaatctgatattcagattgtaaaggatcttccagtagagctgcagtcattagacttggaggccatcggtagccttgttaatgatacaaatgtcatgaaagaggcaaagcccagtttatacgtaaaaaaaatactgccaattttactgagaaacagagttgttcactttataggatttggcaatcgcttatcttttgacccaataccttctgaccttcagagattgcgatgcagatgtaattttcacgctcttcgttttgtacacaaaattcaagaaactggtgcagttcttgtagagaggttgcatggccacagggcctcttcgtcacctttgaaggataatcttttaggccagtttgctatcaagtctgaccccagtacgaacaagagtgacgcatccaaatatctggctgttcatctccggtttgagattgatatggttgcatactcattgtgttactttggtggtggcaaagatgaggaagacgaactagaagcttatcgccaaattcactttcctgttctgtcagaactcaagaagacgacaaagttgccgtctgctgctttgttacggtctgaaggcaaatgtccccttgcacctgaagaggctgtgcttatgcttgctgctattggtttcaagcgcagcacaaatatatacattgcaggtgctgaaatttatggagggcaatataggatggctgcaataagtcgtctttatcctgctttagtaactaaagaaacccttctgtctccatcagagcttgaaccatttaggaacttctcatctcagttggcagccctagacttcattgcatgtgcagctgccgatgcatttgctatgactgacccaggaagtcaattctcttctcttgttcaaggttaccgcatgtactatggtggtgggaactttcccacaataaggccaaacaagcgccggctagccagcatacttgtgaagaatgccacgattgagtggaatgaatttgaaagtagagtaaggaaactcatacagcaaactaagcaagttcatgagaggcctgttgcaagaagcatatttagacatccacgatgtccagaatgcatgtgcagaacagagcactaatattttgatagtttcttgtatctataccaacagttgttttttcagaagaaagactaccaattagatcgccaaaggtagttcttttgtgctcccgctgaaatctggatagatctcttgcccttgaactactttggaatcaaactgtacaaaagaaaatataatgattgagcccttgtttgtatcagagaagcaatatagctgactagctcatcaattatcttactgctatggtctactgctaggcatcatgttggatttggggtatttggcagaactttgtctcatgtttgatggaagtagaccagggactaaattgattggggtcagctaaaccattctgtgaatgaaggtgcatcatctgcagctgactgtggaagtaatatgttgacaaaactgagcaacaacattcttattgttgcttgcctaaattctactcaggttaccattcaacaaatcaagctgccagagttctgccaaccttgtattgccatctccattgttgctatcgtgctccggctgaaatctgaatatatctgttgcccttgaactactttggaatcaaactgtaaaaaagaaaatacggtgattgggctcttgtttgtgtcagagaagcaatgtagctgactagctcatccattatcttactgctatggtctactgctaggcatcatgttggatttggagtatttggcagaacttcgtctcatgtttgatggaagtagaccagggactaaattttgcacctcgataacaatgctgccatatttttgattggggtcagctaaaccattctgtgaatgaaggtgcatcatctgcaggtgaatgtggaagtaatatgttgacctaactgagcaacaacattcttattgttgcttgcctcaattctactcgggttaccattcaacaaatcaggctgccagagttctgccaaccttgtattgccatcttcattgttgctatcgtgccaggtggcatcttgattccttttttaaccattcttttgttcattgtaccataagagacgcatatagttaggttttaagtttatcccaactgaaaggtttcattatcaacgagagaaatgttcctttttgtgcaatctttatatgtgctcatccaacggcacttgtatactaatgttttggctattttttttgtttccaaattttctttggcaatgccctgaaactgtgaatgaactcactcagactctgattcgcagagcgatgctcagaaccacctgatctctggtgttgtaatgaatgttgttggaaggcattttgtatggaaacctttggattgctagttacagttctgatctgaaataaagcctgatctccgggga

SEQ ID NO: 82028 - DNA, 3930 bp, Zea Mays
atggatggtggcagcgcacttccagctacaccggcctcacagccatcatcgaccatactatctcaagcagggcaaggatcaggtgtcacacaaaacaagggggctgccttcatccacgagccgtcgctaacaccggagagtcgcaaagtttcgtctagcgccaagacaaccccacatcagggagacaacctgctgctaggaaaagaaattatccctgctccgcctaacgtggagacgccatcaggagcccacaacacccctggtgccgacactctccgcctgctgcctctaaaactagcaagttcgcaggatgacgcttacagtgtgctagatggatctacaaacaagattgacaaaagtgttaccggaaaaaggtctcgcacatcaccttccaagaaggctgccaagaaactttttagagatgaagtcataaccaatgacgatgctactggttcttcatcggttaatgtcgaggctggcaagaatgagaaaggttccactgtttaccaacaaaggttgttgtcatgtgattatgctgttgtatatggcttcagtttacctgctgcagaaagattcatagcgttggcaaacaaagagacgcttattgcaggtggtcctttcgtgcttccccttgcacacaaacacaaagtgaaaattcttcctgctgattctgagcactctgcaatatttcagaccagtgagtgtagcttggtggattgcctaaagtacttcgctgtggtggagcatcttgacagctatcgttgtgaccgttgttggcacatcattgctgccaaatatctttctcttagatcaaaagttgatgaggaaaagttgcagggatatgttccccctggagtcactgccatgttcatcatcttcacgagcaacaaagcagctgattatcagtcagtgcccgaaggtaacacctcagttgtttctcatccaaataccagtggagacaaagatgtgattgttgaaagaacgcatctaagccttaactttgtaatacatattagccaagacccctcggcgcgcccgcactttcggctgaggcgccatgcgccccgcgcgtccgccactgccaattcgtcgctcttgactctggaagaggtggctcgtgctgctaaggggaagagggcacatacggttatgctcacccagttgctcgctttggcaagccatgctttggcagagaaaccaggcctgaacctaaggatctgtgggaagagccgataaacgctactatgtggagaccgtgttctgatcaaagggattggaaagcctcagagggaaccaatgggtacatcatgatcagtgcgaatggtggcataaaccagcaaagggttgcgatttgtaatgcagttacaatctctcggttgctcaatgcaactcttgtcctcccaaaattcttgtacagtaatgtgtggctggacaaaagtcagtttggcgatatatatcaggaggattattttatcaaatatctgaaatctgatattcagattgtaaaggatcttccagtagagctgcagtcattagacttggaggccatcggtagccttgttaatgatacaaatgtcatgaaagaggcaaagcccagtttatacgtaaaaaaaatactgccaattttactgagaaacagagttgttcactttataggatttggcaatcgcttatcttttgacccaataccttctgaccttcagagattgcgatgcagatgtaattttcacgctcttcgttttgtacacaaaattcaagaaactggtgcagttcttgtagagaggttgcatggccacagggcctcttcgtcacctttgaaggataatcttttaggccagtttgctatcaagtctgaccccagtacgaacaagagtgacgcatccaaatatctggctgttcatctccggtttgagattgatatggttgcatactcattgtgttactttggtggtggcaaagatgaggaagacgaactagaagcttatcgccaaattcactttcctgttctgtcagaactcaagaagacgacaaagttgccgtctgctgctttgttacggtctgaaggcaaatgtccccttgcacctgaagaggctgtgcttatgcttgctgctattggtttcaagcgcagcacaaatatatacattgcaggtgctgaaatttatggagggcaatataggatggctgcaataagtcgtctttatcctgctttagtaactaaagaaacccttctgtctccatcagagcttgaaccatttaggaacttctcatctcagttggcagccctagacttcattgcatgtgcagctgccgatgcatttgctatgactgacccaggaagtcaattctcttctcttgttcaaggttaccgcatgtactatggtggtgggaactttcccacaataaggccaaacaagcgccggctagccagcatacttgtgaagaatgccacgattgagtggaatgaatttgaaagtagagtaaggaaactcatacagcaaactaagcaagttcatgagaggcctgttgcaagaagcatatttagacatccacgatgtccagaatgcatgtgcagaacagagcactaatattttgatagtttcttgtatctataccaacagttgttttttcagaagaaagactaccaattagatcgccaaaggtagttcttttgtgctcccgctgaaatctggatagatctcttgcccttgaactactttggaatcaaactgtacaaaagaaaatataatgattgagcccttgtttgtatcagagaagcaatatagctgactagctcatcaattatcttactgctatggtctactgctaggcatcatgttggatttggggtatttggcagaactttgtctcatgtttgatggaagtagaccagggactaaattgattggggtcagctaaaccattctgtgaatgaaggtgcatcatctgcagctgactgtggaagtaatatgttgacaaaactgagcaacaacattcttattgttgcttgcctaaattctactcaggttaccattcaacaaatcaagctgccagagttctgccaaccttgtattgccatctccattgttgctatcgtgctccggctgaaatctgaatatatctgttgcccttgaactactttggaatcaaactgtaaaaaagaaaatacggtgattgggctcttgtttgtgtcagagaagcaatgtagctgactagctcatccattatcttactgctatggtctactgctaggcatcatgttggatttggagtatttggcagaacttcgtctcatgtttgatggaagtagaccagggactaaattttgcacctcgataacaatgctgccatatttttgattggggtcagctaaaccattctgtgaatgaaggtgcatcatctgcaggtgaatgtggaagtaatatgttgacctaactgagcaacaacattcttattgttgcttgcctcaattctactcgggttaccattcaacaaatcaggctgccagagttctgccaaccttgtattgccatcttcattgttgctatcgtgccaggtggcatcttgattccttttttaaccattcttttgttcattgtaccataagagacgcatatagttaggttttaagtttatcccaactgaaaggtttcattatcaacgagagaaatgttcctttttgtgcaatctttatatgtgctcatccaacggcacttgtatactaatgttttggctattttttttgtttccaaattttctttggcaatgccctgaaactgtgaatgaactcactcagactctgattcgcagagcgatgctcagaaccacctgatctctggtgttgtaatgaatgttgttggaaggcattttgtatggaaacctttggattgctagttacagttctgatctgaaataaagcctgatctccgggga

SEQ ID NO: 82029 - DNA, 3934 bp, Zea Mays
atggatggtggcagcgcacttccagctacaccggcctcacagccatcatcgaccatactatctcaagcagggcaaggatcaggtgtcacacaaaacaagggggctgccttcatccacgagccgtcgctaacaccggagagtcgcaaagtttcgtctagcgccaagacaaccccacatcagggagacaacctgctgctaggaaaagaaattatccctgctccgcctaacgtggagacgccatcaggagcccacaacacccctggtgccgacactctccgcctgctgcctctaaaactagcaagttcgcaggatgacgcttacagtgtgctagatggatctacaaacaagattgacaaaagtgttaccggaaaaaggtctcgcacatcaccttccaagaaggctgccaagaaactttttagagatgaagtcataaccaatgacgatgctactggttcttcatcggttaatgtcgaggctggcaagaatgagaaaggttccactgtttaccaacaaaggttgttgtcatgtgattatgctgttgtatatggcttcagtttacctgctgcagaaagattcatagcgttggcaaacaaagagacgcttattgcaggtggtcctttcgtgcttccccttgcacacaaacacaaagtgaaaattcttcctgctgattctgagcactctgcaatatttcagaccagtgagtgtagcttggtggattgcctaaagtacttcgctgtggtggagcatcttgacagctatcgttgtgaccgttgttggcacatcattgctgccaaatatctttctcttagatcaaaagttgatgaggaaaagttgcagggatatgttccccctggagtcactgccatgttcatcatcttcacgagcaacaaagcagctgattatcagtcagtgcccgaaggtaacacctcagttgtttctcatccaaataccagtggagacaaagatgtgattgttgaaagaacgcatctaagccttaactttgtaatacatattagccaagacccctcggcgcgcccgcactttcggctgaggcgccatgcgccccgcgcgtccgccactgccaattcgtcgctcttgactctggaagaggtggctcgtgctgctaaggggaagagggcacatacggttatgctcacccagttgctcgctttggcaagccatgctttggcagaggcagaaaccaggcctgaacctaaggatctgtgggaagagccgataaacgctactatgtggagaccgtgttctgatcaaagggattggaaagcctcagagggaaccaatgggtacatcatgatcagtgcgaatggtggcataaaccagcaaagggttgcgatttgtaatgcagttacaatctctcggttgctcaatgcaactcttgtcctcccaaaattcttgtacagtaatgtgtggctggacaaaagtcagtttggcgatatatatcaggaggattattttatcaaatatctgaaatctgatattcagattgtaaaggatcttccagtagagctgcagtcattagacttggaggccatcggtagccttgttaatgatacaaatgtcatgaaagaggcaaagcccagtttatacgtaaaaaaaatactgccaattttactgagaaacagagttgttcactttataggatttggcaatcgcttatcttttgacccaataccttctgaccttcagagattgcgatgcagatgtaattttcacgctcttcgttttgtacacaaaattcaagaaactggtgcagttcttgtagagaggttgcatggccacagggcctcttcgtcacctttgaaggataatcttttaggccagtttgctatcaagtctgaccccagtacgaacaagagtgacgcatccaaatatctggctgttcatctccggtttgagattgatatggttgcatactcattgtgttactttggtggtggcaaagatgaggaagacgaactagaagcttatcgccaaattcactttcctgttctgtcagaactcaagaagacgacaaagttgccgtctgctgctttgttacggtctgaaggcaaatgtccccttgcacctgaagaggctgtgcttatgcttgctgctattggtttcaagcgcagcacaaatatatacattgcaggtgctgaaatttatggagggcaatataggatggctgcaataagtcgtctttatcctgctttagtaactaaagaaacccttctgtctccatcagagcttgaaccatttaggaacttctcatctcagttggcagccctagacttcattgcatgtgcagctgccgatgcatttgctatgactgacccaggaagtcaattctcttctcttgttcaaggttaccgcatgtactatggtggtgggaactttcccacaataaggccaaacaagcgccggctagccagcatacttgtgaagaatgccacgattgagtggaatgaatttgaaagtagagtaaggaaactcatacagcaaactaagcaagttcatgagaggcctgttgcaagaagcatatttagacatccacgatgtccagaatgcatgtgcagaacagagcactaatattttgatagtttcttgtatctataccaacagttgttttttcagaagaaagactaccaattagatcgccaaaggtagttcttttgtgctcccgctgaaatctggatagatctcttgcccttgaactactttggaatcaaactgtacaaaagaaaatataatgattgagcccttgtttgtatcagagaagcaatatagctgactagctcatcaattatcttactgctatggtctactgctaggcatcatgttggatttggggtatttggcagaactttgtctcatgtttgatggaagtagaccagggactaaattgattggggtcagctaaaccattctgtgaatgaaggtgcatcatctgcagctgactgtggaagtaatatgttgacaaaactgagcaacaacattcttattgttgcttgcctaaattctactcaggttaccattcaacaaatcaagctgccagagttctgccaaccttgtattgccatctccattgttgctatcgtgctccggctgaaatctgaatatatctgttgcccttgaactactttggaatcaaactgtaaaaaagaaaatacggtgattgggctcttgtttgtgtcagagaagcaatgtagctgactagctcatccattatcttactgctatggtctactgctaggcatcatgttggatttggagtatttggcagaacttcgtctcatgtttgatggaagtagaccagggactaaattttgcacctcgataacaatgctgccatatttttgattggggtcagctaaaccattctgtgaatgaaggtgcatcatctgcaggtgaatgtggaagtaatatgttgacctaactgagcaacaacattcttattgttgcttgcctcaattctactcgggttaccattcaacaaatcaggctgccagagttctgccaaccttgtattgccatcttcattgttgctatcgtgccaggtggcatcttgattccttttttaaccattcttttgttcattgtaccataagagacgcatatagttaggttttaagtttatcccaactgaaaggtttcattatcaacgagagaaatgttcctttttgtgcaatctttatatgtgctcatccaacggcacttgtatactaatgttttggctattttttttgtttccaaattttctttggcaatgccctgaaactgtgaatgaactcactcagactctgattcgcagagcgatgctcagaaccacctgatctctggtgttgtaatgaatgttgttggaaggcattttgtatggaaacctttggattgctagttacagttctgatctgaaataaagcctgatctccgggga

SEQ ID NO: 82030 - DNA, 699 bp, Zea Mays
acgatttcatttccgaatcgatcccttccctttcggtcgccacctctagattacctcgcctcagctgtcaccgacggcgacgcgtttcttcgcgcagcgcgctgcgcctttaaaaactcccggagccggccagagaccacgagacagagcaggcacagagttcattcaccgccggctccttcatagttcattcccgaggcagagatgcagcggaacaactcgttcgggacgtcgtgggcggaccagtgggactacggcggcgacccgagcccgagggcgccgcgcgacggcggcgtgggggagaagaccaaggcggccgcggccaccggcatgaggaaggtgaaagagggcacgtcgcaggggttccagtggatcaaggacaagtgccagcggaagaacggcggcggcaacaagaagcagcagggctccgaggtccctgggtactgacccctcctgtcctcgtcacgtcagtgctgttgcttggcagacagcagaattttctaaattttttctcggttcttgctgttggtacgaatagtatactgcgtataggttgtgatctgatctcggtgctggttgcagttgtagagtagtttcatcgtacctgatatgtctccttgatactgaattggtcacttcgatatatataaaaggatatttataaacttgtatgttcctgctcgtatttttcatctagac

SEQ ID NO: 82031 - DNA, 188 bp, Zea Mays
actgtagttctcctgatgcgaaagtagaaagaacaaatggcagataattgtatcatgctacacgaaaaaggttgttatcttatacttgtgattgttgagtgatctagccagtatggaaaatattcatgtggtagaaacaataaagctgattgcaatgagaatttttctgtatttcacttgtgctgtca

SEQ ID NO: 82032 - DNA, 1004 bp, Zea Mays
atcgactggttttttttttctgaattgtgatgataggcgggcagcgctgagaaacggaagaggacacgaagcagaagcaaagaaaaaaagtaaaaccaagaaccgccgcctcgccgttcgagagaagggaagaggggggaaaaagatgctcgccagaaccatcggaggcgccgtccgaacccgcctcgcgccgtccctcgcgagccttctctgccgcggctacgcgtcccccgcctcctccgccgacgaccttgtcatcgacgaggacccgccgcgcgccgcctcgacgtccgttgccgccaccaccgtggcggccaccgtgccgaccctcctgcagccgcgggtgctcatctacgacggcgtctgtcacctctgccaccgcgctgcgctgaaagtcgcatcgtacctgcctcctccttactcggtcctgagttccttgctgatcgtccccaccccactgcgggatgcggtctatgattacattgcgaagaaccgctatgactggtttggcaaagatgatgagtgcattgtcaccaaggacaaggaaattctggagcgcttcattgaccgggaggaaatgcttggtggcggtcccagcaatagcttcttttgattgcattttttggctgtgttgatgtccacacttatactgtagggaagcggtgtaaataatcttcgcatccatccaggtactctgcagatagttttcttaactcctagaacttctgcattccacattaacgacaatgccgtcgatcacccgcagggtttctcagatcatgttggttccgatttgattgcaaaacgtgagctaattgatgtctaagattagaattttgtaatatgggttggtcgtcggtgtaaggcataggcatgaaggttacaggtgccttgatatgacatcatttcttttcgtacacctgctgtgtcgtgtatggggtactcctatttcgttcaaataactgcagtactaaatactatgctgagttgccgctcttatgatt

SEQ ID NO: 82033 - DNA, 3143 bp, Zea Mays
caacagcaaaacagcgaaacagtgcagagacaagctacaacaacctaccctaacaggccattccttccactgcacttcattcgatcctgagctatagctggctgcctgagctcgctccaagaagtgtatctatagtatagacactaggcttcgtgtggcgtgctcgagatatgcttgcagtgtcgccgtcgccggtgcggtgtgccgatgcggaggagtgcggcggaggaggcgccagcaaggaaatggaggagaccgccgtcgggcctgtgtccgactcggacctggatttcgacttcacggtcgacgacatagacttcggggacttcttcctcaggctagacgacggggatgacgcgctgccgggcctcgaggtcgaccctgccgagatcgtcttcgctgacttcgaggcaatcgccaccgccggcggcgatggcggcgtcacggaccaggaggtgcccagtgtcctgccctttgcggacgcggcgcacataggcgccgtggatccgtgttgtggtgtccttggcgaggacaacgacgcagcgtgcgcagacgtggaagaagggaaaggggagtgcgaccatgccgacgaggtagcagccgccggtaataataatagcgactccggtgaggccggctgtggaggagcctttgccggcgaaaaatcaccgtcgtcgacggcatcgtcgtcgcaggaggctgagagccggcgcaaggtgtccaagaagcactcccaagggaagaagaaagcaaaggtggattggacgccggagcttcaccggagattcgttcaggcggtggaggagctgggcatcgacaaggcggtgccgtccaggatcctcgagatcatggggatcgactccctcacgcggcataacatagccagccatctgcaggaagcacatgcttgcgagggaggtggaggcagcgacgtggacgacgcaccggcggccgatgtacgctgcccccagcggcgccgtgaagaggcccgactctaacgcgtggaccgtgccgaccatcggtttccctccgccggcggggacccctcctcgtccggtgcagcacttcgggaggccactgcacgtctggggccatccgagtccgacgccagcggtggagtcaccccgggtgccaatgtggcctcggcatctcgccccccgcgccccgccgccgccgccgtgggctccgccaccgccagctgacccggcgtcgttctggcaccatgcttacatgaggcaggggcctgctgcccatatgccagaccaggtggcggtgactccatgcgtggcagtgccaatggcagcagcgcgtttccctgctccacacgtgaggggttctttgccatggccacctccgatgtacagacctctcgttcctccagcactcgcaggcaagagccagcaagacgcgctgtttcagctacagatacagccatcaagcgagagcatagatgcagcaataggtgatgtcttaacgaagccgtggctgccgctgcccctcggactgaagcccccttcggtagacagtgtcatgggcgagctgcagaggcaaggcgtagcgaatgtgccgcaagcttgtggatgatccccggggctgcatagctgctagctcgtccctgcacgcagtgcaacaaaaggaatttgtcgacatgccttttatgttttgaattcccgtgaaccgtttatggagcactctcaactcgttcagggtcagatgaacagaacattataggagtacattctttgaggtttcaggtttgagggaaatcaacctgagtgcatccaagtacagtgtactgccacagtgccacgtcggaaaatgaagtcttgacccgaataacaagtattccctcgggttatttgtcgttttcgacaaggttcggatcaaacgtataaaattttgactataaataactatttatatgcaccgatttgttttaaaaattagttttataaaagtataaatatattaagagtttatttgtactttaacaacaaaaatattgctcaaaactatattttatagactgtatcgttgtcctaaacgacaactaataggatatgggagagagtatctcagattttagagttttttttgccaaaatgtatgtgaatgttacaagttagccaaaacttacgcctggttacccggttcctgtagggaaaacgataccgatacaggtggatagtaagtaattctatatcccctaatgtattttaatcagagtcgggattggatatggataattagaaacgagacgagtacggataaagggatcagatatttattcgggcagataaatgacggatacagatattatttagccagatacatgcggatactcaatacttgtcggataatatgtaaattggttattattcactcgaagaattcagttcacgcatatgacgattacaccatgagcattgcatagaccataaatcaacatgacgatataacaataagttaagatcatacgtagtcccacacaatagtttgaatggaatgacaacattccaatcacacaatcgtctaatacaacacatgatagttttctaacgatataagatctaatataatacaagatagtccaatacatgtgatatatagtctattaataagctatagagtattggagttacacatatgatgtatattttgttactttgatatatatttgaacattatttttgttgggggcctttgtcctccgaaggtcctcaaaaatacgactaacatgtttttcaagtataatacatgtacaggaaccttcgtacatgggatgaagttgtgcatgatatgaagagcgcggttcgggagaaggatcaaccagtgccgaagctacccatgagaaagcttcggattagcggtgaaaaatgaaaccgacttaaaggggaaaaggttgtctagtccttgatagattatccctgagtcaatagtaaatgtcaagggcatgaatgtaattctatacaggctgcgtcatgtgcctataaatagatgaacagtgacaccgtactgttcatgctgacttgtattcactcgtgcgtcacgcttggatttttaccttctgtcaagccgatggtataaatgtaattcaatattgttcatgtttattcatgattagataataaaaatgttttgat

SEQ ID NO: 82034 - DNA, 3160 bp, Zea Mays
caacagcaaaacagcgaaacagtgcagagacaagctacaacaacctaccctaacaggccattccttccactgcacttcattcgatcctgagctatagctggctgcctgagctcgctccaagaagtgtatctatagtatagacactaggcttcgtgtggcgtgctcgagatatgcttgcagtgtcgccgtcgccggtgcggtgtgccgatgcggaggagtgcggcggaggaggcgccagcaaggaaatggaggagaccgccgtcgggcctgtgtccgactcggacctggatttcgacttcacggtcgacgacatagacttcggggacttcttcctcaggctagacgacggggatgacgcgctgccgggcctcgaggtcgaccctgccgagatcgtcttcgctgacttcgaggcaatcgccaccgccggcggcgatggcggcgtcacggaccaggaggtgcccagtgtcctgccctttgcggacgcggcgcacataggcgccgtggatccgtgttgtggtgtccttggcgaggacaacgacgcagcgtgcgcagacgtggaagaagggaaaggggagtgcgaccatgccgacgaggtagcagccgccggtaataataatagcgactccggtgaggccggctgtggaggagcctttgccggcgaaaaatcaccgtcgtcgacggcatcgtcgtcgcaggaggctgagagccggcgcaaggtgtccaagaagcactcccaagggaagaagaaagcaaaggtggattggacgccggagcttcaccggagattcgttcaggcggtggaggagctgggcatcgacaaggcggtgccgtccaggatcctcgagatcatggggatcgactccctcacgcggcataacatagccagccatctgcagaagtaccgttcccacaggaagcacatgcttgcgagggaggtggaggcagcgacgtggacgacgcaccggcggccgatgtacgctgcccccagcggcgccgtgaagaggcccgactctaacgcgtggaccgtgccgaccatcggtttccctccgccggcggggacccctcctcgtccggtgcagcacttcgggaggccactgcacgtctggggccatccgagtccgacgccagcggtggagtcaccccgggtgccaatgtggcctcggcatctcgccccccgcgccccgccgccgccgccgtgggctccgccaccgccagctgacccggcgtcgttctggcaccatgcttacatgaggcaggggcctgctgcccatatgccagaccaggtggcggtgactccatgcgtggcagtgccaatggcagcagcgcgtttccctgctccacacgtgaggggttctttgccatggccacctccgatgtacagacctctcgttcctccagcactcgcaggcaagagccagcaagacgcgctgtttcagctacagatacagccatcaagcgagagcatagatgcagcaataggtgatgtcttaacgaagccgtggctgccgctgcccctcggactgaagcccccttcggtagacagtgtcatgggcgagctgcagaggcaaggcgtagcgaatgtgccgcaagcttgtggatgatccccggggctgcatagctgctagctcgtccctgcacgcagtgcaacaaaaggaatttgtcgacatgccttttatgttttgaattcccgtgaaccgtttatggagcactctcaactcgttcagggtcagatgaacagaacattataggagtacattctttgaggtttcaggtttgagggaaatcaacctgagtgcatccaagtacagtgtactgccacagtgccacgtcggaaaatgaagtcttgacccgaataacaagtattccctcgggttatttgtcgttttcgacaaggttcggatcaaacgtataaaattttgactataaataactatttatatgcaccgatttgttttaaaaattagttttataaaagtataaatatattaagagtttatttgtactttaacaacaaaaatattgctcaaaactatattttatagactgtatcgttgtcctaaacgacaactaataggatatgggagagagtatctcagattttagagttttttttgccaaaatgtatgtgaatgttacaagttagccaaaacttacgcctggttacccggttcctgtagggaaaacgataccgatacaggtggatagtaagtaattctatatcccctaatgtattttaatcagagtcgggattggatatggataattagaaacgagacgagtacggataaagggatcagatatttattcgggcagataaatgacggatacagatattatttagccagatacatgcggatactcaatacttgtcggataatatgtaaattggttattattcactcgaagaattcagttcacgcatatgacgattacaccatgagcattgcatagaccataaatcaacatgacgatataacaataagttaagatcatacgtagtcccacacaatagtttgaatggaatgacaacattccaatcacacaatcgtctaatacaacacatgatagttttctaacgatataagatctaatataatacaagatagtccaatacatgtgatatatagtctattaataagctatagagtattggagttacacatatgatgtatattttgttactttgatatatatttgaacattatttttgttgggggcctttgtcctccgaaggtcctcaaaaatacgactaacatgtttttcaagtataatacatgtacaggaaccttcgtacatgggatgaagttgtgcatgatatgaagagcgcggttcgggagaaggatcaaccagtgccgaagctacccatgagaaagcttcggattagcggtgaaaaatgaaaccgacttaaaggggaaaaggttgtctagtccttgatagattatccctgagtcaatagtaaatgtcaagggcatgaatgtaattctatacaggctgcgtcatgtgcctataaatagatgaacagtgacaccgtactgttcatgctgacttgtattcactcgtgcgtcacgcttggatttttaccttctgtcaagccgatggtataaatgtaattcaatattgttcatgtttattcatgattagataataaaaatgttttgat

SEQ ID NO: 82035 - DNA, 3162 bp, Zea Mays
ggcaccaacagcaaaacagcgaaacagtgcagagacaagctacaacaacctaccctaacaggccattccttccactgcacttcattcgatcctgagctatagctggctgcctgagctcgctccaagaagtgtatctatagtatagacactaggcttcgtgtggcgtgctcgagatatgcttgcagtgtcgccgtcgccggtgcggtgtgccgatgcggaggagtgcggcggaggaggcgccagcaaggaaatggaggagaccgccgtcgggcctgtgtccgactcggacctggatttcgacttcacggtcgacgacatagacttcggggacttcttcctcaggctagacgacggggatgacgcgctgccgggcctcgaggtcgaccctgccgagatcgtcttcgctgacttcgaggcaatcgccaccgccggcggcgatggcggcgtcacggaccaggaggtgcccagtgtcctgccctttgcggacgcggcgcacataggcgccgtggatccgtgttgtggtgtccttggcgaggacaacgacgcagcgtgcgcagacgtggaagaagggaaaggggagtgcgaccatgccgacgaggtagcagccgccggtaataataatagcgactccggtgaggccggctgtggaggagcctttgccggcgaaaaatcaccgtcgtcgacggcatcgtcgtcgcaggaggctgagagccggcgcaaggtgtccaagaagcactcccaagggaagaagaaagcaaaggtggattggacgccggagcttcaccggagattcgttcaggcggtggaggagctgggcatcgacaaggcggtgccgtccaggatcctcgagatcatggggatcgactccctcacgcggcataacatagccagccatctgcagaagtaccgttcccacaggaagcacatgcttgcgagggaggtggaggcagcgacgtggacgacgcaccggcggccgatgtacgctgcccccagcggcgccgtgaagaggcccgactctaacgcgtggaccgtgccgaccatcggtttccctccgccggcggggacccctcctcgtccggtgcagcacttcgggaggccactgcacgtctggggccatccgagtccgacgccagcggtggagtcaccccgggtgccaatgtggcctcggcatctcgccccccgcgccccgccgccgccgccgtgggctccgccaccgccagctgacccggcgtcgttctggcaccatgcttacatgagggggcctgctgcccatatgccagaccaggtggcggtgactccatgcgtggcagtgccaatggcagcagcgcgtttccctgctccacacgtgaggggttctttgccatggccacctccgatgtacagacctctcgttcctccagcactcgcaggcaagagccagcaagacgcgctgtttcagctacagatacagccatcaagcgagagcatagatgcagcaataggtgatgtcttaacgaagccgtggctgccgctgcccctcggactgaagcccccttcggtagacagtgtcatgggcgagctgcagaggcaaggcgtagcgaatgtgccgcaagcttgtggatgatccccggggctgcatagctgctagctcgtccctgcacgcagtgcaacaaaaggaatttgtcgacatgccttttatgttttgaattcccgtgaaccgtttatggagcactctcaactcgttcagggtcagatgaacagaacattataggagtacattctttgaggtttcaggtttgagggaaatcaacctgagtgcatccaagtacagtgtactgccacagtgccacgtcggaaaatgaagtcttgacccgaataacaagtattccctcgggttatttgtcgttttcgacaaggttcggatcaaacgtataaaattttgactataaataactatttatatgcaccgatttgttttaaaaattagttttataaaagtataaatatattaagagtttatttgtactttaacaacaaaaatattgctcaaaactatattttatagactgtatcgttgtcctaaacgacaactaataggatatgggagagagtatctcagattttagagttttttttgccaaaatgtatgtgaatgttacaagttagccaaaacttacgcctggttacccggttcctgtagggaaaacgataccgatacaggtggatagtaagtaattctatatcccctaatgtattttaatcagagtcgggattggatatggataattagaaacgagacgagtacggataaagggatcagatatttattcgggcagataaatgacggatacagatattatttagccagatacatgcggatactcaatacttgtcggataatatgtaaattggttattattcactcgaagaattcagttcacgcatatgacgattacaccatgagcattgcatagaccataaatcaacatgacgatataacaataagttaagatcatacgtagtcccacacaatagtttgaatggaatgacaacattccaatcacacaatcgtctaatacaacacatgatagttttctaacgatataagatctaatataatacaagatagtccaatacatgtgatatatagtctattaataagctatagagtattggagttacacatatgatgtatattttgttactttgatatatatttgaacattatttttgttgggggcctttgtcctccgaaggtcctcaaaaatacgactaacatgtttttcaagtataatacatgtacaggaaccttcgtacatgggatgaagttgtgcatgatatgaagagcgcggttcgggagaaggatcaaccagtgccgaagctacccatgagaaagcttcggattagcggtgaaaaatgaaaccgacttaaaggggaaaaggttgtctagtccttgatagattatccctgagtcaatagtaaatgtcaagggcatgaatgtaattctatacaggctgcgtcatgtgcctataaatagatgaacagtgacaccgtactgttcatgctgacttgtattcactcgtgcgtcacgcttggatttttaccttctgtcaagccgatggtataaatgtaattcaatattgttcatgtttattcatgattagataataaaaatgttttgat

SEQ ID NO: 82036 - DNA, 361 bp, Zea Mays
gggagcaggcggcggctgggaggatggcaggggagagagggagaagagggagcaggcggcggctgggaggatggcaggggcggcagccacagggaaaatggcggctagggttaggatgttgggcctaatgggccttaggttagttagttttttttcttttttttttcttttcaaatttcgaaatacagattaaataaccctaaaattcttaatgtttaaaccaaaactatttataaaatatttatttttggaactaataattatattattaatttactaggattttcatttaacaagaaatgctattcaatgaccaaaatcaatcatgagcattccaaaaattattccaaatgaaataaat

SEQ ID NO: 82037 - DNA, 1842 bp, Zea Mays
gaatacgtctctctagtgttttggcgtaggaattaattacacgtgagtggttggcttaaaagcctaaacctgtgtcctgtaaccggtgaatttagatcaggattcaggaatagaaaaagaaaaagaatggacagcttgttgctcaagttgttcacccacctccactccacctgtgtgtgtgtgtttcacgtcccggcggaacttgccggcggacacgcgtcgtcacagccgaccaacggcgcttgcccgttcccccatcccccttgattcctccgccagcccagcggcggccactctccacgcatctgcatccgcatggctctccacgccgcggcgccggcctgcgcggtgttctgccgcctcccgtcgccctccccatctcacgccggcagcagacgctcccttcccgccgtcgcgagtccccgcggcgttgtctctgccgcgccgctacggacacgcgcagttccaacaaaggcgatcgtaaacagtgatggcatccctgaaacgagtgattctccacatgtggtttgctttggtgaattgctaattgacttcgtcccaactgtcaatggcgtgtcactggcagaagcacctgcctttaagaaggctcctgggggagcacctgccaatgttgcagttggaatagctcgccttggtggctcgtcagctttcattggaaaggttggtgatgatgaatttggctacatgctagctgacatattgaagcagaataatgtcaataatcaaggattgctgtttgatcctcatgctagaacagctttggcgtttgtgtcactccgaagtgatggtgaacgcgaatttatgttctatcgtaatccaagtgctgatatgctacttgaagaaaaagaacttgatcttgatcttatacggaaggcaaagatattccaccatggctcaataagtcttataactgagccctgtaaaactgcacatattgcagctgccagagctgctaaagatgctggagtacttgtttcatatgatccaaatttgaggctttcattgtggtcatcacctgaggatgctagagatggtatcctgagcgtatggagaactgctgatattttcaaggtaagtgaagaggaggtttcctttctcacaaatggagaggatccttatgatgatgccgttgtaaagaaacttatgcactcaaacctgaagttgcttcttgtcactgaaggtccagacggctgtaggtattactctaaggtaatcctacagttatgatgtagagggattttagtggtagagttggtggacttaaggtaagtgctgttgacacaactggtgctggcgatgcctttgttgctggagtgctatctcaattagccacagacttttctctgctccaggatgaaggtcggttgagagaagccctgaagttcgcaaacgtctgtggagctctcaccgtgacacagagaggcgctattcctgcgctgcccacccgacaacaagtgcttgatgccctgaccaattttgttgcttgaaagtagccgtgcacacctacttgtgtattgtaatgctgaccgcctgagcgccatgtcgatagattacaggcgtgatttcgcttgcataccacttggcatttttgttggtgcgtaccaaagccccccagccaaaccaagtactcggtggaagaggttgtttcccgtcggattttgatgtgtgaagttgtgtgttggggacgttgggttaacactttgtggacgtgtgtgatgtgtgtgctgatgttgtaatgctgctggggagaacatgacacagcggagcagttttggtacctgaaaacatgagctatgaatgagtgattcagttattgggccc

SEQ ID NO: 82038 - DNA, 1707 bp, Zea Mays
gaatacgtctctctagtgttttggcgtaggaattaattacacgtgagtggttggcttaaaagcctaaacctgtgtcctgtaaccggtgaatttagatcaggattcaggaatagaaaaagaaaaagaatggacagcttgttgctcaagttgttcacccacctccactccacctgtgtgtgtgtgtttcacgtcccggcggaacttgccggcggacacgcgtcgtcacagccgaccaacggcgcttgcccgttcccccatcccccttgattcctccgccagcccagcggcggccactctccacgcatctgcatccgcatggctctccacgccgcggcgccggcctgcgcggtgttctgccgcctcccgtcgccctccccatctcacgccggcagcagacgctcccttcccgccgtcgcgagtccccgcggcgttgtctctgccgcgccgctacggacacgcgcagttccaacaaaggcgatcgtaaacagtgatggcatccctgaaacgagtgattctccacatgtggtttgctttggtgaattgctaattgacttcgtcccaactgtcaatggcgtgtcactggcagaagcacctgcctttaagaaggctcctgggggagcacctgccaatgttgcagttggaatagctcgccttggtggctcgtcagctttcattggaaaggttggtgatgatgaatttggctacatgctagctgacatattgaagcagaataatgtcaataatcaaggattgctgtttgatcctcatgctagaacagctttggcgtttgtgtcactccgaagtgatggtgaacgcgaatttatgttctatcgtaatccaagtgctgatatgctacttgaagaaaaagaacttgatcttgatcttatacggaaggcaaagatattccaccatggctcaataagtcttataactgagccctgtaaaactgcacatattgcagctgccagagctgctaaagatgctggagtacttgtttcatatgatccaaatttgaggctttcattgtggtcatcacctgaggatgctagagatggtatcctgagcgtatggagaactgctgatattttcaaggtccagacggctgtaggtattactctaaggattttagtggtagagttggtggacttaaggtaagtgctgttgacacaactggtgctggcgatgcctttgttgctggagtgctatctcaattagccacagacttttctctgctccaggatgaaggtcggttgagagaagccctgaagttcgcaaacgtctgtggagctctcaccgtgacacagagaggcgctattcctgcgctgcccacccgacaacaagtgcttgatgccctgaccaattttgttgcttgaaagtagccgtgcacacctacttgtgtattgtaatgctgaccgcctgagcgccatgtcgatagattacaggcgtgatttcgcttgcataccacttggcatttttgttggtgcgtaccaaagccccccagccaaaccaagtactcggtggaagaggttgtttcccgtcggattttgatgtgtgaagttgtgtgttggggacgttgggttaacactttgtggacgtgtgtgatgtgtgtgctgatgttgtaatgctgctggggagaacatgacacagcggagcagttttggtacctgaaaacatgagctatgaatgagtgattcagttattgggccc

SEQ ID NO: 82039 - DNA, 1693 bp, Zea Mays
gaatacgtctctctagtgttttggcgtaggaattaattacacgtgagtggttggcttaaaagcctaaacctgtgtcctgtaaccggtgaatttagatcaggattcaggaatagaaaaagaaaaagaatggacagcttgttgctcaagttgttcacccacctccactccacctgtgtgtgtgtgtttcacgtcccggcggaacttgccggcggacacgcgtcgtcacagccgaccaacggcgcttgcccgttcccccatcccccttgattcctccgccagcccagcggcggccactctccacgcatctgcatccgcatggctctccacgccgcggcgccggcctgcgcggtgttctgccgcctcccgtcgccctccccatctcacgccggcagcagacgctcccttcccgccgtcgcgagtccccgcggcgttgtctctgccgcgccgctacggacacgcgcagaagcacctgcctttaagaaggctcctgggggagcacctgccaatgttgcagttggaatagctcgccttggtggctcgtcagctttcattggaaaggttggtgatgatgaatttggctacatgctagctgacatattgaagcagaataatgtcaataatcaaggattgctgtttgatcctcatgctagaacagctttggcgtttgtgtcactccgaagtgatggtgaacgcgaatttatgttctatcgtaatccaagtgctgatatgctacttgaagaaaaagaacttgatcttgatcttatacggaaggcaaagatattccaccatggctcaataagtcttataactgagccctgtaaaactgcacatattgcagctgccagagctgctaaagatgctggagtacttgtttcatatgatccaaatttgaggctttcattgtggtcatcacctgaggatgctagagatggtatcctgagcgtatggagaactgctgatattttcaaggtaagtgaagaggaggtttcctttctcacaaatggagaggatccttatgatgatgccgttgtaaagaaacttatgcactcaaacctgaagttgcttcttgtcactgaaggtccagacggctgtaggtattactctaaggattttagtggtagagttggtggacttaaggtaagtgctgttgacacaactggtgctggcgatgcctttgttgctggagtgctatctcaattagccacagacttttctctgctccaggatgaaggtcggttgagagaagccctgaagttcgcaaacgtctgtggagctctcaccgtgacacagagaggcgctattcctgcgctgcccacccgacaacaagtgcttgatgccctgaccaattttgttgcttgaaagtagccgtgcacacctacttgtgtattgtaatgctgaccgcctgagcgccatgtcgatagattacaggcgtgatttcgcttgcataccacttggcatttttgttggtgcgtaccaaagccccccagccaaaccaagtactcggtggaagaggttgtttcccgtcggattttgatgtgtgaagttgtgtgttggggacgttgggttaacactttgtggacgtgtgtgatgtgtgtgctgatgttgtaatgctgctggggagaacatgacacagcggagcagttttggtacctgaaaacatgagctatgaatgagtgattcagttattgggccc

SEQ ID NO: 82040 - DNA, 1803 bp, Zea Mays
gaatacgtctctctagtgttttggcgtaggaattaattacacgtgagtggttggcttaaaagcctaaacctgtgtcctgtaaccggtgaatttagatcaggattcaggaatagaaaaagaaaaagaatggacagcttgttgctcaagttgttcacccacctccactccacctgtgtgtgtgtgtttcacgtcccggcggaacttgccggcggacacgcgtcgtcacagccgaccaacggcgcttgcccgttcccccatcccccttgattcctccgccagcccagcggcggccactctccacgcatctgcatccgcatggctctccacgccgcggcgccggcctgcgcggtgttctgccgcctcccgtcgccctccccatctcacgccggcagcagacgctcccttcccgccgtcgcgagtccccgcggcgttgtctctgccgcgccgctacggacacgcgcagttccaacaaaggcgatcgtaaacagtgatggcatccctgaaacgagtgattctccacatgtggtttgctttggtgaattgctaattgacttcgtcccaactgtcaatggcgtgtcactggcagaagcacctgcctttaagaaggctcctgggggagcacctgccaatgttgcagttggaatagctcgccttggtggctcgtcagctttcattggaaaggttggtgatgatgaatttggctacatgctagctgacatattgaagcagaataatgtcaataatcaaggattgctgtttgatcctcatgctagaacagctttggcgtttgtgtcactccgaagtgatggtgaacgcgaatttatgttctatcgtaatccaagtgctgatatgctacttgaagaaaaagaacttgatcttgatcttatacggaaggcaaagatattccaccatggctcaataagtcttataactgagccctgtaaaactgcacatattgcagctgccagagctgctaaagatgctggagtacttgtttcatatgatccaaatttgaggctttcattgtggtcatcacctgaggatgctagagatggtatcctgagcgtatggagaactgctgatattttcaaggtaagtgaagaggaggtttcctttctcacaaatggagaggatccttatgatgatgccgttgtaaagaaacttatgcactcaaacctgaagttgcttcttgtcactgaaggtccagacggctgtaggattttagtggtagagttggtggacttaaggtaagtgctgttgacacaactggtgctggcgatgcctttgttgctggagtgctatctcaattagccacagacttttctctgctccaggatgaaggtcggttgagagaagccctgaagttcgcaaacgtctgtggagctctcaccgtgacacagagaggcgctattcctgcgctgcccacccgacaacaagtgcttgatgccctgaccaattttgttgcttgaaagtagccgtgcacacctacttgtgtattgtaatgctgaccgcctgagcgccatgtcgatagattacaggcgtgatttcgcttgcataccacttggcatttttgttggtgcgtaccaaagccccccagccaaaccaagtactcggtggaagaggttgtttcccgtcggattttgatgtgtgaagttgtgtgttggggacgttgggttaacactttgtggacgtgtgtgatgtgtgtgctgatgttgtaatgctgctggggagaacatgacacagcggagcagttttggtacctgaaaacatgagctatgaatgagtgattcagttattgggccc

SEQ ID NO: 82041 - DNA, 4176 bp, Zea Mays
agctcccataatatgaccccatagctgaagacgtcacatctgaaaacaagcgcataatgcattcatcaattacaaccatttggaatcaaagagagcaacatgtaaaacctacttctcatctgatggttcatttcgaagtatttctggtgccatccactccgcctgcatttgatgtgcagtgcaaccagttagcagcctctagaactatttagcctaaatcagagttttgggctaagcaaattaatcacgtatgcaaaaaattataaaagacttgatatggtattgtcaaagttctgtgttctaacagtaacaggtacaagaaaaaaaatcaggaaccagctaaatattgtaaatttttcagaatctaaaaaccctctccagtctatgtctcatacccgtgcccacatggatacaaatatagtttgtaaagtagtatacacatgcaaatacagtttgtaaaattatagcataatcaaaagacaaaccacacatgcaagttcagactgatatcaaacaaagtaaattatgaattttatacaggtttccagacctgtccaatattcgattaccccaagccccaacccctcaagctacactacttaatatctgtgcaaatgtttcaaaatctaacactcctcaatccatttcatcctcatacccacgtgaatgcaaatatagtatgtaaaccatggtgtgatcaataaatgattcaaatgtgcaagtttagtttgatatcaagataaaatgaattatgagttgaaatataggcttctagaccaggccaacaagattgcatgccccaacccacacataacgatttgaaaaaaaaaaactgatgtggaagtggtggacaactcactaattgtcagatggctgattggtgggaagcctctggcagattggcatacctgttcaggacatcaaaacctagtgacaagtgttggggttgatctcatccagttcggccaagggaccgagccggagtctatcctcgtgccctggtcaggggcgcaacaaacttatggttgcggcctcctttcaccgcatacataaattgggatccaagatcctgggaggagtgattttgaccgcgtggtgcatctcaagtattcatgtgatgagaggggggaagtcagtccttgtgctaggccatctagcagctgttgggggtccagtggttcacctcaaggcccaggagggaaggcctctcaattggccgaggtaggatcccatccaacgtcattgagcccaaactgttttcatctttattgtcgtgtcgccccgccaagtgagaggggatcgtccagggacattcccatatcacacacaacagggtgatcaatctcgggacttgtgtgcctcgccagatcagaggattcgagggaccggacgcttcgattttgtcggacgccacccaaagcatcatctacattggtcaccaatgattgggatgagggccatgcacatgcaataattccttggccaactgacattggtgccccaaatgagagcgcacaggggcacgcgagccaccaatccccaaagcagggtcgccattattgtcttcttaaatagagttgccgcctggatgttcgagccggcaccgccacctcctgtgtcatcgtccactaccacccggagatggaggaccttcccgactcgatgagacgacgactatggtggcaaggaggtgacgatgctgatagagtaggacagtgtgcgcaccactagcgattctttaaccacagtgacgcatggctccacgacaagtagttccaccacctccaaaatgagctaaggacgtgaacaccatgctcgaagccggagagtgtcacgtaagtcagcaacattaggattgatcccccgatcgagcactcattaccgagaataagggccatcgtttccaacctccacacatgagctagggtccctttgagctcaacctccacagtccatgaaagagcaactacagtcgacttgaagaagcgagtccagcgggtgagccacaacctaaccacagaggtgataactgactgccggcgttgaagactcgggccaccattgcaccatcaagaagggagagttctgtctccaagatgcaacaaaaattcatgtcttctgccgcaaggttaaacctcttgcctagagcagtggctatagactccacaggggtagtcgcgagaccacccaccaccgtgatgatgacttgataagaacgtgacatgtgttgtcttcagcaccatcgatgtctgtcgagcgatgaagtatgcatcgggggtcttctaatagagatttttttctcgaaaaacgcaggagagttcgcatcatttcattaaaagagggagaaaataaaggtgtacaaccgagaacacacaccccacacccacaatctttgccctaaggtagtctaagaagcatgagcaaccatgaaaatttctgactaaacggcgaccaaaaaacacatcctactatccacctacatcatcctcggttgtgaggatggttaagcccttcgccccatccatgctccaatggcacaattcatctccaaccacgactaaaattgttggcaagcttagtgctttcatattgaacacacaatcatttctatgcttccatatggtccaagctcctaagataactagggaattgagccacttttacgtgtaggattcattgacttaagagttgcctctatgccgaaattgtcggagttgggggagtcagctggtggtgggggagggccacctgagctcgataaccggcgacaagagcgacgtcgacgcggtcgcccaccgccagcactctcaataaaccttccccgctagtgtcacgacacctccgcgatccaatgaccggatcattgaatatctcaacggggctacgcaccgactgactgcccgccactacaagcgcctttctaggggtgcatggagcggacagacaacaacacagtggctcgccttgcagcaccggaagcactaggtgcgctgacagcaggcgccaactcggtgatctcttgagaaacagttgaaacacttccctcagaggtcttctggtgtcgagagcctaggttgccgcaacgttcggaggtaccggcagcgagctcaacgactcacgtaaatttgccccctggatcgtcctcaacggtgtgtctcacttgctcgatagtgggtggcttagggacgctgtcgggggatagaaatggggctggagtcccactgctgctccttggacctgcctactaggagcagaggcgcagagggactctgttccagtgtctccacaaggatggtggctgagtgcgctggtctcactgttttgggggtggccaccgggtctggagtggactccagggtgaggctgagtgagatggaagcgcctgggcacgatggtggaaaagggagggaggcaggcaagacgacacacatcacaaggccctatagattatttcattaatgaaagcatagattgtagccgaaggagacaacataatagagcaaattaccaattctacctaaactagggactctttaggataacttgttggtgggtgtacgggagggcacgcctaggggtgtggcgtccctatctcaggctcagccagggcaaccgtagcactgacgctcgcctcagtggccctgttggatggctaggctgccctagattgttggctaccgccaaggcccgcaacacttgtataggtcaacactcggttctcttagacctcatacatgcaaataggaccatctattctctcttaatgcaaagatacacaactctcatgtgtgttcaagaaaaagaatatatgcaaataggatcgagcaacaattattatgtttgattatctgccttggattcaaacttgaaatctattgtcacatgaaccaaccaatttttcaacccaaaagcttaaactgatgggaagcggtagatgagtcacttatatacttcaacatcaattacttccctactatggggtatgtatggtattatcctatacatatttgcatcaacatgatataaatgtgttttacaataaggtatagtagatataaatgtgcttccaagaacaagtttcttattataacaactggaaatgtttgatttaacattattgtgcaagcttactgttccagctgcggatcttgacgaaaggaaggtactatgtttcag

SEQ ID NO: 82042 - DNA, 1141 bp, Zea Mays
gttactaatcactcatcataaattggaatcacgataacatatatcaaccttatgtttgcaaaagtaggtttaacatttttcctaccgcaaagaatgatcattcttagtacaaagggcataattttcttttgtaatctacctgtcaattaaaagcagatttgttgagacgtgatatacacaagggtgagccaaccttttcatagtaaaacattacaatttgatggggccttaaagatggaatagttttccattagttcgaggactagcaaaaataaggcctaactgaacagaagacgatgatcctgttacaacatgacatgtcaacttctgactccagtaaccattgtgtctgcaaaaatagtatgcacgaactttcacaaattttcttttccctttcttttctttggcttcatggatctgtgttatttgggtcggctttcatcagatagatatagacagcattccgctggctccaatggagaaccaaacgctgaaggcaaaaggaccaaaattcacctgttcttcatcaaatacgcatttggcgtactgtacaaaacaatggtaatagttacagatggccaattgcttgaagctgggaaggcaagagcaagacaaaccaatgcagtctctctttggcctgtgtcttcagctgatactgaccaatatattcttaatcatctgtttgttgtgcccgcttcctggtaggttggttggcaggcatgttttttaacaatggtctcaaagtagccatgatctctgaaaatgatggccgcatccttggatcactgcacgaaacagtaaatctaacataattgagacaacatgtaaagggtgcataaaagatcggtaaagacaagaaaaataccacggttcaatttaaagaggatgaaattaattttttttaaaaatctacatgttatttcaagtaataaagaaaatattctgttttatctcttcacatacagttcagttttttttttcaaaggataattcagtgaagcataaactgaatgtggatcgtgagtagtcttctttgctgcaacaatttcacagtagtaataacatgacaaactttaccgaattatgagttaacatcgtaaaaaaaaaattcaaaactccgttgcagcttagcaagttaaag

SEQ ID NO: 82043 - DNA, 1699 bp, Zea Mays
tacaaaaccactcggcctggatctggagcagagagaagggacgcgaggactctctttgagatttcacgatcctcacgaaaccgcctttccgctacctacaaaaccccaaggcctgcaatcctgcatctgggttttggaaaggaaaccctcgccctacctattcgtgggaaccggccatctcatgatccgtcacccagcagcttcttacccacttcttcgccgtttactgcagcaaacatctgatttgggagattatgggtgctatttcctatctctcatcttatctatcgcatgacaggtaaatctgcggcgccctcgattgtcgattcggccgggggtgcagaaatccgatgataacctattattccagattccatgaagtgcgcgtgaaagttacaaacatatctcgaggaatcagctttctaaagcacgcgttctgacttctgagttactttgttttggtatgtttcttggtgatattgactattgagggcctggatctatgcgctcgtagaaatgcctaatctcttgtaaataggttgtggtttcaacctcatttccgagctgactagatggtcgatttatttttatgggggctattctaatccgtcagcctgatgattagcattctttgcacaaaaaacggagatctgaatgtgctttccgtcgaagcctgcttgaccgctgtggtgggtcatgtgagctcagctcgttgatctccctgactactacctccgtggctccgttccaaattataagtaattttctctcagggaaactaccagctactacacacacatgcatgcatctatctgtctatctatatatatatatatatcctcgcccttcttccaccactgactggctgagcaggctccgggagatgcatatgtagatgcaagagttatgaaggctatcccagattggattgcggtgcctaaattcatttttaacttgtttaacgagttctttatcactatctgaaaagctgttcctattatagagtactgcaatgcaccgtggtctgcttgtgatttggtcagcatcacattaatgattttgctttagcttgactgatattcgaggtacaaaatgcagtatttaaccctatggacaaaactggaagattatgtgaattaaagaaagttgcatctgctgtgctcctggttcatgggggcacaatggcatgatgactatctaggggaatctctgatgctaatgctaatacaaattttcttatctagcttacacggtggataggttaatgcgtgtagaaccatgctagtgatagatatcctttgaacctggagtaaagcattttatatgcttatttacggccataaaagttttctggcatctcatatgtgactgagataagccattttagcttgggtgttggttgcctggaattaagtcactatctgttgatcctttcctttcagaaacatgtttggtttgtgtgttgtcatatttttgccacttcaccgcataagaaaaatgtcagatagtgagaagattgaagaaagacaagaacatctgcagtgttgccaattcaatcttgcgatgcaaaagtatgatgacttggggaatctacagcaatctttttggaagagttatgttttgagtctgcatgagttgccatcacaacaattgactgcatgaaaacagtaatagcaagaaacaggacaaggacatcttc

SEQ ID NO: 82044 - DNA, 1667 bp, Zea Mays
tacaaaaccactcggcctggatctggagcagagagaagggacgcgaggactctctttgagatttcacgatcctcacgaaaccgcctttccgctacctacaaaaccccaaggcctgcaatcctgcatctgggttttggaaaggaaaccctcgccctacctattcgtgggaaccggccatctcatgatccgtcacccagcagcttcttacccacttcttcgccgtttactgcagcaaacatctgatttgggagattatgggtgctatttcctatctctcatcttatctatcgcatgacaggtaaatctgcggcgccctcgattgtcgattcggccgggggtgcagaaatccgatgataacctattattccagattccatgaagtgcgcgtgaaagttacaaacatatctcgaggaatcagctttctaaagcacgcgttctgacttctgagttactttgttttggtatgtttcttggtgatattgactattgagggcctggatctatgcgctcgtagaaatgcctaatctcttgtaaataggttgtggtttcaacctcatttccgagctgactagatggtcgatttatttttatgggggctattctaatccgtcagcctgatgattagcattctttgcacaaaaaacggagatctgaatgtgctttccgtcgaagcctgcttgaccgctgtggtgggtcatgtgagctcagctcgttgatctccctgactactacctccgtggctccgttccaaattataagtaattttctctcagggaaactaccagctactacacacacatgcatgcatctatctgtctatctatatatatatatatatcctcgcccttcttccaccactgactggctgagcaggctccgggagatgcatatgtagatgcaagagttatgaaggctatcccagattggattgcggtgcctaaattcatttttaacttgtttaacgagttctttatcactatctgaaaagctgttcctattatagagtactgcaatgcaccgtggtctgcttgtgatttggtcagcatcacattaatgattttgctttagcttgactgatattcgaggtacaaaatgcagtatttaaccctatggacaaaactggaagattatgtgaattaaagaaagttgcatctgctgtgctcctggttcatgggggcacaatggcatgatgactatctaggggaatctctgatgctaatgctaatacaaattttcttatctagcttacacggtggataggttaatgcgtgtagaaccatgctagtgatagatatcctttgaacctggagtaaagcattttatatgcttatttacggccataaaagttttctggcatctcatatgtgactgagataagccattttagcttgggtgttggttgcctggaattaagtcactatctgttgatcctttcctttcagaaacatgtttggtttgtgtgttgtcatatttttgccacttcaccgcataagaaaaatgtcagatagtgagaagattgaagaaagacaagaacatctgcagtgttgccaattcaatcttgcgatgcaaaatttggaagagttatgttttgagtctgcatgagttgccatcacaacaattgactgcatgaaaacagtaatagcaagaaacaggacaaggacatcttc

SEQ ID NO: 82045 - DNA, 1463 bp, Zea Mays
acaaacacacacacacaaacactggaaagtgtatatgtagatgcaatgattatgaaggtttgccagatataagaaaccccctgatcgaacaattttgttttgttttcctcgaatatgcaggagatctgcatatctttgcaacaatttttatttgtgacgggttacctctgagcttgatgttttactcttttgtttttggcaagcagattttcctaacatcattgcaagtgaccttcttctgatttttatttttgattaacgcaaactgtggaattgttttggtcttatcaatttttgtcatgcaatctgaccagctgtcaggtgatctgcatcgcaaataagataagttcttttcgatgacgattcatttaagatgggtgaatgcttgtggttgcagcttacatttttcgagtttcagtgttgtcatggtggtgatcagtgttctggtatgccagcccaatgattacctttgtgctaaaaatggagatctaagatctaactaaacttgtttgttgcttggctgctgtgatagatcatatacttcaatgacaaatataattatgttgcattgtgctttcagaaaaaaaagtctttcattattacgtttccagaaatgcagaagtccttgaaaaaagttctgatttcttgaggctagtactagtagtcttttggttttgttatgggggcatgaattctggtataccagcctgatgattatgatgttttttgcatcaagaatggaaatccgagtgtatttctcccattgaagtctgcttggccgctctggttgatggcctgctgctactgctagtaccagtactactgctttcttggggctcatctgtctgtctgtctgtcttgtctcgttggccacaaccaagctggctaagtgagctctggggaatccttatgtggacataaggcttatgaaggcttggcagtaggagaatgcccctgataaaatatttccatttattttgagtgatctctgcctagaagcttgtctttcactgtgttttgttgtattgtcctaaatgcaatgtgatttgacctcagtttttgtggtttaagtttgtgctaataaatcaaatggagctgtgaatgattttattattgccaaatgttatcatctatgtcgccagctctcgaaattttgtgacttgtcgaaatttggatctgatttatgtgccacccagtgactcggttagctctctacaaacatatttagttttatttggacagctttgaccaacaattactccataagaccatgtctagcagtgcgctgtacatgacactattcatagagtgaacacagtgaagcttaaatatgggcatgaggatggataagctgcctatagtgcaagttttcactatttactaatgggctaaaaacgtatgattttactgggatgtgtaatttgtttggttcttctgttgatctaaaaagaatttattttcag

SEQ ID NO: 82046 - DNA, 3566 bp, Zea Mays
gttttcttctggttggtaggacactccaacctgccaggcttccttgtggttataaggctttgttaacacacctgggaatgtttggttacgttgaggaagttgctcaatacaccacatcagggtcacagttcagcaggaatttgttcagcttttctgattggatggtttggttctgaaatattgttctgaatttatgtcatgctttagattgacgatatagtgaatgcaaactccggaccaacttgtcacaaggttgagtgatgaagaaatggcatggaggctttgtcattgtatctttgttcatcatcttgatgttaagatatgtgatattggataggctacttgcagaaaaatcgcttcagtatgttttccagcaaaacaggacggcagaattacattggttggatgttccaaacccacctgcaatccagaatccacagatttcttctgaagtaatatcaaccagactcttggcatccaacctttccattaccagaaatctctctgatacagaacttcaatctttacattcttggaatcatttgaaacaccttttaacgcatgcccatatcctaccagatggagtagaggcaatcaaggaagctggagttgcatggagggaactcaatacagcccttgcatatgatgattcagttgtttctgttaatggcagcattcagcagaaggacaaaggaaagcaatgcccttattctgtccgacggatgaatgccacaagattaggggataggtttgctttaaaacttccatgtggattgattcagggctcttcaataactattattggtactcctggtggtcttctggctaattttaagatagagttaactggagctgcagttcctggtgaaccagaccctccaattgtccttcattataatgtccgccttcttggtgataaactcacagaagatcctgtaatagtccaaaatacatggacgatagctgatgattggggttctgaaaaccgttgcccatctcctgattcagatgctaaggacagtgcaaaagtggatgatctagaaaagtgtagtagcatcgtaggtgaggaccagaaagaaatccttccctctaagttacattcacatgttttgaccatgccacctgcaaggaagaagaaagcagaatctagaaagtattttccattcaggcagggatatcttgctgtagcaattcttcgtatcggagcacatgggatccatatgactgtagatggcaaacatatcacttcgtttgcatttcgagaggatttggaaccagggtttgttggtgaagtaagaattgcaggagacattaaattgctatctgtgatagcaagtggcctgccaacaacagagtacttcgagcatgtcactgatctggaaattttgaaggctccacctgttgccatggataaatctgttgatcttttcattggggtcttctctacagcaaataatttcaagcgccgaatggcagttcgcagaacttggatgcagtatgatgctgtgcgctcaggaaaagttgcagttagattctttgttggcctgcacaaaaacgaggtggtcaatgaggaactctggaatgaagcacgaacatatggagacatccagttgatgccatttgtggattactatagcctgattctttggaagaccatagcgatctgcatttatgggacaaatgtcctgtcagccaagtatgtgatgaaaactgatgatgatgcttttgttcgagtagatgaaatactttcttccctcgaccgaaccaatatcagtcatgcactgttgtatggtcgtgtcaattctgattcccagcctcaccgagatccctatagcaagtggaatggcctgaggagaattatcctccatgggcgcatggtccaggatatattgtttcacaggacatagctaaagaagtttacaggaaacacaagaatggggaattaaagatgttcaagctggaggatgtcgcgatgggaatatggatcaatgagatgaagaaggatggcttggatgtcaagtatgagaatgatgggaggatcttggttgaaggatgcgaggatgggtatgtgattgctcactaccaagaaccaagggatatgatgtgcctctgggataagtttcagaaaacaaaacgaggaacatgttgcaaagaataacagagataatgcaaatgatgctttattttacggtggttgctgttggccgttgcttgaacagacaccgtcacgctaaaacgttcttgacatttgacatatacagcccctcctaagaggaatcttgcagaactggatggcaagcgaagttttgggtatcttaagtttgtttcgtcccagtttgaagagtttctagtcaaactaggggatatgcattgtaggcagaatgcaggtcacatcttttttttttgggtaggtaggagagtgctgctttgcttactgtgtggcttgtaaaatactagtatcttgccagaatgtaggatacatgggcggcagcttacgttaggatagattgagccagtctaccattcttttgaaaggaatgcattttgcatctgatgtaaagctatttttggtgaccattcattctcttgtataatccattctcaagaaatttcaaatcggtactgattaaagataggatcacatcacatccaagtttttacagttgctaagaaaacatgaagcataaaatgatcaagccagattcacaggtacggaagaaagttacactgccgtactctctgttccagtctgctgttttttacggagccaaacaaccgatgccgtagcgggtgttggggaacaagaggaagaggccgctgcacacggcgcccaccatgagcgggaagctctccatcacctcgtccatctccttgcggtggccggcgacgaggcacccggagacccggtagtcggcgagcgtgacggccgcaaagaccagcacggacatgacagcgtgcacgacgtcgacgaaggcgagccggtacctttcctccctgggcacctcgacgccgagcccggtcctgaacagcgacaggccccgcggcgtgacgaagccgtagtacaccttcccgtccggggcgcggaagctgtcggtgaagtggaagaggaagcaggaggcggcgcagagcgcgagcagggccctgagcatcgcggcgctgaccgccgagcaggtgccgtcgcctgcggcggccgggagtagcatctcgaaggttagcagcgtgcccgtggggaggaagttggccagcatggacgtcttggagagcgtcttctgcacgcccctcgccaccgcgcggcgcttccttcccgcgcccggcggcgagccgccgccgccgccgcgcacctcgacggacaccgcaccggcgttgctgcgatccatgggcgcgttcttgtccggagagcgtggaactgttttcgcgacgttcccagagactggaaatgcaaagctgttggtttgcttgctgatcggctgttctgtaatcgtaaatagatgcacggcgcacgcgtagtttggcgaacgttaggcagtgcttgagttcaaatgacgtgcaactgttgctacgcataa

SEQ ID NO: 82047 - DNA, 4719 bp, Zea Mays
ggcagggaaaagaaaagagactggccgagcgagtccggccccgcgacaccggcacggcgcctattcgcccgctcgcgttcggtcggtccgtggcgtggtcctgaagccatcctcctcacaggctcgcaccgccttcgacttctctcatcctgcgcccagagctcctatgctccgccttcacctgacttgttcgtcgctcgctcccggcccgctggtttcctcaggccttgttccgtggctcaggcagcgcctgagctggtgaggctaggcaggactcaggagtgcccccgccccgcgaggctgttcgaagcgacccagctgccgggtggcggcggattcctggacactccaacctgccaggcttccttgtggttataaggctttgttaacacacctgggaatgtttggttacgttgaggaagttgctcaatacaccacatcagggtcacagttcagcaggaatttgttcagcttttctgattggatggtttggttctgaaatattgttctgaatttatgtcatgctttagattgacgatatagtgaatgcaaactccggaccaacttgtcacaaggttgagtgatgaagaaatggcatggaggctttgtcattgtatctttgttcatcatcttgatgttaagatatgtgatattggataggctacttgcagaaaaatcgcttcagtatgttttccagcaaaacaggacggcagaattacattggttggatgttccaaacccacctgcaatccagaatccacagatttcttctgaagtaatatcaaccagactcttggcatccaacctttccattaccagaaatctctctgatacagaacttcaatctttacattcttggaatcatttgaaacaccttttaacgcatgcccatatcctaccagatggagtagaggcaatcaaggaagctggagttgcatggagggaactcaatacagcccttgcatatgatgattcagttgtttctgttaatggcagcattcagcagaaggacaaaggaaagcaatgcccttattctgtccgacggatgaatgccacaagattaggggataggtttgctttaaaacttccatgtggattgattcagggctcttcaataactattattggtactcctggtggtcttctggctaattttaagatagagttaactggagctgcagttcctggtgaaccagaccctccaattgtccttcattataatgtccgccttcttggtgataaactcacagaagatcctgtaatagtccaaaatacatggacgatagctgatgattggggttctgaaaaccgttgcccatctcctgattcagatgctaaggacagtgcaaaagtggatgatctagaaaagtgtagtagcatcgtaggtgaggaccagaaagaaatccttccctctaagttacattcacatgttttgaccatgccacctgcaaggaagaagaaagcagaatctagaaagtattttccattcaggcagggatatcttgctgtagcaattcttcgtatcggagcacatgggatccatatgactgtagatggcaaacatatcacttcgtttgcatttcgagaggatttggaaccagggtttgttggtgaagtaagaattgcaggagacattaaattgctatctgtgatagcaagtggcctgccaacaacagagtacttcgagcatgtcactgatctggaaattttgaaggctccacctgttgccatggataaatctgttgatcttttcattggggtcttctctacagcaaataatttcaagcgccgaatggcagttcgcagaacttggatgcagtatgatgctgtgcgctcaggaaaagttgcagttagattctttgttggcctgcacaaaaacgaggtggtcaatgaggaactctggaatgaagcacgaacatatggagacatccagttgatgccatttgtggattactatagcctgattctttggaagaccatagcgatctgcatttatgggacaaatgtcctgtcagccaagtatgtgatgaaaactgatgatgatgcttttgttcgagtagatgaaatactttcttccctcgaccgaaccaatatcagtcatgcactgttgtatggtcgtgtcaattctgattcccagcctcaccgagatccctatagcaagtggtacataacccctgaggtaacttgtgtaaaattatatatacttgagtaaaatactccaattgtccttaaacatgctctgtggtgtcatgtattgttcctaaactcttaaaatgcacatatgggtctcttaaaattgctaaaatgtgctacttaaagtccaaatcactctaatcagcacaaacttagtctatgtggcatatagaatggtacatggtaattttatattcacaatacatggtagcgactttggccatgagcatgtagtagagaacagggatatctcagatttcttgcaagaatgttattatcacatacatgattacaggttgattagggtgtttggacctcttgtggcacacttgaacaagtttatgaacctagatgtagattttaagagtttgtctacctaaatgccaccccagtacaagtttgatgaccaaaagtgcaatttgtttatatcaagagattctgcaaaatataatttctacatatgaaaaggctcttcctctagaacattgctctgccatgtgttttctctaatgttctatagatggtggattgagacgttgcacaagtgctcacttagacagctcaagttttgtataaaagtaacatttaggaggttaggggctcctgcatgaatgtatgcaaaacatataaagctggttaagcacctgcatactgtttcagaactaactagtgcttggttctgcttattaacacatattttttaaagcatattttgctgccttgttttcaataatttagttccggttttgtcattttgtgcggtggatcaagtgtggtaactaatgttttgcttgagttaggaatggcctgaggagaattatcctccatgggcgcatggtccaggatatattgtttcacaggacatagctaaagaagtttacaggaaacacaagaatggggaattaaagatgttcaagctggaggatgtcgcgatgggaatatggatcaatgagatgaagaaggatggcttggatgtcaagtatgagaatgatgggaggatcttggttgaaggatgcgaggatgggtatgtgattgctcactaccaagaaccaagggatatgatgtgcctctgggataagtttcagaaaacaaaacgaggaacatgttgcaaagaataacagagataatgcaaatgatgctttattttacggtggttgctgttggccgttgcttgaacagacaccgtcacgctaaaacgttcttgacatttgacatatacagcccctcctaagaggaatcttgcagaactggatggcaagcgaagttttgggtatcttaagtttgtttcgtcccagtttgaagagtttctagtcaaactaggggatatgcattgtaggcagaatgcaggtcacatcttttttttttgggtaggtaggagagtgctgctttgcttactgtgtggcttgtaaaatactagtatcttgccagaatgtaggatacatgggcggcagcttacgttaggatagattgagccagtctaccattcttttgaaaggaatgcattttgcatctgatgtaaagctatttttggtgaccattcattctcttgtataatccattctcaagaaatttcaaatcggtactgattaaagataggatcacatcacatccaagtttttacagttgctaagaaaacatgaagcataaaatgatcaagccagattcacaggtacggaagaaagttacactgccgtactctctgttccagtctgctgttttttacggagccaaacaaccgatgccgtagcgggtgttggggaacaagaggaagaggccgctgcacacggcgcccaccatgagcgggaagctctccatcacctcgtccatctccttgcggtggccggcgacgaggcacccggagacccggtagtcggcgagcgtgacggccgcaaagaccagcacggacatgacagcgtgcacgacgtcgacgaaggcgagccggtacctttcctccctgggcacctcgacgccgagcccggtcctgaacagcgacaggccccgcggcgtgacgaagccgtagtacaccttcccgtccggggcgcggaagctgtcggtgaagtggaagaggaagcaggaggcggcgcagagcgcgagcagggccctgagcatcgcggcgctgaccgccgagcaggtgccgtcgcctgcggcggccgggagtagcatctcgaaggttagcagcgtgcccgtggggaggaagttggccagcatggacgtcttggagagcgtcttctgcacgcccctcgccaccgcgcggcgcttccttcccgcgcccggcggcgagccgccgccgccgccgcgcacctcgacggacaccgcaccggcgttgctgcgatccatgggcgcgttcttgtccggagagcgtggaactgttttcgcgacgttcccagagactggaaatgcaaagctgttggtttgcttgctgatcggctgttctgtaatcgtaaatagatgcacggcgcacgcgtagtttggcgaacgttaggcagtgcttgagttcaaatgacgtgcaactgttgctacgcataa

SEQ ID NO: 82048 - DNA, 4761 bp, Zea Mays
ggcagggaaaagaaaagagactggccgagcgagtccggccccgcgacaccggcacggcgcctattcgcccgctcgcgttcggtcggtccgtggcgtggtcctgaagccatcctcctcacaggctcgcaccgccttcgacttctctcatcctgcgcccagagctcctatgctccgccttcacctgacttgttcgtcgctcgctcccggcccgctggtttcctcaggccttgttccgtggctcaggcagcgcctgagctggtgaggctaggcaggactcaggagtgcccccgccccgcgaggctgttcgaagcgacccagctgccgggtggcggcggattcctggataaagttgattaatgtctgctgttttcttctggttggtaggacactccaacctgccaggcttccttgtggttataaggctttgttaacacacctgggaatgtttggttacgttgaggaagttgctcaatacaccacatcagggtcacagttcagcaggaatttgttcagcttttctgattggatggtttggttctgaaatattgttctgaatttatgtcatgctttagattgacgatatagtgaatgcaaactccggaccaacttgtcacaaggttgagtgatgaagaaatggcatggaggctttgtcattgtatctttgttcatcatcttgatgttaagatatgtgatattggataggctacttgcagaaaaatcgcttcagtatgttttccagcaaaacaggacggcagaattacattggttggatgttccaaacccacctgcaatccagaatccacagatttcttctgaagtaatatcaaccagactcttggcatccaacctttccattaccagaaatctctctgatacagaacttcaatctttacattcttggaatcatttgaaacaccttttaacgcatgcccatatcctaccagatggagtagaggcaatcaaggaagctggagttgcatggagggaactcaatacagcccttgcatatgatgattcagttgtttctgttaatggcagcattcagcagaaggacaaaggaaagcaatgcccttattctgtccgacggatgaatgccacaagattaggggataggtttgctttaaaacttccatgtggattgattcagggctcttcaataactattattggtactcctggtggtcttctggctaattttaagatagagttaactggagctgcagttcctggtgaaccagaccctccaattgtccttcattataatgtccgccttcttggtgataaactcacagaagatcctgtaatagtccaaaatacatggacgatagctgatgattggggttctgaaaaccgttgcccatctcctgattcagatgctaaggacagtgcaaaagtggatgatctagaaaagtgtagtagcatcgtaggtgaggaccagaaagaaatccttccctctaagttacattcacatgttttgaccatgccacctgcaaggaagaagaaagcagaatctagaaagtattttccattcaggcagggatatcttgctgtagcaattcttcgtatcggagcacatgggatccatatgactgtagatggcaaacatatcacttcgtttgcatttcgagaggatttggaaccagggtttgttggtgaagtaagaattgcaggagacattaaattgctatctgtgatagcaagtggcctgccaacaacagagtacttcgagcatgtcactgatctggaaattttgaaggctccacctgttgccatggataaatctgttgatcttttcattggggtcttctctacagcaaataatttcaagcgccgaatggcagttcgcagaacttggatgcagtatgatgctgtgcgctcaggaaaagttgcagttagattctttgttggcctgcacaaaaacgaggtggtcaatgaggaactctggaatgaagcacgaacatatggagacatccagttgatgccatttgtggattactatagcctgattctttggaagaccatagcgatctgcatttatgggacaaatgtcctgtcagccaagtatgtgatgaaaactgatgatgatgcttttgttcgagtagatgaaatactttcttccctcgaccgaaccaatatcagtcatgcactgttgtatggtcgtgtcaattctgattcccagcctcaccgagatccctatagcaagtggtacataacccctgaggtaacttgtgtaaaattatatatacttgagtaaaatactccaattgtccttaaacatgctctgtggtgtcatgtattgttcctaaactcttaaaatgcacatatgggtctcttaaaattgctaaaatgtgctacttaaagtccaaatcactctaatcagcacaaacttagtctatgtggcatatagaatggtacatggtaattttatattcacaatacatggtagcgactttggccatgagcatgtagtagagaacagggatatctcagatttcttgcaagaatgttattatcacatacatgattacaggttgattagggtgtttggacctcttgtggcacacttgaacaagtttatgaacctagatgtagattttaagagtttgtctacctaaatgccaccccagtacaagtttgatgaccaaaagtgcaatttgtttatatcaagagattctgcaaaatataatttctacatatgaaaaggctcttcctctagaacattgctctgccatgtgttttctctaatgttctatagatggtggattgagacgttgcacaagtgctcacttagacagctcaagttttgtataaaagtaacatttaggaggttaggggctcctgcatgaatgtatgcaaaacatataaagctggttaagcacctgcatactgtttcagaactaactagtgcttggttctgcttattaacacatattttttaaagcatattttgctgccttgttttcaataatttagttccggttttgtcattttgtgcggtggatcaagtgtggtaactaatgttttgcttgagttaggaatggcctgaggagaattatcctccatgggcgcatggtccaggatatattgtttcacaggacatagctaaagaagtttacaggaaacacaagaatggggaattaaagatgttcaagctggaggatgtcgcgatgggaatatggatcaatgagatgaagaaggatggcttggatgtcaagtatgagaatgatgggaggatcttggttgaaggatgcgaggatgggtatgtgattgctcactaccaagaaccaagggatatgatgtgcctctgggataagtttcagaaaacaaaacgaggaacatgttgcaaagaataacagagataatgcaaatgatgctttattttacggtggttgctgttggccgttgcttgaacagacaccgtcacgctaaaacgttcttgacatttgacatatacagcccctcctaagaggaatcttgcagaactggatggcaagcgaagttttgggtatcttaagtttgtttcgtcccagtttgaagagtttctagtcaaactaggggatatgcattgtaggcagaatgcaggtcacatcttttttttttgggtaggtaggagagtgctgctttgcttactgtgtggcttgtaaaatactagtatcttgccagaatgtaggatacatgggcggcagcttacgttaggatagattgagccagtctaccattcttttgaaaggaatgcattttgcatctgatgtaaagctatttttggtgaccattcattctcttgtataatccattctcaagaaatttcaaatcggtactgattaaagataggatcacatcacatccaagtttttacagttgctaagaaaacatgaagcataaaatgatcaagccagattcacaggtacggaagaaagttacactgccgtactctctgttccagtctgctgttttttacggagccaaacaaccgatgccgtagcgggtgttggggaacaagaggaagaggccgctgcacacggcgcccaccatgagcgggaagctctccatcacctcgtccatctccttgcggtggccggcgacgaggcacccggagacccggtagtcggcgagcgtgacggccgcaaagaccagcacggacatgacagcgtgcacgacgtcgacgaaggcgagccggtacctttcctccctgggcacctcgacgccgagcccggtcctgaacagcgacaggccccgcggcgtgacgaagccgtagtacaccttcccgtccggggcgcggaagctgtcggtgaagtggaagaggaagcaggaggcggcgcagagcgcgagcagggccctgagcatcgcggcgctgaccgccgagcaggtgccgtcgcctgcggcggccgggagtagcatctcgaaggttagcagcgtgcccgtggggaggaagttggccagcatggacgtcttggagagcgtcttctgcacgcccctcgccaccgcgcggcgcttccttcccgcgcccggcggcgagccgccgccgccgccgcgcacctcgacggacaccgcaccggcgttgctgcgatccatgggcgcgttcttgtccggagagcgtggaactgttttcgcgacgttcccagagactggaaatgcaaagctgttggtttgcttgctgatcggctgttctgtaatcgtaaatagatgcacggcgcacgcgtagtttggcgaacgttaggcagtgcttgagttcaaatgacgtgcaactgttgctacgcataa

SEQ ID NO: 82049 - DNA, 3820 bp, Zea Mays
ggcagggaaaagaaaagagactggccgagcgagtccggccccgcgacaccggcacggcgcctattcgcccgctcgcgttcggtcggtccgtggcgtggtcctgaagccatcctcctcacaggctcgcaccgccttcgacttctctcatcctgcgcccagagctcctatgctccgccttcacctgacttgttcgtcgctcgctcccggcccgctggtttcctcaggccttgttccgtggctcaggcagcgcctgagctggtgaggctaggcaggactcaggagtgcccccgccccgcgaggctgttcgaagcgacccagctgccgggtggcggcggattcctggataaagttgattaatgtctgctgttttcttctggttggtaggacactccaacctgccaggcttccttgtggttataaggctttgttaacacacctgggaatgtttggttacgttgaggaagttgctcaatacaccacatcagggtcacagttcagcaggaatttgttcagcttttctgattggatggtttggttctgaaatattgttctgaatttatgtcatgctttagattgacgatatagtgaatgcaaactccggaccaacttgtcacaaggttgagtgatgaagaaatggcatggaggctttgtcattgtatctttgttcatcatcttgatgttaagatatgtgatattggataggctacttgcagaaaaatcgcttcagtatgttttccagcaaaacaggacggcagaattacattggttggatgttccaaacccacctgcaatccagaatccacagatttcttctgaaatggagtagaggcaatcaaggaagctggagttgcatggagggaactcaatacagcccttgcatatgatgattcagttgtttctgttaatggcagcattcagcagaaggacaaaggaaagcaatgcccttattctgtccgacggatgaatgccacaagattaggggataggtttgctttaaaacttccatgtggattgattcagggctcttcaataactattattggtactcctggtggtcttctggctaattttaagatagagttaactggagctgcagttcctggtgaaccagaccctccaattgtccttcattataatgtccgccttcttggtgataaactcacagaagatcctgtaatagtccaaaatacatggacgatagctgatgattggggttctgaaaaccgttgcccatctcctgattcagatgctaaggacagtgcaaaagtggatgatctagaaaagtgtagtagcatcgtaggtgaggaccagaaagaaatccttccctctaagttacattcacatgttttgaccatgccacctgcaaggaagaagaaagcagaatctagaaagtattttccattcaggcagggatatcttgctgtagcaattcttcgtatcggagcacatgggatccatatgactgtagatggcaaacatatcacttcgtttgcatttcgagaggatttggaaccagggtttgttggtgaagtaagaattgcaggagacattaaattgctatctgtgatagcaagtggcctgccaacaacagagtacttcgagcatgtcactgatctggaaattttgaaggctccacctgttgccatggataaatctgttgatcttttcattggggtcttctctacagcaaataatttcaagcgccgaatggcagttcgcagaacttggatgcagtatgatgctgtgcgctcaggaaaagttgcagttagattctttgttggcctgcacaaaaacgaggtggtcaatgaggaactctggaatgaagcacgaacatatggagacatccagttgatgccatttgtggattactatagcctgattctttggaagaccatagcgatctgcatttatgggacaaatgtcctgtcagccaagtatgtgatgaaaactgatgatgatgcttttgttcgagtagatgaaatactttcttccctcgaccgaaccaatatcagtcatgcactgttgtatggtcgtgtcaattctgattcccagcctcaccgagatccctatagcaagtggtacataacccctgaggaatggcctgaggagaattatcctccatgggcgcatggtccaggatatattgtttcacaggacatagctaaagaagtttacaggaaacacaagaatggggaattaaagatgttcaagctggaggatgtcgcgatgggaatatggatcaatgagatgaagaaggatggcttggatgtcaagtatgagaatgatgggaggatcttggttgaaggatgcgaggatgggtatgtgattgctcactaccaagaaccaagggatatgatgtgcctctgggataagtttcagaaaacaaaacgaggaacatgttgcaaagaataacagagataatgcaaatgatgctttattttacggtggttgctgttggccgttgcttgaacagacaccgtcacgctaaaacgttcttgacatttgacatatacagcccctcctaagaggaatcttgcagaactggatggcaagcgaagttttgggtatcttaagtttgtttcgtcccagtttgaagagtttctagtcaaactaggggatatgcattgtaggcagaatgcaggtcacatcttttttttttgggtaggtaggagagtgctgctttgcttactgtgtggcttgtaaaatactagtatcttgccagaatgtaggatacatgggcggcagcttacgttaggatagattgagccagtctaccattcttttgaaaggaatgcattttgcatctgatgtaaagctatttttggtgaccattcattctcttgtataatccattctcaagaaatttcaaatcggtactgattaaagataggatcacatcacatccaagtttttacagttgctaagaaaacatgaagcataaaatgatcaagccagattcacaggtacggaagaaagttacactgccgtactctctgttccagtctgctgttttttacggagccaaacaaccgatgccgtagcgggtgttggggaacaagaggaagaggccgctgcacacggcgcccaccatgagcgggaagctctccatcacctcgtccatctccttgcggtggccggcgacgaggcacccggagacccggtagtcggcgagcgtgacggccgcaaagaccagcacggacatgacagcgtgcacgacgtcgacgaaggcgagccggtacctttcctccctgggcacctcgacgccgagcccggtcctgaacagcgacaggccccgcggcgtgacgaagccgtagtacaccttcccgtccggggcgcggaagctgtcggtgaagtggaagaggaagcaggaggcggcgcagagcgcgagcagggccctgagcatcgcggcgctgaccgccgagcaggtgccgtcgcctgcggcggccgggagtagcatctcgaaggttagcagcgtgcccgtggggaggaagttggccagcatggacgtcttggagagcgtcttctgcacgcccctcgccaccgcgcggcgcttccttcccgcgcccggcggcgagccgccgccgccgccgcgcacctcgacggacaccgcaccggcgttgctgcgatccatgggcgcgttcttgtccggagagcgtggaactgttttcgcgacgttcccagagactggaaatgcaaagctgttggtttgcttgctgatcggctgttctgtaatcgtaaatagatgcacggcgcacgcgtagtttggcgaacgttaggcagtgcttgagttcaaatgacgtgcaactgttgctacgcataa

SEQ ID NO: 82050 - DNA, 3778 bp, Zea Mays
ggcagggaaaagaaaagagactggccgagcgagtccggccccgcgacaccggcacggcgcctattcgcccgctcgcgttcggtcggtccgtggcgtggtcctgaagccatcctcctcacaggctcgcaccgccttcgacttctctcatcctgcgcccagagctcctatgctccgccttcacctgacttgttcgtcgctcgctcccggcccgctggtttcctcaggccttgttccgtggctcaggcagcgcctgagctggtgaggctaggcaggactcaggagtgcccccgccccgcgaggctgttcgaagcgacccagctgccgggtggcggcggattcctggacactccaacctgccaggcttccttgtggttataaggctttgttaacacacctgggaatgtttggttacgttgaggaagttgctcaatacaccacatcagggtcacagttcagcaggaatttgttcagcttttctgattggatggtttggttctgaaatattgttctgaatttatgtcatgctttagattgacgatatagtgaatgcaaactccggaccaacttgtcacaaggttgagtgatgaagaaatggcatggaggctttgtcattgtatctttgttcatcatcttgatgttaagatatgtgatattggataggctacttgcagaaaaatcgcttcagtatgttttccagcaaaacaggacggcagaattacattggttggatgttccaaacccacctgcaatccagaatccacagatttcttctgaaatggagtagaggcaatcaaggaagctggagttgcatggagggaactcaatacagcccttgcatatgatgattcagttgtttctgttaatggcagcattcagcagaaggacaaaggaaagcaatgcccttattctgtccgacggatgaatgccacaagattaggggataggtttgctttaaaacttccatgtggattgattcagggctcttcaataactattattggtactcctggtggtcttctggctaattttaagatagagttaactggagctgcagttcctggtgaaccagaccctccaattgtccttcattataatgtccgccttcttggtgataaactcacagaagatcctgtaatagtccaaaatacatggacgatagctgatgattggggttctgaaaaccgttgcccatctcctgattcagatgctaaggacagtgcaaaagtggatgatctagaaaagtgtagtagcatcgtaggtgaggaccagaaagaaatccttccctctaagttacattcacatgttttgaccatgccacctgcaaggaagaagaaagcagaatctagaaagtattttccattcaggcagggatatcttgctgtagcaattcttcgtatcggagcacatgggatccatatgactgtagatggcaaacatatcacttcgtttgcatttcgagaggatttggaaccagggtttgttggtgaagtaagaattgcaggagacattaaattgctatctgtgatagcaagtggcctgccaacaacagagtacttcgagcatgtcactgatctggaaattttgaaggctccacctgttgccatggataaatctgttgatcttttcattggggtcttctctacagcaaataatttcaagcgccgaatggcagttcgcagaacttggatgcagtatgatgctgtgcgctcaggaaaagttgcagttagattctttgttggcctgcacaaaaacgaggtggtcaatgaggaactctggaatgaagcacgaacatatggagacatccagttgatgccatttgtggattactatagcctgattctttggaagaccatagcgatctgcatttatgggacaaatgtcctgtcagccaagtatgtgatgaaaactgatgatgatgcttttgttcgagtagatgaaatactttcttccctcgaccgaaccaatatcagtcatgcactgttgtatggtcgtgtcaattctgattcccagcctcaccgagatccctatagcaagtggtacataacccctgaggaatggcctgaggagaattatcctccatgggcgcatggtccaggatatattgtttcacaggacatagctaaagaagtttacaggaaacacaagaatggggaattaaagatgttcaagctggaggatgtcgcgatgggaatatggatcaatgagatgaagaaggatggcttggatgtcaagtatgagaatgatgggaggatcttggttgaaggatgcgaggatgggtatgtgattgctcactaccaagaaccaagggatatgatgtgcctctgggataagtttcagaaaacaaaacgaggaacatgttgcaaagaataacagagataatgcaaatgatgctttattttacggtggttgctgttggccgttgcttgaacagacaccgtcacgctaaaacgttcttgacatttgacatatacagcccctcctaagaggaatcttgcagaactggatggcaagcgaagttttgggtatcttaagtttgtttcgtcccagtttgaagagtttctagtcaaactaggggatatgcattgtaggcagaatgcaggtcacatcttttttttttgggtaggtaggagagtgctgctttgcttactgtgtggcttgtaaaatactagtatcttgccagaatgtaggatacatgggcggcagcttacgttaggatagattgagccagtctaccattcttttgaaaggaatgcattttgcatctgatgtaaagctatttttggtgaccattcattctcttgtataatccattctcaagaaatttcaaatcggtactgattaaagataggatcacatcacatccaagtttttacagttgctaagaaaacatgaagcataaaatgatcaagccagattcacaggtacggaagaaagttacactgccgtactctctgttccagtctgctgttttttacggagccaaacaaccgatgccgtagcgggtgttggggaacaagaggaagaggccgctgcacacggcgcccaccatgagcgggaagctctccatcacctcgtccatctccttgcggtggccggcgacgaggcacccggagacccggtagtcggcgagcgtgacggccgcaaagaccagcacggacatgacagcgtgcacgacgtcgacgaaggcgagccggtacctttcctccctgggcacctcgacgccgagcccggtcctgaacagcgacaggccccgcggcgtgacgaagccgtagtacaccttcccgtccggggcgcggaagctgtcggtgaagtggaagaggaagcaggaggcggcgcagagcgcgagcagggccctgagcatcgcggcgctgaccgccgagcaggtgccgtcgcctgcggcggccgggagtagcatctcgaaggttagcagcgtgcccgtggggaggaagttggccagcatggacgtcttggagagcgtcttctgcacgcccctcgccaccgcgcggcgcttccttcccgcgcccggcggcgagccgccgccgccgccgcgcacctcgacggacaccgcaccggcgttgctgcgatccatgggcgcgttcttgtccggagagcgtggaactgttttcgcgacgttcccagagactggaaatgcaaagctgttggtttgcttgctgatcggctgttctgtaatcgtaaatagatgcacggcgcacgcgtagtttggcgaacgttaggcagtgcttgagttcaaatgacgtgcaactgttgctacgcataa

SEQ ID NO: 82051 - DNA, 2014 bp, Zea Mays
ccacaccacaacggtatacgtatacacctgatgcgaagatggccgcctcggctcccggcggccgtcgcccaccaccatgccggcgccccggccacaccagacgtaggcgtggcagcggaccacgccgacggacttgtccgccagcacaaccgctctcttgtggggctcctccgccgcggccgcttctctgccgcccgccgccttttcgacgcgcttcctgcccgctccgtggtcacatggaactcgctcctcgcggcgctctcccgtggcagcgacgtgagagctgcgcgttgcttcttcgacgccatgccagtgcgagacatcatctcttggaacacgctgctttctgcgtacgctcgatcgctgcaacccaatgacctcgccgccgcgcgccgtctgttctacgaaatgcctcagcgcgatgcagtctcgtggagcacacttctcggcgcttacacgcgtcgcgggctcatggaggaagcccagaggctgtttgatgagatgccacataggaatgcatcttcttggaataccatgatcacggggttctttgctgttggtcaaatgaggaaggcactcaatgtgttcgcggctatgcctgacaaagactctgcatcgctgtctgcaatggtctctggttttatcaggaatggcaggttgcatgaggctgatgatctgcttacaaagcgcttgacggtgatggacatggacaaggctgttggtgctttcaacacccttattgctgcatatggacaaaccggtagggtaactgatgcaaggaggttattttctatgatcccaaaaacacaaaaccagcacaaggggcataagaggatggtgtttgagaggaatgttgtgtcatggaactcgatgatgatgtgctatatcagaactggggatgtttgctcagctagggcattgtttgatgagatgccacataaggacttggtgtcatggaacactatgatagcagggtacactcaagcctcagagatggaggaggcagagaagctgttttgggaagtgccagaccctgatgcagtgacctggaatctgatgatacgagggtttacacaaaaaggggatgtggaacatgctcggggattctttgataggatgccagagcggagcaccatcacatggaatacaatgatatcaggttatgagcaaaatgaggattatgacagtacaatcaagctatttcaaaggatgctagaagttggcgagaggcctgatcatcacactctctcttcagttctggcagcatgtgcgtcacttgccatgttgcgccttggggctcagctccaccaacttattgaaaaatcatttctgccagacaccgcgaccaacaatgcacttatgacaatgtactccagatgtggtgaactaatcagtgcaaaggccatcttcggccatatgcatacacaaagagatatagtttcttggaatgcactgataggaggttatgagcagcaaggtaatgctacagaagcgttgcgtctgtttgaggagatgaggagtgccaaggtcatgccaacccacataacttttatttctctgctgagtgcatgtggaaatgctggccttgtctccgaaggacgggtggttttccataccatggttcatgactacggccttgctgctagtgtcgagcactatgctgcgcttgtcaatctcatagggcgacatggccagctagaggacgcattggagctgatcaagagcatgccaattgctccagaccgagctgtgtggggggcattcctgggagcctgcactgctaaaaagaacgaaccactcgctgagatggccgccaatgcattatccaagattgatcctgacagttctgctccatatgttttgatgcataacttacatgcccatgaggggaggtggggaagtgcatctctggttagagaagacatggaacggctaggcattcacaagcatccaggctacagctggattgatctgcacgacaaggtatttgcctacaacatgaagaatgtaacat

SEQ ID NO: 82052 - DNA, 2901 bp, Zea Mays
gtgtacatctagcagtaggagaaggacaactacaccttcgtgtaagtgggttgcctccaaggcagtttctatactcagaaaatatcctcatatgggtactaaggagctacaggttaggttgcaagatgagcacaagtgcacaattggctatgacacggtctggaaaggaaaagagaaggctttggatgaattatatggttcatgggaagagagttttcagctgttatacaattggagggcagaggtcatgaagagaatgccagatagtgttattgaaattgaatgcaaggtggttaagggcaaggcttatttccatcgtttttttgtgcacttggtccttctattgaaggttttcggacgggttgtagaccatggcttggtgttgatgcaactgcactaaatggcaggtggaatggtcatttagctgctgcaattggtgtggatggtcataattggatgtacccacttgcatatggatttatggactcagagacagaagataattggaaatggtggatggctcagctacataaggttgtgggagatcttccaaaacttgctatttgttcagatgcttgcaaaggattgctaaatgcagtgcgtgatgtgtttccagaagtcgatagaagagaatgctttaggcatctgatgcagaattttgttaagagatattcgggtgacagcagtggacacatgtggccagcagctagggcatatgacaaacatgtttatgagagccacatggctatagtttatgcggcgctctctagtgctaagagctggttggaaacacatcataagcttaagtggcagaggtcagactttgatcctgacatcaagtgtgattatgtgacaagcaatgtggctgaagtttttaacaattggatcaaagatataaaggacttgcctgttgttgagttggctgacaagataagggagatgattatgattctctcttacaagaggagaaaaattggggaaagattgtatggaaggatattaccagcggtcatacaaatcttgaatgctagaactagaggtctgggacatttaactgttatcaaaggtgataactatgctgctgaggtgtgggacaatttcaaccgtaggtttgtggttaaagcatatttgcatgagtgctcctgttgcgagtggcaacacactggcaagccttgccagcatgctttgtcattgataacagcccgacaaattagaaatgtgaggatggaggacttcgttcatgattactactctgtggagaagtttaggaaggcatatgctagacaaatagaacaactcccaagcaaggaaaagtggcccaaggtggatttggcatttgaggttggtgcaccacttagtaaaaggggagttggaaggcaacaaaaaataggatcaaaagttgccttgaaggtggaagtggtgggtctaaatgtactaaaaagtttgctgaaaatgagaatgagaagactaaaaaaatgattagaggcaaagtgcggtgtcccaattgtggagagttaggacacaggaaagccagttacaagtgcccactcaacggaactaagaaaaggccaagaaagccaaggaaaaatagtaccaaagaatggtttcctaaagagtctacgccggagagagcagaaactacaagagaacaactaatgcaagagagtcctggaataatgacaagaagacgtcttggaattttgatgggagaggtgacaacacatgaggcttcttcttcgcaggctttagagactacgacaacagctccaagaaagatgactccaagaaaggcgaagagaaagttgtgaaattgactttttaaagacacttagagaaagatgttagtgcagcaataaactgttagtgaaattgtcttttacatatgcagatgtcttggaactgtaagccattgttttctatggggtcattctttctcctttgaaatgataatttgaaaggatattgtacattgtcaggttcattctttctccttttacagaggcatgaggccaattacgtttattctgctgggtacagaggcatgaggccaagtagttttagcattagcattgctcttgggtcatttttctctttatatcggacagtactctgctggatacagaggcttctcagattgcttgcaagagatctgcctcatgttcaggttgctcgcagggttctcaccgctgcttgatttggcgtgcagggatctgctcttattctgtgaacaaaccggacagtactctctgaagaaacgaaccaacagatgcaaattgggaaccgggggcaatacggtcagattattaggtgaggaaaaggaaataattagaaaacaggttagaatactattttagagagcaataacacttataaatactattatagagaaggttatatttagagtaccataagaaagaaacatgttaataagagtactataatagcaaaaaaaactcttcacttgaataccattgaatttagtggggcccgcccctgcgcgcaggggtgctccagagcgcgcggctagggaaggaactcagggagaggggcgcgccatggctgagggagctcggggaaagggaagccgcggcgcacagggagaaacaccggtgagccagggagctccggccgggcgcgagcgagcagaggggagggggaggggcgcgacgccggagagagagagagttcgccagcatggaagtaggggtgcgtggaggagaatctggatgcgcacggctggaggagggatgagcagggagctgtgcagtggccatggatgcagggagggcgcaccatggggagctcggctgggcaccagagagccgagcggtgtctggctgtgcgaggaaaaaggaagcgcggccacaagataaggccacggctcatgcgcgtgaaaaaatc

SEQ ID NO: 82053 - DNA, 1111 bp, Zea Mays
cttagatccccatctttgtgagtgagatttgagtgagctcttcattgaattcgactctagagatcattcagtgtacactgaagactacattcctctgtgggtaaatgctgcttggtgcccatcacttcatggtcaccagatgctggacagcagccagaaccatgtttcaggctggcactgtccaaccgacagccaggaccgtaggaaatacttctacagtacaaatgcagtcagaaggggaaaaaatcaggggaagtagtagataaacaggagaaaccacactgctcaatcagccttggtctgctgtgcttggttgagcttaaccgggcgcgcctcgagaccacctcccttgcgggtctccagagtgtaaggcatgtatgttccaaggatcttgtcccacatgacaaagaagggctgagagaagttgtacttgttgccgtagagctgatggtggatgtcatggtaagcgctgttgttgctgaagaatacatggaggatgttcccaggaagccacagaccacagtggtcgtcgacggtcttgatggtcgcgaacgagaagaagaatatgccagtccttggggtcatgccagagatgaggaacgagagcgcgccaccgatggtgtccaggatgagtccctccagggggtggttgtacagagctccaaaagcgtaggggacgacaagagtgtggtgcttagagtggacgtgcttgtacaagaacttgttgatgtgcatgtatctgtgcatgaaatactgccatgtgtccatgacaaacattgcaacgataaattgcaacgccaataccagagccggaggttgcttcctcacagccccattctcatcaccaagaaccgtgaagagaagaagggagacagcgatttgaaacgcctgctgaacaaggacgcccctgacgaccgtcgacctggaaacgatgttcttggcctcctcctcccccttgggatggagcctgtagtcgtccatcccgagcccgtccaggacgacgtagagccccgagtagagccagtacaccgcaatcggcacgaaggtgcccagcagctcgtcggagaccgcaaatgccatcgccacttgagcgcgccctgcgaccgtcagc

SEQ ID NO: 82054 - DNA, 969 bp, Zea Mays
cttagatccccatctttgtgagtgagatttgagtgagctcttcattgaattcgactctagaggaaatacttctacagtacaaatgcagtcagaaggggaaaaaatcaggggaagtagtagataaacaggagaaaccacactgctcaatcagccttggtctgctgtgcttggttgagcttaaccgggcgcgcctcgagaccacctcccttgcgggtctccagagtgtaaggcatgtatgttccaaggatcttgtcccacatgacaaagaagggctgagagaagttgtacttgttgccgtagagctgatggtggatgtcatggtaagcgctgttgttgctgaagaatacatggaggatgttcccaggaagccacagaccacagtggtcgtcgacggtcttgatggtcgcgaacgagaagaagaatatgccagtccttggggtcatgccagagatgaggaacgagagcgcgccaccgatggtgtccaggatgagtccctccagggggtggttgtacagagctccaaaagcgtaggggacgacaagagtgtggtgcttagagtggacgtgcttgtacaagaacttgttgatgtgcatgtatctgtgcatgaaatactgccatgtgtccatgacaaacattgcaacgataaattgcaacgccaataccagagccggaggttgcttcctcacagccccattctcatcaccaagaaccgtgaagagaagaagggagacagcgatttgaaacgcctgctgaacaaggacgcccctgacgaccgtcgacctggaaacgatgttcttggcctcctcctcccccttgggatggagcctgtagtcgtccatcccgagcccgtccaggacgacgtagagccccgagtagagccagtacaccgcaatcggcacgaaggtgcccagcagctcgtcggagaccgcaaatgccatcgccacttgagcgcgccctgcgaccgtcagc

SEQ ID NO: 82055 - DNA, 2062 bp, Zea Mays
ctcatcagtcctcaactcctctctctctctctctcaacgcacctttaatgcgccgtgatctctctcctccaatcccgacaaagtacaccatcgtctcctgtcttgatgttctctctctcgctcccccaccgtcctagtcctatcatatgctcctatcttctccttcccccggcaatcgtcctagctgcaacgcactagatctgtcgacaaacccaaccagaactccataaaatagtgtcgatcaccacaggcaaacctccctccccgtttctctctctttcactctttttctctctccaagaaataattgactccaacgccaagcgccacaagcacaagcccttgcttgcttgatgtcactctttcgctctcgctagctctaacgccaccgctgacggcgctgccgagcctccagtccaccgcccaacgtcatacaccaagtcaggtcagcagccccacaagaacacttcgtaggtcagcaaatccattattagtaccgatatttctccaggtccctgaagagaaagcatcgtcttgtgtatttatatataccatggcctgatcggctatggacgtcaccggagatgccggcggaggtcgccgccccaacttccctttgcagctgctggaaaagaaagaggaacagccctgctctacgtccccagcggttgctgtgggtgctggggctaatgggtcgggagagatgcagatgaagaaggtggcggcgccgaagcgcacatcctccaaggacaggcacacgaaggtggacgggcgcgggaggcgcatccggatgcctgcaatttgcgcggctcgggtgttccagctgacaagggagctggggcacaagacggacggcgagacgatcgagtggctgctgcagcaggcggagcccgcggtggtggcggccacgggcacgggcaccatcccggccaacttcacctcgctcaacatctctctccgctcctcgggctcttccttctccatcccagcgcacctccgtgcggccggcccacgcttcggcggcgcgcggggggacccgtgggagcgcgtcgtgggagtgggactcgggttcggcgccgccgccgaggaccctccgtccgctacgtcctcggcgtcgtctcctctgctgctgagtttccactccggcagcgtcggtcttgacgtgtcgccgtcgccgtcgtctgccgccgccggctccgacctgtcgaagaaacggaggtgggagcaggaaatgcagcagcagcatcagcagcaataccaccagcagcagcagatggccgggtacacgacgcagagccaaatgccaggcgccgtgtggatggtgccgagcgcgagcagcaacgctcaagccgccgcagcggctggcggtggcggcagcaacgccaacgagtcgatatggacgttcccgcagccagcaagcggcggcggcggcggcgcggcgaccgtgtaccgcggcgtgccgagtgggctacatttcatgaacttccccgcggcgcccatggcgctggtccccggtggtgggcagcagctcgggctcggcggccccgtgcccgtgggcggcgccggcaacgacagtagtggcagtgccagcggcggcggcggcggcgagggccacatggggatcctcgccgcgctgaacgcgtaccgggcacatagtgccgtcccggacgctgcgccagcgcagaacggagcggaaggcggctctcgtcagcgccagcagcacggcggcggcggtgagcgacaggagagcgtgagtcctcccagcgacggctcgtagcgtcttcggagttcggaggcgtgtgcgtgcactgagtttacgtttcatggcatctgggactgggatagacggatagtcactcactgtccgcattattcgttttggtgtcaccgatcacgcgtcgagggaagacgatccaggagggaatccatggaggcgagaggcttcgcattgttaattagggtttaacgggcctgcatgacggagatggaagagacattggcagcaatgtatgtatgtttgtacgatacacccatgcattgtccaatgttcaatcttgatgac

SEQ ID NO: 82056 - DNA, 1103 bp, Zea Mays
attaaatcgcccacaattccctgtcctccgcggctccgcctcgatacggccgtctcctccccgctttgctccccacgaagcaattctaaatcctcgcgcagaagatcggatcctccgtcggatccggatcggtgcttgccctccctgctcggatttctggcagccctttcctaccccctgaattcctgtgcggattccctcccctgccctggcggttgctcctgttgcctggtgggaacttgagagaagaggaggggttggtggggtggaaggcgctcgtgacccggcccgtggagatggctggcgtgaaggagccgatcgaggtgaagttccggctgtccgacggcaccgacatcgggcccagcaagtacgatcccaacaccaccgtcgccgcgctcaaggagttcgtcctcgcccggtggccgcagataaagaaatagctccaaaaactgtcaatgatgtgaagctcatcaatgttggaaggatactggagaatagcagaactcttgctgaatctcgtgtcccagttggagaagttcctggaagtgtgattacaatgcatgttgttgtgcggcctccccaatctaaaaacagtgagaagcaacagtcaaactctccgaagccaaacagatgtggatgcacgatattgtgacgttgatgcaagtagcaatgtgtatatcggtgtccacagagatcaatcacaagttcatttagcaattgattcaatctattcttcacaacctaagcctagagttggtgttacggccagtcacatctggcttgagaaattgatgcttgcggtcgtgttcgagtgtgcaaggagttcacagggtcctggtaaaaccctgaaatcggtgtggactcaaggaattggatgtttgctattctgtaatgtgtggagacagtgataccagaagtgagttgctgcatagttacatcggagacaattcttttttcgtaactcggttgcgtgtatcagtatttctgttttgtaatagaaaaaggttgaccggctattgttggcataaagtggtaaggaatgggggtcccctaaggaatgctgtggtttgacatgggaagatgaaagtgaataatgagtacca

SEQ ID NO: 82057 - DNA, 1738 bp, Zea Mays
ctcgcaccgcacccaagaaaaccgccggctgccttgcaaaacagccaacctcacagctcacagtcacactagcgttgtcctctcgcggaagcaaaggcctgctggggtgcgcgtgtccgtccgtgtgcgcgggcgcgccacagccatgacgaaccaggacgtggtggtcccggacatgggcattgcggcggctgcggccttgccgccccccggcctcttcgcgtgccgcggcgtcgcgggggccgtgtcgtcgctgcggggcacgtacggcagccttggcctccccggcggcgccgccgccgacggtggcgagttccgttcccccgtggcggcggcggcgaatgcgccgccgggtcggaccagctgcaccagccgggtcgtcgaggccatccgcgcgtcgtcgcccgcccgctgccccgccgtcgacgagtacgacgcgtggacgaggaagcacccgtcggcgctgggcagcttcgaccagatcgcggcggcggctaaggggaagagggtcgtcatgttcatggactacgacggcacgctctccccgatcgtcgccgaccccgacatggcgttcatgacccccgagatgagggcggcggtgcgcaacgtcgcgaagcgcttcccgacggcgatcgtgaccggccggtgcatcgagaagtttcgtcggcctgccggagctctactacgccggaagccacgggatggacatcaaaggcccaaactccaaggaggacaagacggtcctgctgctgcaaccagctcgcgagttcctgccggtgatcgacaaggcttacaaggctctggtggagaagacgaaggacacgacgggggccagggtggagaacaacaagttctgcctctccgtgcacttcagatgcgtcgacgaaaagagctggagctcattggctgagaaggtcaaggccgtgctccgggacttccccgagctggagctcaccgagggcaggaaagtcgtggaggtccggccgtcgatcatgtgggacaagggcaaggccgttgagttcttgctcaggtcgctcggattcgacgacgaccgcaccaacgtcctgccggtgtacatcggggacgaccggaccgacgaggatgctttcaaggtgttgagggagagaggtcaagggatagggatccttgtttcgaaatgccccaaggagactgatgccacctactctctccaagatcccactgaggtcatggagttcttggtccgtctggggcagtggaatccactgcgatcaccatcgccggcggcgcgcccaagggggcgaaagcagtaacagacgacgacaacaacagatcgctaagcgtgtttaatttaattatagttagttagttagtttattaattgttgcactactctaggagtaataaccctcctcgacgatctacatacattaccccatcgtctcagctcagctcccggccccagatgtgaactctggccggccaacctgctgattgtgttcgatcagacgttcttccatatgggttttagaggcacaggcaggcatccatgtgcaaagctgcctgccgcctttgattagcttaacccaggaaggttcatctgctgtatgagttgtgtagtgactacctagctatgaccttagcagcttaattattagcccgtctactgtaaaatgtaacatataagcaactggcagaattttaatatgcacttcctttgctctgaggacccaacctcattgcatgtgctgtgttgaat

SEQ ID NO: 82058 - DNA, 2738 bp, Zea Mays
cattttgagaattacgtaaattttttttccaaagatcttaaattagatttttttagaattcccataactcttgaagtcacatctcctaaaataaaagttttataataaagaatcaataaaagattcttctataaattatcttttgttgaaacgtataagaacatcttctaataagtaatcacacactagaaactatttgtcttaaaataattatatgtgtgctacatatccaaaaacattttcttatgtaggataataaataaatgaataaataaaataaaatgaatacttgcatctcatgctggttcttatgattgtgcatttaattgaatttgaaatccaaaaccaaatttgaaagtggatttgaaaatttaaaaataaaaaaaaaatagaaatgaacaagagagaaaaaaaaaagaaaacagttttctcctgatgggccgaattcctagcccttcagcccactccctttcctccttcaaccagcccaatccacgcgtttgacactggcgggtggaacccaccggtcagccttgggcttgattccgcccgcgcttgcgcttcccgttgtcgcggcttgtcccactgccagcctcggcttcgtgttgacgtggggcccacttaccagacactggtcagcctgcccatctttttttcactgatgcgggggcccggcttgtcggggtttcttccccaaccgaagccttgcaacagcttgccggaaatctgggctacgcaacaactcgaccgcccccgccggacgtactccgcggactccgggcttctgtatcggactccgccgcttggctataaaacctgggccatgatctcttccatcctgtcttcatcgaccaccattgtgcgccatggcggggaagggacagatcagccgctaggggtcatagtcaactgcgtgtgccgctcggtgctgcttcaccacatggaggaagattggatggccgccgagagctccttgccgcgcggggtgagagcttggatggcgactccttggatgaaccgtgcagcaccgctgcagcaatgaggggccgccaacctcggtctcgcggaagggcgctgggttgaggagaagcatccaagacatctacaggtttggaggtgtcgcagggtcgcccagaacatcttccctatcctcgcgcgtgcgccagggcagaacttccgggtcgccgtcgccgctgtgggggagggaggtgcgtgggcgagattgagtccgccgtgtcagccggccgcacgcgtgctcttccgtctcacaccactggcgcgtgggcccctcctgacgggtcgtcctcttcccgaagccacgactcgaaacgagcttcgcttctggcggtgggctgagtgagggcggcttcaccggttctccatgattcacgcagaggtttggatcggtttggccaagctcgtcctcgaccacagcacgagatctggggaaggattgcgccgccactggctgtctctgcgcggcgaacggtttcacagctctgatgtctgcggggcgtcgtccgtggcctcgccggcggctagcgccatcgtgggatgcctgcgcgtcttagaggatctggccggaggtcggtgatggcctcttggccgttcgttcggctgtggatggctaggattgaatctggtgagggagacgaccctggcatcgttggattgtagaggggtggtcacgattaaagttagtagtgacctgttggcccctccgatcctagccgccgatcaagccaccaacgaccaagattagtcggccctgtaccgtttcatccgggcgatcttgggccgttggatcgaaatccagtgaccccgggtgcgtaccgattcatcatttaatctgggccgtttattgtaatctgtgcgaccgagatcccacgaaaccctttcggctgcgtaacattgcaaaagagtccctgattagtttaaaaataaacccgccgtcctatgcggctgtacactgagtcttggaatatttgcgacgtagtccctgtgttttctgtaaatagtgcgctcggtccagagaacagaaaatcaaaggaattcatttagaaaatacatttttgtgtgagaataattataggaacttaattaattcctagaaaatgcattttaactccttttaatctatcccagtccctataattttgtattaatattatttaatacttagtgtctctattttaacacgaaaatgatattaaaattcatttcttagctaatctcgtatcaaatacataaaacctcaagaaattcgtatctcctccgttttaactccgatttgatccgttcaaattgcgctagtctcgtagaaacgcatagatcatccttattcagtttgttcttatgtttggtgtgatgttaattttagctataccatgtttgtctgtattgctacgactagcagtgaggtcacgagtcatctgaagatcatcctggtacctggaatctcaagtcccaggcaagttgtgcccttgatcacttctttttacccactcatgttctaattaatcataatgatctgcataggttaatttgatgggacccaataggttaccctagtttgtctatctttataccttgtttaccactgaactttttgggtagtacttgctagtgctttatgtggttttgggtatgaagatacattattcatgatcacacttttattatctgtttattatcactgttcatgataagatcattatgttaattggaacatggagaac

SEQ ID NO: 82059 - DNA, 1081 bp, Zea Mays
aacaggtgcatagaaagccctcgaggccccagtccattccctaataatcggctatcctgtcagtttccctctcccctcccgaaaccggattccgtaccgaatctggtctcgccttggagccgaggttgcacgcggttcgtcctgcggccatggaggacgaggagcacgaggtgtacggacaggagatccctgttgacggcgaggacgtcgacatgtccgccggcgacgacgcgaccaagcttcaggagctcgatgagatgaagcgccggctcaaggagatggaggaggaagccgccgcgctccgcgagatgcaggctaaggtcgccaaggatatgcaagatcccaatgcaaccacatctgaaaacaaagaggagatggattctcggtcggtattcgttggaaatgttagtctgctgtcatcaagcctttctatcaaagttttggcatctggttcagtttcagcacaagttctagtgttagcttcgtgggggaaagaaaaaaaagaaggaaaaaaaatccaagaaagttcttgaaaaaagaaagaaaaatagaaaaacaatttgaaaaagcaaaaaaaaaagtatacaaaaatggaaaaaaaatagtgatgatgtcataggctaggaattatcccccagggtagccagcagagaatgggtcaggcacattcatggtactgatgtggagtgatatcattagccatttactggcaatagcatgttgactatgcatgcactccagaagaagtgcagcagcatttcaattcttgtggaactgttaacagagtgacaatcctgactgacaagtttgggcaaccaaaaggttttgcttatgtggaatttgttgaagttgaagctgttcaggaagctattaagttgaatgaatcagaattgcatggtcgccagctcaaggtggcaccgaagaggactaacgttcctgggatgaagcaaccccgcggtcgaggtttcaatccataccggccatatggttatagtccttatggttatggctatggctacgggagattccccagattccgccgcccgcgaagaccttatttttgaagctcggttcccatctc

SEQ ID NO: 82060 - DNA, 1285 bp, Zea Mays
aacaggtgcatagaaagccctcgaggccccagtccattccctaataatcggctatcctgtcagtttccctctcccctcccgaaaccggattccgtaccgaatctggtctcgccttggagccgaggttgcacgcggttcgtcctgcggccatggaggacgaggagcacgaggtgtacggacaggagatccctgttgacggcgaggacgtcgacatgtccgccggcgacgacgcgaccaaggagctcgatgagatgaagcgccggctcaaggagatggaggaggaagccgccgcgctccgcgagatgcaggctaaggtcgccaaggatatgcaagatcccaatgcaaccacatctgaaaacaaagaggagatggattctcggtcggtattcgttggaaatgttagtctgctgtcatcaagcctttctatcaaagttttggcatctggttcagtttcagcacaagttctagtgttagcttcgtgggggaaagaaaaaaaagaaggaaaaaaaatccaagaaagttcttgaaaaaagaaagaaaaatagaaaaacaatttgaaaaagcaaaaaaaaaagtatacaaaaatggaaaaaaaatagtgatgatgtcataggctaggaattatcccccagggtagccagcagagaatgggtcaggcacattcatggtactgatgtggagtgatatcattagccatttactggcaatagcatgttgactatgcatgcactccagaagaagtgcagcagcatttcaattcttgtggaactgttaacagagtgacaatcctgactgacaagtttgggcaaccaaaaggttttgcttatgtggaatttgttgaagttgaagctgttcaggaagctattaagttgaatgaatcagaattgcatggtcgccagctcaaggtggcaccgaagaggactaacgttcctgggatgaagcaaccccgcggtcgaggtttcaatccataccggccatatggttatagtccttatggttatggctatggctacgggagattccccagattccgccgcccgcgaagaccttatttttgaagctcgtatgtccatatggtttgcagaacatggacgatgagacggcttgaccttatattcccgcgtcctattacttcatagcttattcgggatgttctcagacatgttattcccatattgacgatgcttaagatttgtactgtattgtttcagtgacagttacgcaaaacgattatgatctagttacgcggaaaggtactgttgtgacgctgcttggggtgatgtgc

SEQ ID NO: 82061 - DNA, 727 bp, Zea Mays
ggaaaatggggttcccaaactaaccctaagtgttgtttaccttgtctttttttcccttgaacttattttatatcttaagtaggtagagttgaatctgtcttttagcgaagctgccaatggctgcataaagcaagtgtcctatcatgcaaaaaatgtttgtgattcatgtggtgggagaggtcacttgccaaatgcaaagatatatgtttgtccctcatgtaaaggattgggaagagtcactatgtatccattcacatccgtttgtagttcgtgcagaggcatcgggaaagtaataaaggattactgcttgacatgccaaggttcaggggtagtaggtggtatgaaacatgtaacattggatatgccagcaggacttgattctggtgacacaatcaatgtaccggaggctggagatagtggtggacttggtgtccagtctggaaatttacacataaaaattcaagtgagagtccatatccatgcacggttctttttacacatatatatcgtgtaagaaaacatgacactaggtttaagctgttttgccctaacctattgggtagagtgtggctgagtatatatagggcagaatactgccatcaggattacaacatggcgggggttcaactcgggtacaactaccttaatcgactcttattctaaccctgctatctataggacagatcaaacctgattcttttctatctttaatcaaaatcggttaagg

SEQ ID NO: 82062 - DNA, 809 bp, Zea Mays
gaacaattcaagtagaaattgatccgttgtttacccgagatggtgctgacatccatgtcgataaaaggataagcttcacacaggcaatgcttggtggaaaagttgaagtacctactttaaatgggaaaacagaagtgaagatacccaaaggagtccaaccagggcaagttgtagttttaagggggaaaggattgccaaatccgtcaggatatttgggggaccaatatgtccgattccgaattcatttcccctcggtggttactgaacgtcagcgcatgctgctggaagaatttgcagtagaggaagctgcgaaagaacataacacttttgtagcaggaaattggtgggagctagttgcagaaaatatgacaaagcaaaatgtcatggtcggaatcggcatcctcctactgattcacctaatgctgagcaaagctatgaattaaggcttggacccatgctcatttgtgctggggcagtggtggggcaacgtcaaacagtaaaaattctccgaagattcagcataaaacaataaaacaatgagattgtgaatctttaaagactattttcacccactagagatcacaattttgaaggtgttggttagaaggttgttgatttctatggtaaaatacattacaataatatctgctcacatagttctgaactatatgaagctgtcaattgagttgccttaattttttccccctctttcggtgtaaatgtaatgtggatgctctacagttggaatagttcaacgtgctgggtgaaattgaatgtatcttttaaattcacccatcttgtcttggatc

SEQ ID NO: 82063 - DNA, 363 bp, Zea Mays
gtagaaattgatccgttgtttacccgagatggtgctgacatccatgtcgataaaaggataagcttcacacaggcaatgcttggtggaaaagttgaagtacctactttaaatgggaaaacagaagtgaagatacccaaaggagtccaaccagggcaagttgtagttttaagggggaaaggattgccaaatccgtcaggatatttgggggaccaatatgtccgattccgaattcatttcccctcggtggttactgaacgtcagcgcatgctgctggaagaatttgcagtagaggaagctgcgaaagaacataacacttttgtagcaggaaattggctttatcagcagctatctactggttaatac

SEQ ID NO: 82064 - DNA, 286 bp, Zea Mays
gtagaaattgatccgttgtttacccgagatggtgctgacatccatgtcgataaaaggataagcttcacacaggcaatgcttggtggaaaagttgaagtacctactttaaatgggaaaacagaagtgaagatacccaaaggagtccaaccagggcaagttgtagttttaagggggaaaggattgccaaatccgtcaggatatttgggggaccaatatgtccgattccgaattcatttcccctcaataaaagtaatgattagtcatccctggagcggaaaagagtcga

SEQ ID NO: 82065 - DNA, 2255 bp, Zea Mays
acaccactggccactagttgccaaccccacgcacgttctgcgacgagctaccccatttccccacccccagcaccccactccccgcttccatttccttggaccccaccaccgcgcctacatccctcagagctcagatgcagccgccggcgaccgagatgcacccggccgccgacgccgccacctccgccgccaccgcgcaggccgacactactgctcgcgccgccgtccccgcatccgatccacccccgcccccgccggcgccggcggctgagacggtcgatccgccgcccccgccgccagcgccggcgcccaagacggtcacctggagcgagaagctcacgtccgactcgccgacgcacgtgcacgccgccgccgcggcggagtccagccagtacgtgtcccgtgggcccgcatcctcgtctaagggcgccgtggaggcgatgagggagacgctgtcaaggtgggggaagtcgtggggggagaccaccaagctggtcgagagcctcagccgcgacacgtggcaacactgtgagatctcagcagccctgcaagcgatagcagggtcttctcctttccttctaagagtccaatgtgctcgtttctttgcttcattcattccttgagctgcacggattggtaggatgcaacctttctaaggatcaaaggaaagaatcgacatatataaagttgcaagcgtactgtgctagacaccttttgagaattatgctgaggtctggtctggggattgtagagctggggaagcaggatgccccaataaaagaagccaacatgaacattttggtgtagctttccatatgctttatgctttgttggctaagtatcttcataagtttactttgttttaaaataattctttaagccttgttacccaaaaacttgtcccagtataatattaagagactgaagcattggtcccggccgaataaaatctccgaaccctggcctcccatcactaacgggccgacatcaaccgtctactctgcaacggcccaaccggagggcacaccgaggggatttttttaaccaagcccgaaaattcgcccccgagtataatggaacccgggacttggaggtgctactcgaaagccttaaccactatgctagaggcccttttgccaaacatctttgaacagatctaacaacagtaagattatgacattaccttttacgtatcaactgattaaggcttttggctaaatacctattttcataaaacttgtgatgaccaagtttcttgcagtcgaccggttagaactttgaactctggtagttgattgaagtcccatccaacccaagtttgaagcacaacacctcttaacacagccatgatgcagtcccgtgttgtgatgtacttcaatgaacttataagatcaaacttcaaatcattgaaaaattgcctatagttgtagatcataggctatgttatagatcttccaagaatttggctattgttccaagtgaagtgagacattggctgatagttgatagccaacccgcaagatcctgtattaaccttcaaatctaattgaagtcatgggaagtaaacctaggatctatttgattcaattatagattcctaaaaatccgattctagctatgagctaacggttatgggaatgacgtggcaacctgacaggagggacgctgccctagcctcttgaacgagccaattcgacagcgggccattgtcgacgagggagcggtacgctgtaccgcgggggttgggggccctacgttcgcaacgctaggctgaagcgtcgtggttgtagtcacgcctactccaacgcatgtatggcaccctacatgagcaacatgcacaatggcagcaacaactaaaccgctaggtgttgcgccattgtcttccatgggtatagtctcgctgtcattgaatatcaaaataggggctggggaggtgctgaaggtggtaacatcagatgggcacgaacaactattgttttcagatcgcctgatcaatcccactgggcgattaggcgtcaatatatatatatatatatatatatgtatatagtatttagagctctgggctctatttaactacaggaaaccctgaccaggtatgcagaccgcacgaaccctttttggcttattgtacctatctgtgcttacgctaaattataatacaagttatgctgatgtgtgtatcagtttatgcaaatatagtctgcgcatattacgtgaatcgggcccacgatcctgcccacgcgctcactatt

SEQ ID NO: 82066 - DNA, 2220 bp, Zea Mays
acaccactggccactagttgccaaccccacgcacgttctgcgacgagctaccccatttccccacccccagcaccccactccccgcttccatttccttggaccccaccaccgcgcctacatccctcagagctcagatgcagccgccggcgaccgagatgcacccggccgccgacgccgccacctccgccgccaccgcgcaggccgacactactgctcgcgccgccgtccccgcatccgatccacccccgcccccgccggcgccggcggctgagacggtcgatccgccgcccccgccgccagcgccggcgcccaagacggtcacctggagcgagaagctcacgtccgactcgccgacgcacgtgcacgccgccgccgcggcggagtccagccagcgccgtggaggcgatgagggagacgctgtcaaggtgggggaagtcgtggggggagaccaccaagctggtcgagagcctcagccgcgacacgtggcaacactgtgagatctcagcagccctgcaagcgatagcagggtcttctcctttccttctaagagtccaatgtgctcgtttctttgcttcattcattccttgagctgcacggattggtaggatgcaacctttctaaggatcaaaggaaagaatcgacatatataaagttgcaagcgtactgtgctagacaccttttgagaattatgctgaggtctggtctggggattgtagagctggggaagcaggatgccccaataaaagaagccaacatgaacattttggtgtagctttccatatgctttatgctttgttggctaagtatcttcataagtttactttgttttaaaataattctttaagccttgttacccaaaaacttgtcccagtataatattaagagactgaagcattggtcccggccgaataaaatctccgaaccctggcctcccatcactaacgggccgacatcaaccgtctactctgcaacggcccaaccggagggcacaccgaggggatttttttaaccaagcccgaaaattcgcccccgagtataatggaacccgggacttggaggtgctactcgaaagccttaaccactatgctagaggcccttttgccaaacatctttgaacagatctaacaacagtaagattatgacattaccttttacgtatcaactgattaaggcttttggctaaatacctattttcataaaacttgtgatgaccaagtttcttgcagtcgaccggttagaactttgaactctggtagttgattgaagtcccatccaacccaagtttgaagcacaacacctcttaacacagccatgatgcagtcccgtgttgtgatgtacttcaatgaacttataagatcaaacttcaaatcattgaaaaattgcctatagttgtagatcataggctatgttatagatcttccaagaatttggctattgttccaagtgaagtgagacattggctgatagttgatagccaacccgcaagatcctgtattaaccttcaaatctaattgaagtcatgggaagtaaacctaggatctatttgattcaattatagattcctaaaaatccgattctagctatgagctaacggttatgggaatgacgtggcaacctgacaggagggacgctgccctagcctcttgaacgagccaattcgacagcgggccattgtcgacgagggagcggtacgctgtaccgcgggggttgggggccctacgttcgcaacgctaggctgaagcgtcgtggttgtagtcacgcctactccaacgcatgtatggcaccctacatgagcaacatgcacaatggcagcaacaactaaaccgctaggtgttgcgccattgtcttccatgggtatagtctcgctgtcattgaatatcaaaataggggctggggaggtgctgaaggtggtaacatcagatgggcacgaacaactattgttttcagatcgcctgatcaatcccactgggcgattaggcgtcaatatatatatatatatatatatatgtatatagtatttagagctctgggctctatttaactacaggaaaccctgaccaggtatgcagaccgcacgaaccctttttggcttattgtacctatctgtgcttacgctaaattataatacaagttatgctgatgtgtgtatcagtttatgcaaatatagtctgcgcatattacgtgaatcgggcccacgatcctgcccacgcgctcactatt

SEQ ID NO: 82067 - DNA, 5247 bp, Zea Mays
cttagtagcaaagggatccgggtaggtagattagaatgagacattcgttgaaagaaaggcctagtctgacgcttcctaattgaatgaactgatcgaacttcttttcttcactccaaagcaaggagattatatgataatcagcaccaacgatttgaaggccaggatgaagtaatatcccttacgggaatcgaacccgtgtcttcgacatgaaaagacgatgtcctaaccactggacgaaagggaccaaaaagcaattcttcatatacctaagaaaagagaagagaatagaagtggttccttttctttctatacgaaattcgacgatttcgtttgtgttcatgttggcgatttcagatgtgaatgaggccggtcgtctccccttcctacgggttcccagtgacacatcaaccacgccccttccttttctccgatcataaataacctgatctctttctttgtctttcatccccttctttctaattcaaaaaagaaaggggggcggtaaggcgcctatggtttgacaggcaggctcgcaacttacaaagggcactcgctgctcgcaggcctgctctttctattatgatttctatgtctatgaaagctcctttgactccagccccataagctattctttcaccagcacctacgagacgactattgctattattttgcattgccattcttctggatacttcgaggggatctgtaaagagaagaaatggacaaaaaaatgagctaaagccaagcgaacaactcgagtgaaaaagccaggaaagaaaagctctaacttgagtaaaaaagccaataaccaagataaaaaaagctcagcgagcgagtaggttaggtaaaagacactaagctaagattaaaggtaagtaactagtatcgatccacgggagcaaggaacaagaaaggtcttgagctgccaagaagaatgtacctgggtcgggagcaggggttggtggaacaactggacaagcctaagtatctagctttgctcaccttgttgaaactagccccgttgcaatagagaaatcctttcccgttgagaatgaacagctttaccattccactgtctttgctggaactgctgtcctcactgaactaactgtccgtttcacttgtcccgtagctggcttggaataagaaaagtcttttcttccttccccgaaaggaagagttttgggcttaaggcataattgctctattgcggctacccttgctatgttatccgatgctgttcacaaagcggctcttactatagctatagacccggctatctccgagttgaaattgaacccagccccgtccatcaatccagagctcaagacaaccgcgatacttaaatcgctcaaatagccagccaccttagacggacacagccattagaagaagaaacggaaactcgatggagtaccagagatcctcgacaaagaaagtcccgattcgaggaacggaatacatttccttgattgaaaagaccggtaagagaaaagaaagtaagcatagtcttctgaaaagaccgggaaccgtttgattttccgtcaacgaagaacaaaaagtaacactgtgcaaactcatctgatccctgtttgggacttcttcttcatgtcacgagccggaatcgaaccgtaaaatgatcattcattcaaagtagacttttgtcatagggcaaaggagcttagaagggtgatgtagggaagtcgtaagggatgaccttagatgttgtatgacggaacgatgacttaatgcttccatttttgcttgagaaatgacgtaggtgatagactcactccttctttccatttttgattgagaaagcgtctggcccaaagaggtctacagtagtgccttgcaaggtcgtagacccggtaacccatcgttcgcctaagatcgaaaatgcgatgtgacatcactcttcattcagttcagtccatttgcttaacacatgcatgtccaaagagatggcgatgatttgtcaaatcgagattgtgtgggtgttcagtggatcaaaccctgtattaatggttctggcaggctgctggcgtgggacttctttcgctgggccctttggactctaaatccttccggagtgagtggttcgattccactctcagaacgatcaagttattccgaaagaaaatgcaagtgaaacgagacgagaatcaaataaaattgtaggcttatttcctaaaagcggtggttctcgcctccctgtgccgcggggtgggcgactgcggttcgagtctttttcgatcgggtagatccataccatatgtttcggggggggggagacgaggtgtagcgcagttttggtcagcgcatctgttttgggtacagagggccataggttcaaatcctgtcaccttgatgtggtattcacaggggccgaagtgcaaagccccgtagcctatccgtggtcgggaaggcaggcgaaaagcacgcaccaaaaaaaaagaaagctataattttctttttttcttttcttctttcgtgtttgaaacccattatcaggcttttgcttttgatattctatatctatctaatattataaagctatttcactggtttgatttacatacctcagtcatgttatttgtctagccttcaatcagaatagcctctccaccggttccgaagattctttcggcatcaatgtgcttttggaatcttcctatgaaacaaataacattcaggaactgtttaggacagaacaggccgcagatcagtagaaagcgagcttttttcgcgtatagccaagccaacctcgaagcccaattagcgcacgggccctcaactcaaccctggcgagtacgctaacttggtcagggagcatttagacgatgcagttagtattgaccactaccgccaagtccataattcctaaattgatgaagtacacataatggagctcaaaagccgattacaaaatatacttttttagcatcttgaaaccgcacataataaatattatgaatgaatcaccttacaataacatacgagagactgctttcgattttttcgaacaacaagtcgaacccaatgaacaattccattcaaaggaatgttctagagggggcccttttccgctatattcgcgatattgaacaaaatggaagaaattcttcacgatttctagagttccgggattacttcactgatatcgattttttcctaaacacggcctctactctaggttagttcaaagtgtagtacaacgaactatcgatacaccgaaaacgagtaaagatgggtacataaaatgaagacatcgtggattacccaaattgggacgacgataggacatttcactttctttcgcaatatttctgatcatgactcaaccactaggaaaggggattgcttactctcagccacgtttttcgcttatgcttagtcaagtgaggattccattcgaagtaacgtaacaggagcaccatcttcaaaacttctcgggatccgaagtttatcgagaaaaggtcccatccttcaatatcatgattgggtcaaccaggccagatcataagttcaatagtttgatcgggtcgaccaggtcaggcccgatcatgagtgaatagaaaatcgaaaacgtacatagctgttccagcggaaatactttgtttaattctaccacttctactaggagtagcctttttagtgctagctgaacgtaaagtaatggcttttgtgcaacgtcgaaagggtcctgatgtagtgggatcgttcggattgttacaacctctagcagatggttttaaattgattctaaaagaacctatttcaccaagtagtgctaatttctccctttttagaatggctccagtggctacatttatgttaagtctggtcgcttgggtcgttgtaccttttgattatggtatggtattgtcagatccgaacatagggctactttatttgtttgccatatcttcgctaggtgtttatggaataattatagcaggttggtctagtaagacgggggggcggccgttcggtcgcctatgatatacggaccaattggtcaaaaatgggtttgtgccgcaggtgttgaacgatctactctacacaggtgtgggcttacagggctagggctcataaaccctttctttcattgggtcggtcacttttccgggccgggatcgagaagtggaagtcataaaaaatgatcttcgcacccgaaaggtagcttgtcaagctggtctcactattggaatggaaattctagctttctttttggctcttcttctttgtcaacgctactaaggacctgacggttcgcctacttgatgaatgaaagaacatgagaaagggttctaaaagaaaaggcgacgaaagtatactacactacactacagtacagtcaaagtcagcggctgagtgcctcgcctactattttttgtaggcgagcgagttagagaagaggcttagggataagagagtgtcggtgcgtacgtagccttcattctactacgctacacaaagtcacttagctcgacgttaattaagagagtaaaggaggaataccctacatagaagaaccgttgttcgcttacaaaggtataacctttcgctccccggggcaaagctgcttcgcaccactgatagacgactacttaattaagattccatttcaaaggcgctactttgtttcgcaagcctttgtcattgtcagtcaactaaggttggccctcggccccctgcgaatccgtaaatcagagagcatgccgcaaaaaaaaggatggtcccctatgcattgaattctttccggaacgaaaagaattcaagtacctgacccccccatcatggtgaacctctccttgtgatcgggatgaggtagatgcctcccagccggggggcggatcgaatcggagtttccttaggtagccaccgacctacagttctccttaaacttctgtgcttggtggaaaagaagcgaacaaaggttttgtgaccaccactgatgcttgctgtgggctgggcaagtatggaggcctattctattcatgtgtgttcttccacggatggcgtgctgcgacgcatcgagccatgtcgggtgcaattcatctaactaactccaccttcctcctacgggtctgcagtcaaaagagttgttcagtcatatggtatgtatacataaatctgcttttcactcttctgcaatgggattcggacatgatccaatcgaccttcctctacttgttgatggcctgtactgtaaagaagagcccagcggatggaagctgttga

SEQ ID NO: 82068 - DNA, 719 bp, Zea Mays
tctgaacagaaggaattgactggtagagcagagcaaatacagcggcttgaacgagcaacttgctgaagaaactaatggacttagacagatgagaggtgaagaccttgagggattgagtgtagaggaattgcaccgaatggaaaggaaacttgaagcaggactgcatagagtgattagtacaaaggaccagctattcatgcaacaaatcggcgaattactgcaaaagggcacacagctagaagatgagaacaggcgtctaaaagaacaaaaaatatcctcactgaagacgggcagtcgtctgaatctgtaatgactgcattgcattcaggaagctcgctcgactgtgatgatggttccgatatttccttgaagttgtcgttgccttgaaaggaaggaccatcgcatcgcatgttatctgcatgagtggggctgacaccagtgcttctaagaagacaaagactgggatagtcccattcgcggcattatattggtttaaccagatgtgctgtccttgtgcatgtctgtacttcaaagtggctaacgcgaaatttgtatatataatagtgtatgcgctgcgttatcttcgttctaaaaatctgtattgtttcgttgctggcgctatattgttggtgtattatatatatgcacttaactgttatctatactattctattaaaaatataatatagacatctgatgctaccacggcttcgcgctga

SEQ ID NO: 82069 - DNA, 818 bp, Zea Mays
ggccgctataacataatgcttgttcgagtgtgaatgacatcgttgacaagtacagtacacattctaagaatctggggaaatcacatcagcagccttctattgatttgaatgtagagcagagcaaatacagcggcttgaacgagcaacttgctgaagaaactaatggacttagacagatgagaggtgaagaccttgagggattgagtgtagaggaattgcaccgaatggaaaggaaacttgaagcaggactgcatagagtgattagtacaaaggaccagctattcatgcaacaaatcggcgaattactgcaaaagatgcctcaggtgctaacggctggcacaattaatggtggttgctgctgctgcagaaaatatcctcactgaagacgggcagtcgtctgaatctgtaatgactgcattgcattcaggaagctcgctcgactgtgatgatggttccgatatttccttgaagttgtcgttgccttgaaaggaaggaccatcgcatcgcatgttatctgcatgagtggggctgacaccagtgcttctaagaagacaaagactgggatagtcccattcgcggcattatattggtttaaccagatgtgctgtccttgtgcatgtctgtacttcaaagtggctaacgcgaaatttgtatatataatagtgtatgcgctgcgttatcttcgttctaaaaatctgtattgtttcgttgctggcgctatattgttggtgtattatatatatgcacttaactgttatctatactattctattaaaaatataatatagacatctgatgctaccacggcttcgcgctga

SEQ ID NO: 82070 - DNA, 809 bp, Zea Mays
tgggccgctataacataatgcttgttcgagtgtgaatgacatcgttgacaagtacagtacacattctaagaatctggggaaatcacatcagcagccttctattgatttgaatgtagagcagagcaaatacagcggcttgaacgagcaacttgctgaagaaactaatggacttagacagatgagaggtgaagaccttgagggattgagtgtagaggaattgcaccgaatggaaaggaaacttgaagcaggactgcatagagtgattagtacaaaggaccagctattcatgcaacaaatcggcgaattactgcaaaagggcacacagctagaagatgagaacaggcgtctaaaagaacaaaaaatatcctcactgaagacgggcagtcgtctgaatctgtaatgactgcattgcattcaggaagctcgctcgactgtgatgatggttccgatatttccttgaagttgtcgttgccttgaaaggaaggaccatcgcatcgcatgttatctgcatgagtggggctgacaccagtgcttctaagaagacaaagactgggatagtcccattcgcggcattatattggtttaaccagatgtgctgtccttgtgcatgtctgtacttcaaagtggctaacgcgaaatttgtatatataatagtgtatgcgctgcgttatcttcgttctaaaaatctgtattgtttcgttgctggcgctatattgttggtgtattatatatatgcacttaactgttatctatactattctattaaaaatataatatagacatctgatgctaccacggcttcgcgctga

SEQ ID NO: 82071 - DNA, 1001 bp, Zea Mays
tttcatttgccgtcgcttcggctggagagccattcgtgggcgtaggacgagagagaggatcggcggcggcggcgtgtgggagatggcgcgcgagaggcgggagatacggcggatagagagcgcggcggcgcggcaggtgaccttctccaagcgccggcgcgggctgttcaagaaggcggaggagctcgccgtgctgtgcgacgccgacgtcgcgctcgtcgtgttctccgccaccggcaggctctcgcagttcgcgagctccagtgtgaatgacatcgttgacaagtacagtacacattctaagaatctggggaaatcacatcagcagccttctattgatttgaatgtagagcagagcaaatacagcggcttgaacgagcaacttgctgaagaaactaatggacttagacagatgagaggtgaagaccttgagggattgagtgtagaggaattgcaccgaatggaaaggaaacttgaagcaggactgcatagagtgattagtacaaaggaccagctattcatgcaacaaatcggcgaattactgcaaaagaaaatatcctcactgaagacgggcagtcgtctgaatctgtaatgactgcattgcattcaggaagctcgctcgactgtgatgatggttccgatatttccttgaagttgtcgttgccttgaaaggaaggaccatcgcatcgcatgttatctgcatgagtggggctgacaccagtgcttctaagaagacaaagactgggatagtcccattcgcggcattatattggtttaaccagatgtgctgtccttgtgcatgtctgtacttcaaagtggctaacgcgaaatttgtatatataatagtgtatgcgctgcgttatcttcgttctaaaaatctgtattgtttcgttgctggcgctatattgttggtgtattatatatatgcacttaactgttatctatactattctattaaaaatataatatagacatctgatgctaccacggcttcgcgctga

SEQ ID NO: 82072 - DNA, 864 bp, Zea Mays
cctcgcctcgctttcatttgccgtcgcttcggtgtgaatgacatcgttgacaagtacagtacacattctaagaatctggggaaatcacatcagcagccttctattgatttgaatgtagagcagagcaaatacagcggcttgaacgagcaacttgctgaagaaactaatggacttagacagatgagaggtgaagaccttgagggattgagtgtagaggaattgcaccgaatggaaaggaaacttgaagcaggactgcatagagtgattagtacaaaggaccagctattcatgcaacaaatcggcgaattactgcaaaagggcacacagctagaagatgagaacaggcgtctaaaagaacaaatgcctcaggtgctaacggctggcacaattaatggtggttgctgctgctgcagaaaatatcctcactgaagacgggcagtcgtctgaatctgtaatgactgcattgcattcaggaagctcgctcgactgtgatgatggttccgatatttccttgaagttgtcgttgccttgaaaggaaggaccatcgcatcgcatgttatctgcatgagtggggctgacaccagtgcttctaagaagacaaagactgggatagtcccattcgcggcattatattggtttaaccagatgtgctgtccttgtgcatgtctgtacttcaaagtggctaacgcgaaatttgtatatataatagtgtatgcgctgcgttatcttcgttctaaaaatctgtattgtttcgttgctggcgctatattgttggtgtattatatatatgcacttaactgttatctatactattctattaaaaatataatatagacatctgatgctaccacggcttcgcgctga

SEQ ID NO: 82073 - DNA, 773 bp, Zea Mays
ctcgcctcgcctcgctttcatttgccgtcgcttcggtgtgaatgacatcgttgacaagtacagtacacattctaagaatctggggaaatcacatcagcagccttctattgatttgaatgtagagcagagcaaatacagcggcttgaacgagcaacttgctgaagaaactaatggacttagacagatgagaggtgaagaccttgagggattgagtgtagaggaattgcaccgaatggaaaggaaacttgaagcaggactgcatagagtgattagtacaaaggaccagctattcatgcaacaaatcggcgaattactgcaaaagaaaatatcctcactgaagacgggcagtcgtctgaatctgtaatgactgcattgcattcaggaagctcgctcgactgtgatgatggttccgatatttccttgaagttgtcgttgccttgaaaggaaggaccatcgcatcgcatgttatctgcatgagtggggctgacaccagtgcttctaagaagacaaagactgggatagtcccattcgcggcattatattggtttaaccagatgtgctgtccttgtgcatgtctgtacttcaaagtggctaacgcgaaatttgtatatataatagtgtatgcgctgcgttatcttcgttctaaaaatctgtattgtttcgttgctggcgctatattgttggtgtattatatatatgcacttaactgttatctatactattctattaaaaatataatatagacatctgatgctaccacggcttcgcgctga

SEQ ID NO: 82074 - DNA, 1152 bp, Zea Mays
ggaaacaggaaaggagacccgcgcgcgccccatcgcctcgcctcgcctcgcctcgctttcatttgccgtcgcttcggctggagagccattcgtgggcgtaggacgagagagaggatcggcggcggcggcgtgtgggagatggcgcgcgagaggcgggagatacggcggatagagagcgcggcggcgcggcaggtgaccttctccaagcgccggcgcgggctgttcaagaaggcggaggagctcgccgtgctgtgcgacgccgacgtcgcgctcgtcgtgttctccgccaccggcaggctctcgcagttcgcgagctccagtgtgaatgacatcgttgacaagtacagtacacattctaagaatctggggaaatcacatcagcagccttctattgatttgaatgtagagcagagcaaatacagcggcttgaacgagcaacttgctgaagaaactaatggacttagacagatgagaggtgaagaccttgagggattgagtgtagaggaattgcaccgaatggaaaggaaacttgaagcaggactgcatagagtgattagtacaaaggaccagctattcatgcaacaaatcggcgaattactgcaaaagggcacacagctagaagatgagaacaggcgtctaaaagaacaaatgcctcaggtgctaacggctggcacaattaatggtggttgctgctgctgcagaaaatatcctcactgaagacgggcagtcgtctgaatctgtaatgactgcattgcattcaggaagctcgctcgactgtgatgatggttccgatatttccttgaagttgtcgttgccttgaaaggaaggaccatcgcatcgcatgttatctgcatgagtggggctgacaccagtgcttctaagaagacaaagactgggatagtcccattcgcggcattatattggtttaaccagatgtgctgtccttgtgcatgtctgtacttcaaagtggctaacgcgaaatttgtatatataatagtgtatgcgctgcgttatcttcgttctaaaaatctgtattgtttcgttgctggcgctatattgttggtgtattatatatatgcacttaactgttatctatactattctattaaaaatataatatagacatctgatgctaccacggcttcgcgctga

SEQ ID NO: 82075 - DNA, 901 bp, Zea Mays
aaaagatcagatgcatgaaaatagttgctgtgtatattcacaaatcccatgttgcttcagctttgagtggaaaccgagcccgatgcagtagcctctgaatcaaagacccaaaaggaagcaatcgacctgaaggaactcaaacgaattgatcatatcctgtcatccttgaaacggaagataggggctgctcctcccccacccccttaccccgagggctatgtcccaccatcagcagaacaagagaaagcgccggatgatgtggcagcatcagaggcaccgcctcaacttgaccctatcattgatcaaggtccttcgaaaagaccaagattccaatgaaagatttgtagcttaaacctgctgactcgacaacttcctgtatgctttaaagtcgccgacgtggactttataaatccattcttgctggttggttatttacaggccaaagacagaactaacctcgtggcatgatatctcgttctctgagttactagcttgaatcttgtagattggccagtgccatttgctccgggcttgtaatcttgtagataggccagtgtcatttgatctggtctatctacttagctatcataacttatgaggtggttatagttttgccttggtgcaaatctgcaagactggacatctcatacattatttactatgcatacttacgtggatttgtcaagtcatatgacctgatacagacggtgacggtcaccaattggaactgccattttctgttggtgtggatgaagtttgacactatgaaagtcccttggctgtgtaatactagcctgtatagaagtctaggcctaagagggctatgcatgtcttaatagtatgtactcaatgaacaagagaacaccattttattttatttattaattttctcgtgttgttt

SEQ ID NO: 82076 - DNA, 2539 bp, Zea Mays
gacagagtggtggcaagcaacaggagtctgaaaatttaatgcttgccgagaagcacaagactgagaaagagcagaataaccagctaagggatcagatttctcatcttttgaaagttgaacaagagcaaaacctaaagatgcaggaacgggatttaacaattcagtcactacagactaaactcaagtccattgagtctcagcttaatgaagccctcaatgctagcgatgctagatcaactattgggtctgaatctgcttcagtaatttcttccccaaagataacagaatcaactgctgactcatcttcagtgacgaaaaggcttgaggaggaattggcaaaaagggatgcccttattgagaaattacatgaagagaatgagaagctttttgacagacttacagagaagtcaggattaggaagtgctccacaggagtgacagcagcaaaagtcgatcaccagatgtgtttgcatcaccagtgtctcaggataaaactggaaacagtggagctattgtaaaatcaagcaatgagctagcaaaaactacacctgctggggagtaccttacgtctgcactaatggattttgatcctgaccagtttgagggatttgcagcaatagctgatggtgctaataagcttttgatgctggtcttggctgcagttatcaaagctggtgcagctagggagcatgagatacttgccgagatccgtgatgctgtgttttcattcattcgaaagatggaaccgaaaaaagttatggatactatgttagtttcaagagtcaagatattatacatcagatctttgcttgctaaatcacctgaactacagtccatcaaggtctctccagttgagcgtttcttggagaaatcaaatactggtcgaagtagaagttctagtaggggaagtagtcctggcagatctcctgttcaccaccatggtcatggttcccgaactgcgcttgttgatgaacatgtgcatggtttcaaggtgaacattaaacaggaaaagaaatcaaaattctcctcaattgttctgaagcttcgtggtatcgaggaggagacatggagacagcatgttactggagggaagctccgggaaattactgaggaagctaaggccttttcaattggaaacaaggctttagctgctctctttgttcacacgccagctggtgaattacagcgccaaattcgtgcatggcttgctgaaaactttgagtttctatctgtaactggtgcggatgctgctggaggagccgcaggacagcttgaactgctgtcaaccgctattatggatggctggatggctggtcttggtacagcgcagccccctaccactgatgctttaggccagcttttatcagaatacacaaagcgtgtttacacatctcaactacaacacttgaaggacatagctggcacattggcaacggaggaggctgatgatcctgcacatgtcagtaaactccgctctgctctggagtctgtggatcacaaaaggagaaagatcatgcaacaaatgcgaactgacactgccttgttaacaaaagaagaaggtggctcaccaattcgcaatcctcttactgctgcggaggatgcacgattagcatctctcatatctctagataacatcttgaagcaagtcaaggaagtaattagacaaagctctacaggacctatgagaaaatcaaagaggaaagctttgctagagttattggatgacctcttgacacagatgccctctcttcttgatatagatcatccatgtgctcagaagcagatcatggaggcacggaaagttgtcgagtcactgcaagaagaccctgatgatcctgccccacagtctaatgcattgggagagggcgaggtttcacagtggaatgtactgcagttcaacacgggaacgactgcgcctttcatcataaagtgcggagcaaattccagtggtgaactggtgattaaggctgatctgcgagtccaggagcctaaaggtggcgaggtgatccgtgttgttccaagaccaacagttcttgcggacttgagttttgaggaaataaaaggtgtgtttgagcaattgccagaggcagttagcttgcttgccttggcacgaacagcagatggtacaagggccaggtattcaagattgtacagaaccttagccagcaaagtgacggccttgaaagagactgttgcagagatggagagaggtggtgttttcaaagatgtacgataaatgctgtgttattgtagagttatttatgatattgatgttgtatatggatgccatttgtcggcatcccttgtaactgtatttgtttttactatgtggaaacctatgttgtaacactattctttggcaagagatgagccttgcctgccccaacccgtaatactatggttgtgcaaggcattaatgtaaattgtagctgcagctgataaatgtctgcagtgctgcaagtctgaactttccaggttatggaactattcaatgtttatttgtattaagcttttaagatgttaaaattgtgctagttttg

SEQ ID NO: 82077 - DNA, 2705 bp, Zea Mays
caacgttgggagcaacatcatccgccacgctcgccctcttcctccactgcattccatcacaacccaccactgcttgccgtcaacagccttgcctgatcctccatggtggtgacagagtggtggcaagcaacaggagtctgaaaatttaatgcttgccgagaagcacaagactgagaaagagcagaataaccagctaagggatcagatttctcatcttttgaaagttgaacaagagcaaaacctaaagatgcaggaacgggatttaacaattcagtcactacagactaaactcaagtccattgagtctcagcttaatgaagccctcaatgctagcgatgctagatcaactattgggtctgaatctgcttcagtaatttcttccccaaagataacagaatcaactgctgactcatcttcagtgacgaaaaggcttgaggaggaattggcaaaaagggatgcccttattgagaaattacatgaagagaatgagaagctttttgacagacttacagagaagtcaggattaggaagtgctccacaggcttcaagcccttcagcaaacaagccagctaatggtcaaggaagggagataggcaggagtgacagcagcaaaagtcgatcaccagatgtgtttgcatcaccagtgtctcaggataaaactggaaacagtggagctattgtaaaatcaagcaatgagctagcaaaaactacacctgctggggagtaccttacgtctgcactaatggattttgatcctgaccagtttgagggatttgcagcaatagctgatggtgctaataagcttttgatgctggtcttggctgcagttatcaaagctggtgcagctagggagcatgagatacttgccgagatccgtgatgctgtgttttcattcattcgaaagatggaaccgaaaaaagttatggatactatgttagtttcaagagtcaagatattatacatcagatctttgcttgctaaatcacctgaactacagtccatcaaggtctctccagttgagcgtttcttggagaaatcaaatactggtcgaagtagaagttctagtaggggaagtagtcctggcagatctcctgttcaccaccatggtcatggttcccgaactgcgcttgttgatgaacatgtgcatggtttcaaggtgaacattaaacaggaaaagaaatcaaaattctcctcaattgttctgaagcttcgtggtatcgaggaggagacatggagacagcatgttactggagggaagctccgggaaattactgaggaagctaaggccttttcaattggaaacaaggctttagctgctctctttgttcacacgccagctggtgaattacagcgccaaattcgtgcatggcttgctgaaaactttgagtttctatctgtaactggtgcggatgctgctggaggagccgcaggacagcttgaactgctgtcaaccgctattatggatggctggatggctggtcttggtacagcgcagccccctaccactgatgctttaggccagcttttatcagaatacacaaagcgtgtttacacatctcaactacaacacttgaaggacatagctggcacattggcaacggaggaggctgatgatcctgcacatgtcagtaaactccgctctgctctggagtctgtggatcacaaaaggagaaagatcatgcaacaaatgcgaactgacactgccttgttaacaaaagaagaaggtggctcaccaattcgcaatcctcttactgctgcggaggatgcacgattagcatctctcatatctctagataacatcttgaagcaagtcaaggaagtaattagacaaagctctacaggacctatgagaaaatcaaagaggaaagctttgctagagttattggatgacctcttgacacagatgccctctcttcttgatatagatcatccatgtgctcagaagcagatcatggaggcacggaaagttgtcgagtcactgcaagaagaccctgatgatcctgccccacagtctaatgcattgggagagggcgaggtttcacagtggaatgtactgcagttcaacacgggaacgactgcgcctttcatcataaagtgcggagcaaattccagtggtgaactggtgattaaggctgatctgcgagtccaggagcctaaaggtggcgaggtgatccgtgttgttccaagaccaacagttcttgcggacttgagttttgaggaaataaaaggtgtgtttgagcaattgccagaggcagttagcttgcttgccttggcacgaacagcagatggtacaagggccaggtattcaagattgtacagaaccttagccagcaaagtgacggccttgaaagagactgttgcagagatggagagaggtggtgttttcaaagatgtacgataaatgctgtgttattgtagagttatttatgatattgatgttgtatatggatgccatttgtcggcatcccttgtaactgtatttgtttttactatgtggaaacctatgttgtaacactattctttggcaagagatgagccttgcctgccccaacccgtaatactatggttgtgcaaggcattaatgtaaattgtagctgcagctgataaatgtctgcagtgctgcaagtctgaactttccaggttatggaactattcaatgtttatttgtattaagcttttaagatgttaaaattgtgctagttttg

SEQ ID NO: 82078 - DNA, 4079 bp, Zea Mays
ggaaaattgaaatttgttggacgggaacaccaaaattagaatgtgttagattgacacaaattcagaagtaatattgctgatcactgggaacgaacgagtgcaaagagttatagccccgcctcagtgcctgcttgctagagaggactgcttggagcttagacaggaagctagcgacctccttgagtattctaatgcaaaattgggccgtgtcacccgttatcttggatttcttgccgacagaactcgaaaattagatcaagctgcccttgagactgaagctagaatcacccctttgattcatgagaagaaaaggcttttcaatgacctattgaccttgaaaggcaatgtcaaagtgttttgtcgttgtagaccactatttgaagatgagggtccatcagtactagagtttccggatgattttagtatccgtgtaaacacaggagatgaatctttaaccaatcctaagaaggattatgagtttgatagggtatatggaccccacatcgggcaaggtgaacttttccttgatgttcaaccatttgtgcaatctgccctggatgggtacaatatttctatatttgcgtatggtcaaagccgttctggcaaaacacatacactggaaggatctagtcacgatcgtggtttatatctgcggagctttgaagaactgtttgatctttcaaactcggatactacttctacagcacattttaacttttattttactgcctgtgagctctacaatgatcaggttagggatttgctatcagaatctagtagcactgtcccaaaagttcgaatgggggtccaagaatcctttgtggagcttgttcaagagaaggttgaaaatccactagagttttctgcggcactaaagatagcacttcaaaaccgatcagtaaattcgccaaaggccatggtttctcacctgatcattaccattcatatacactacagaaactatgtaacaggggagcatctatacagtaagctttctctagtggatttgccagcaagtgaatgcttgcttgaagaagatgccaacagggacaatgtaacagatttcttgcatgtctcaaagtcactttctgtgttgggtgatgcatttgcctctttaagcgcaaagaaggagcctgttctatatgggaattcaagaatcacacaaatcttagctgactctctaggaagtagctcaaagatcttgctgatcgtgcatgtaagtccaagtgcttcaaatttgtcaagaactttatccacactcagtttttctgcaagagcaagaaatgctgagctgagccttgggaatcgtgacacaataaagaaatggaaagacgtggcaaatgattcacgcaaacaattgcatgacaaagaaaaggaggttctagacctgcggcaagaagttattgggttaaaacattctctaaaagaggctaacgaccagtgcatacttctgttcaatgaagttcaaaaagcctggagagtttcatcttcactccaagctgatctcaagtctgaaaatttaatgcttgccgagaagcacaagactgagaaagagcagaataaccagctaagggatcagatttctcatcttttgaaagttgaacaagagcaaaacctaaagatgcaggaacgggatttaacaattcagtcactacagactaaactcaagtccattgagtctcagcttaatgaagccctcaatgctagcgatgctagatcaactattgggtctgaatctgcttcagtaatttcttccccaaagataacagaatcaactgctgactcatcttcagtgacgaaaaggcttgaggaggaattggcaaaaagggatgcccttattgagaaattacatgaagagaatgagaagctttttgacagacttacagagaagtcaggattaggaagtgctccacaggcttcaagcccttcagcaaacaagccagctaatggtcaaggaagggagataggcaggagtgacagcagcaaaagtcgatcaccagatgtgtttgcatcaccagtgtctcaggataaaactggaaacagtggagctattgtaaaatcaagcaatgagctagcaaaaactacacctgctggggagtaccttacgtctgcactaatggattttgatcctgaccagtttgagggatttgcagcaatagctgatggtgctaataagcttttgatgctggtcttggctgcagttatcaaagctggtgcagctagggagcatgagatacttgccgagatccgtgatgctgtgttttcattcattcgaaagatggaaccgaaaaaagttatggatactatgttagtttcaagagtcaagatattatacatcagatctttgcttgctaaatcacctgaactacagtccatcaaggtctctccagttgagcgtttcttggagaaatcaaatactggtcgaagtagaagttctagtaggggaagtagtcctggcagatctcctgttcaccaccatggtcatggttcccgaactgcgcttgttgatgaacatgtgcatggtttcaaggtgaacattaaacaggaaaagaaatcaaaattctcctcaattgttctgaagcttcgtggtatcgaggaggagacatggagacagcatgttactggagggaagctccgggaaattactgaggaagctaaggccttttcaattggaaacaaggctttagctgctctctttgttcacacgccagctggtgaattacagcgccaaattcgtgcatggcttgctgaaaactttgagtttctatctgtaactggtgcggatgctgctggaggagccgcaggacagcttgaactgctgtcaaccgctattatggatggctggatggctggtcttggtacagcgcagccccctaccactgatgctttaggccagcttttatcagaatacacaaagcgtgtttacacatctcaactacaacacttgaaggacatagctggcacattggcaacggaggaggctgatgatcctgcacatgtcagtaaactccgctctgctctggagtctgtggatcacaaaaggagaaagatcatgcaacaaatgcgaactgacactgccttgttaacaaaagaagaaggtggctcaccaattcgcaatcctcttactgctgcggaggatgcacgattagcatctctcatatctctagataacatcttgaagcaagtcaaggaagtaattagacaaagctctacaggacctatgagaaaatcaaagaggaaagctttgctagagttattggatgacctcttgacacagatgccctctcttcttgatatagatcatccatgtgctcagaagcagatcatggaggcacggaaagttgtcgagtcactgcaagaagaccctgatgatcctgccccacagtctaatgcattgggagagggcgaggtttcacagtggaatgtactgcagttcaacacgggaacgactgcgcctttcatcataaagtgcggagcaaattccagtggtgaactggtgattaaggctgatctgcgagtccaggagcctaaaggtggcgaggtgatccgtgttgttccaagaccaacagttcttgcggacttgagttttgaggaaataaaaggtgtgtttgagcaattgccagaggcagttagcttgcttgccttggcacgaacagcagatggtacaagggccaggtattcaagattgtacagaaccttagccagcaaagtgacggccttgaaagagactgttgcagagatggagagaggtggtgttttcaaagatgtacgataaatgctgtgttattgtagagttatttatgatattgatgttgtatatggatgccatttgtcggcatcccttgtaactgtatttgtttttactatgtggaaacctatgttgtaacactattctttggcaagagatgagccttgcctgccccaacccgtaatactatggttgtgcaaggcattaatgtaaattgtagctgcagctgataaatgtctgcagtgctgcaagtctgaactttccaggttatggaactattcaatgtttatttgtattaagcttttaagatgttaaaattgtgctagttttg

SEQ ID NO: 82079 - DNA, 4021 bp, Zea Mays
gatgttgggaaaattgaaatttgttggacgggaacaccaaaattagaatgtgttagattgacacaaattcagcttgctagagaggactgcttggagcttagacaggaagctagcgacctccttgagtattctaatgcaaaattgggccgtgtcacccgttatcttggatttcttgccgacagaactcgaaaattagatcaagctgcccttgagactgaagctagaatcacccctttgattcatgagaagaaaaggcttttcaatgacctattgaccttgaaaggcaatgtcaaagtgttttgtcgttgtagaccactatttgaagatgagggtccatcagtactagagtttccggatgattttagtatccgtgtaaacacaggagatgaatctttaaccaatcctaagaaggattatgagtttgatagggtatatggaccccacatcgggcaaggtgaacttttccttgatgttcaaccatttgtgcaatctgccctggatgggtacaatatttctatatttgcgtatggtcaaagccgttctggcaaaacacatacactggaaggatctagtcacgatcgtggtttatatctgcggagctttgaagaactgtttgatctttcaaactcggatactacttctacagcacattttaacttttattttactgcctgtgagctctacaatgatcaggttagggatttgctatcagaatctagtagcactgtcccaaaagttcgaatgggggtccaagaatcctttgtggagcttgttcaagagaaggttgaaaatccactagagttttctgcggcactaaagatagcacttcaaaaccgatcagtaaattcgccaaaggccatggtttctcacctgatcattaccattcatatacactacagaaactatgtaacaggggagcatctatacagtaagctttctctagtggatttgccagcaagtgaatgcttgcttgaagaagatgccaacagggacaatgtaacagatttcttgcatgtctcaaagtcactttctgtgttgggtgatgcatttgcctctttaagcgcaaagaaggagcctgttctatatgggaattcaagaatcacacaaatcttagctgactctctaggaagtagctcaaagatcttgctgatcgtgcatgtaagtccaagtgcttcaaatttgtcaagaactttatccacactcagtttttctgcaagagcaagaaatgctgagctgagccttgggaatcgtgacacaataaagaaatggaaagacgtggcaaatgattcacgcaaacaattgcatgacaaagaaaaggaggttctagacctgcggcaagaagttattgggttaaaacattctctaaaagaggctaacgaccagtgcatacttctgttcaatgaagttcaaaaagcctggagagtttcatcttcactccaagctgatctcaagtctgaaaatttaatgcttgccgagaagcacaagactgagaaagagcagaataaccagctaagggatcagatttctcatcttttgaaagttgaacaagagcaaaacctaaagatgcaggaacgggatttaacaattcagtcactacagactaaactcaagtccattgagtctcagcttaatgaagccctcaatgctagcgatgctagatcaactattgggtctgaatctgcttcagtaatttcttccccaaagataacagaatcaactgctgactcatcttcagtgacgaaaaggcttgaggaggaattggcaaaaagggatgcccttattgagaaattacatgaagagaatgagaagctttttgacagacttacagagaagtcaggattaggaagtgctccacaggcttcaagcccttcagcaaacaagccagctaatggtcaaggaagggagataggcaggagtgacagcagcaaaagtcgatcaccagatgtgtttgcatcaccagtgtctcaggataaaactggaaacagtggagctattgtaaaatcaagcaatgagctagcaaaaactacacctgctggggagtaccttacgtctgcactaatggattttgatcctgaccagtttgagggatttgcagcaatagctgatggtgctaataagcttttgatgctggtcttggctgcagttatcaaagctggtgcagctagggagcatgagatacttgccgagatccgtgatgctgtgttttcattcattcgaaagatggaaccgaaaaaagttatggatactatgttagtttcaagagtcaagatattatacatcagatctttgcttgctaaatcacctgaactacagtccatcaaggtctctccagttgagcgtttcttggagaaatcaaatactggtcgaagtagaagttctagtaggggaagtagtcctggcagatctcctgttcaccaccatggtcatggttcccgaactgcgcttgttgatgaacatgtgcatggtttcaaggtgaacattaaacaggaaaagaaatcaaaattctcctcaattgttctgaagcttcgtggtatcgaggaggagacatggagacagcatgttactggagggaagctccgggaaattactgaggaagctaaggccttttcaattggaaacaaggctttagctgctctctttgttcacacgccagctggtgaattacagcgccaaattcgtgcatggcttgctgaaaactttgagtttctatctgtaactggtgcggatgctgctggaggagccgcaggacagcttgaactgctgtcaaccgctattatggatggctggatggctggtcttggtacagcgcagccccctaccactgatgctttaggccagcttttatcagaatacacaaagcgtgtttacacatctcaactacaacacttgaaggacatagctggcacattggcaacggaggaggctgatgatcctgcacatgtcagtaaactccgctctgctctggagtctgtggatcacaaaaggagaaagatcatgcaacaaatgcgaactgacactgccttgttaacaaaagaagaaggtggctcaccaattcgcaatcctcttactgctgcggaggatgcacgattagcatctctcatatctctagataacatcttgaagcaagtcaaggaagtaattagacaaagctctacaggacctatgagaaaatcaaagaggaaagctttgctagagttattggatgacctcttgacacagatgccctctcttcttgatatagatcatccatgtgctcagaagcagatcatggaggcacggaaagttgtcgagtcactgcaagaagaccctgatgatcctgccccacagtctaatgcattgggagagggcgaggtttcacagtggaatgtactgcagttcaacacgggaacgactgcgcctttcatcataaagtgcggagcaaattccagtggtgaactggtgattaaggctgatctgcgagtccaggagcctaaaggtggcgaggtgatccgtgttgttccaagaccaacagttcttgcggacttgagttttgaggaaataaaaggtgtgtttgagcaattgccagaggcagttagcttgcttgccttggcacgaacagcagatggtacaagggccaggtattcaagattgtacagaaccttagccagcaaagtgacggccttgaaagagactgttgcagagatggagagaggtggtgttttcaaagatgtacgataaatgctgtgttattgtagagttatttatgatattgatgttgtatatggatgccatttgtcggcatcccttgtaactgtatttgtttttactatgtggaaacctatgttgtaacactattctttggcaagagatgagccttgcctgccccaacccgtaatactatggttgtgcaaggcattaatgtaaattgtagctgcagctgataaatgtctgcagtgctgcaagtctgaactttccaggttatggaactattcaatgtttatttgtattaagcttttaagatgttaaaattgtgctagttttg

SEQ ID NO: 82080 - DNA, 3971 bp, Zea Mays
ctttgtatagctcccttgacagcttgctagagaggactgcttggagcttagacaggaagctagcgacctccttgagtattctaatgcaaaattgggccgtgtcacccgttatcttggatttcttgccgacagaactcgaaaattagatcaagctgcccttgagactgaagctagaatcacccctttgattcatgagaagaaaaggcttttcaatgacctattgaccttgaaaggcaatgtcaaagtgttttgtcgttgtagaccactatttgaagatgagggtccatcagtactagagtttccggatgattttagtatccgtgtaaacacaggagatgaatctttaaccaatcctaagaaggattatgagtttgatagggtatatggaccccacatcgggcaaggtgaacttttccttgatgttcaaccatttgtgcaatctgccctggatgggtacaatatttctatatttgcgtatggtcaaagccgttctggcaaaacacatacactggaaggatctagtcacgatcgtggtttatatctgcggagctttgaagaactgtttgatctttcaaactcggatactacttctacagcacattttaacttttattttactgcctgtgagctctacaatgatcaggttagggatttgctatcagaatctagtagcactgtcccaaaagttcgaatgggggtccaagaatcctttgtggagcttgttcaagagaaggttgaaaatccactagagttttctgcggcactaaagatagcacttcaaaaccgatcagtaaattcgccaaaggccatggtttctcacctgatcattaccattcatatacactacagaaactatgtaacaggggagcatctatacagtaagctttctctagtggatttgccagcaagtgaatgcttgcttgaagaagatgccaacagggacaatgtaacagatttcttgcatgtctcaaagtcactttctgtgttgggtgatgcatttgcctctttaagcgcaaagaaggagcctgttctatatgggaattcaagaatcacacaaatcttagctgactctctaggaagtagctcaaagatcttgctgatcgtgcatgtaagtccaagtgcttcaaatttgtcaagaactttatccacactcagtttttctgcaagagcaagaaatgctgagctgagccttgggaatcgtgacacaataaagaaatggaaagacgtggcaaatgattcacgcaaacaattgcatgacaaagaaaaggaggttctagacctgcggcaagaagttattgggttaaaacattctctaaaagaggctaacgaccagtgcatacttctgttcaatgaagttcaaaaagcctggagagtttcatcttcactccaagctgatctcaagtctgaaaatttaatgcttgccgagaagcacaagactgagaaagagcagaataaccagctaagggatcagatttctcatcttttgaaagttgaacaagagcaaaacctaaagatgcaggaacgggatttaacaattcagtcactacagactaaactcaagtccattgagtctcagcttaatgaagccctcaatgctagcgatgctagatcaactattgggtctgaatctgcttcagtaatttcttccccaaagataacagaatcaactgctgactcatcttcagtgacgaaaaggcttgaggaggaattggcaaaaagggatgcccttattgagaaattacatgaagagaatgagaagctttttgacagacttacagagaagtcaggattaggaagtgctccacaggcttcaagcccttcagcaaacaagccagctaatggtcaaggaagggagataggcaggagtgacagcagcaaaagtcgatcaccagatgtgtttgcatcaccagtgtctcaggataaaactggaaacagtggagctattgtaaaatcaagcaatgagctagcaaaaactacacctgctggggagtaccttacgtctgcactaatggattttgatcctgaccagtttgagggatttgcagcaatagctgatggtgctaataagcttttgatgctggtcttggctgcagttatcaaagctggtgcagctagggagcatgagatacttgccgagatccgtgatgctgtgttttcattcattcgaaagatggaaccgaaaaaagttatggatactatgttagtttcaagagtcaagatattatacatcagatctttgcttgctaaatcacctgaactacagtccatcaaggtctctccagttgagcgtttcttggagaaatcaaatactggtcgaagtagaagttctagtaggggaagtagtcctggcagatctcctgttcaccaccatggtcatggttcccgaactgcgcttgttgatgaacatgtgcatggtttcaaggtgaacattaaacaggaaaagaaatcaaaattctcctcaattgttctgaagcttcgtggtatcgaggaggagacatggagacagcatgttactggagggaagctccgggaaattactgaggaagctaaggccttttcaattggaaacaaggctttagctgctctctttgttcacacgccagctggtgaattacagcgccaaattcgtgcatggcttgctgaaaactttgagtttctatctgtaactggtgcggatgctgctggaggagccgcaggacagcttgaactgctgtcaaccgctattatggatggctggatggctggtcttggtacagcgcagccccctaccactgatgctttaggccagcttttatcagaatacacaaagcgtgtttacacatctcaactacaacacttgaaggacatagctggcacattggcaacggaggaggctgatgatcctgcacatgtcagtaaactccgctctgctctggagtctgtggatcacaaaaggagaaagatcatgcaacaaatgcgaactgacactgccttgttaacaaaagaagaaggtggctcaccaattcgcaatcctcttactgctgcggaggatgcacgattagcatctctcatatctctagataacatcttgaagcaagtcaaggaagtaattagacaaagctctacaggacctatgagaaaatcaaagaggaaagctttgctagagttattggatgacctcttgacacagatgccctctcttcttgatatagatcatccatgtgctcagaagcagatcatggaggcacggaaagttgtcgagtcactgcaagaagaccctgatgatcctgccccacagtctaatgcattgggagagggcgaggtttcacagtggaatgtactgcagttcaacacgggaacgactgcgcctttcatcataaagtgcggagcaaattccagtggtgaactggtgattaaggctgatctgcgagtccaggagcctaaaggtggcgaggtgatccgtgttgttccaagaccaacagttcttgcggacttgagttttgaggaaataaaaggtgtgtttgagcaattgccagaggcagttagcttgcttgccttggcacgaacagcagatggtacaagggccaggtattcaagattgtacagaaccttagccagcaaagtgacggccttgaaagagactgttgcagagatggagagaggtggtgttttcaaagatgtacgataaatgctgtgttattgtagagttatttatgatattgatgttgtatatggatgccatttgtcggcatcccttgtaactgtatttgtttttactatgtggaaacctatgttgtaacactattctttggcaagagatgagccttgcctgccccaacccgtaatactatggttgtgcaaggcattaatgtaaattgtagctgcagctgataaatgtctgcagtgctgcaagtctgaactttccaggttatggaactattcaatgtttatttgtattaagcttttaagatgttaaaattgtgctagttttg

SEQ ID NO: 82081 - DNA, 4055 bp, Zea Mays
agcgatagatagaataggggcgggcgccgggcggcttcctccgtccacagccacagccatcgccacctccaccaccacctccttctcctcctcctcccgcatctcctcattgcaaaacctcggttcattttcctgtcgcgatctagggtttccggtcgctgcggcgccaatggcggactcgcgccgcacctggtcctgggacgtgtcggggttcgagccgccgcagccggcgacgacgcaggcagcgtcggcaccgaccgctatgccgcgggctccgccgacggccatgatgccccgcccctccgctggggctccccgcgcctcggccggcgcagtgcccgttgccgaccagctggaccagctcgtggacagcgtccagcttgctagagaggactgcttggagcttagacaggaagctagcgacctccttgagtattctaatgcaaaattgggccgtgtcacccgttatcttggatttcttgccgacagaactcgaaaattagatcaagctgcccttgagactgaagctagaatcacccctttgattcatgagaagaaaaggcttttcaatgacctattgaccttgaaaggcaatgtcaaagtgttttgtcgttgtagaccactatttgaagatgagggtccatcagtactagagtttccggatgattttagtatccgtgtaaacacaggagatgaatctttaaccaatcctaagaaggattatgagtttgatagggtatatggaccccacatcgggcaaggtgaacttttccttgatgttcaaccatttgtgcaatctgccctggatgggtacaatatttctatatttgcgtatggtcaaagccgttctggcaaaacacatacactggaaggatctagtcacgatcgtggtttatatctgcggagctttgaagaactgtttgatctttcaaactcggatactacttctacagcacattttaacttttattttactgcctgtgagctctacaatgatcaggttagggatttgctatcagaatctagtagcactgtcccaaaagttcgaatgggggtccaagaatcctttgtggagcttgttcaagagaaggttgaaaatccactagagttttctgcggcactaaagatagcacttcaaaaccgatcagtaaattcgccaaaggccatggtttctcacctgatcattaccattcatatacactacagaaactatgtaacaggggagcatctatacagtaagctttctctagtggatttgccagcaagtgaatgcttgcttgaagaagatgccaacagggacaatgtaacagatttcttgcatgtctcaaagtcactttctgtgttgggtgatgcatttgcctctttaagcgcaaagaaggagcctgttctatatgggaattcaagaatcacacaaatcttagctgactctctaggaagtagctcaaagatcttgctgatcgtgcatgtaagtccaagtgcttcaaatttgtcaagaactttatccacactcagtttttctgcaagagcaagaaatgctgagctgagccttgggaatcgtgacacaataaagaaatggaaagacgtggcaaatgattcacgcaaacaattgcatgacaaagaaaaggaggttctagacctgcggcaagaagttattgggttaaaacattctctaaaagaggctaacgaccagtgcatacttctgttcaatgaagttcaaaaagcctggagagtttcatcttcactccaagctgatctcaagtctgaaaatttaatgcttgccgagaagcacaagactgagaaagagcagaataaccagctaagggatcagatttctcatcttttgaaagttgaacaagagcaaaacctaaagatgcaggaacgggatttaacaattcagtcactacagactaaactcaagtccattgagtctcagcttaatgaagccctcaatgctagcgatgctagatcaactattgggtctgaatctgcttcagtaatttcttccccaaagataacagaatcaactgctgactcatcttcagtgacgaaaaggcttgaggaggaattggcaaaaagggatgcccttattgagaaattacatgaagagaatgagaagctttttgacagacttacagagaagtcaggattaggaagtgctccacaggtcttggctgcagttatcaaagctggtgcagctagggagcatgagatacttgccgagatccgtgatgctgtgttttcattcattcgaaagatggaaccgaaaaaagttatggatactatgttagtttcaagagtcaagatattatacatcagatctttgcttgctaaatcacctgaactacagtccatcaaggtctctccagttgagcgtttcttggagaaatcaaatactggtcgaagtagaagttctagtaggggaagtagtcctggcagatctcctgttcaccaccatggtcatggttcccgaactgcgcttgttgatgaacatgtgcatggtttcaaggtgaacattaaacaggaaaagaaatcaaaattctcctcaattgttctgaagcttcgtggtatcgaggaggagacatggagacagcatgttactggagggaagctccgggaaattactgaggaagctaaggccttttcaattggaaacaaggctttagctgctctctttgttcacacgccagctggtgaattacagcgccaaattcgtgcatggcttgctgaaaactttgagtttctatctgtaactggtgcggatgctgctggaggagccgcaggacagcttgaactgctgtcaaccgctattatggatggctggatggctggtcttggtacagcgcagccccctaccactgatgctttaggccagcttttatcagaatacacaaagcgtgtttacacatctcaactacaacacttgaaggacatagctggcacattggcaacggaggaggctgatgatcctgcacatgtcagtaaactccgctctgctctggagtctgtggatcacaaaaggagaaagatcatgcaacaaatgcgaactgacactgccttgttaacaaaagaagaaggtggctcaccaattcgcaatcctcttactgctgcggaggatgcacgattagcatctctcatatctctagataacatcttgaagcaagtcaaggaagtaattagacaaagctctacaggacctatgagaaaatcaaagaggaaagctttgctagagttattggatgacctcttgacacagatgccctctcttcttgatatagatcatccatgtgctcagaagcagatcatggaggcacggaaagttgtcgagtcactgcaagaagaccctgatgatcctgccccacagtctaatgcattgggagagggcgaggtttcacagtggaatgtactgcagttcaacacgggaacgactgcgcctttcatcataaagtgcggagcaaattccagtggtgaactggtgattaaggctgatctgcgagtccaggagcctaaaggtggcgaggtgatccgtgttgttccaagaccaacagttcttgcggacttgagttttgaggaaataaaaggtgtgtttgagcaattgccagaggcagttagcttgcttgccttggcacgaacagcagatggtacaagggccaggtattcaagattgtacagaaccttagccagcaaagtgacggccttgaaagagactgttgcagagatggagagaggtggtgttttcaaagatgtacgataaatgctgtgttattgtagagttatttatgatattgatgttgtatatggatgccatttgtcggcatcccttgtaactgtatttgtttttactatgtggaaacctatgttgtaacactattctttggcaagagatgagccttgcctgccccaacccgtaatactatggttgtgcaaggcattaatgtaaattgtagctgcagctgataaatgtctgcagtgctgcaagtctgaactttccaggttatggaactattcaatgtttatttgtattaagcttttaagatgttaaaattgtgctagttttg

SEQ ID NO: 82082 - DNA, 4256 bp, Zea Mays
agcgatagatagaataggggcgggcgccgggcggcttcctccgtccacagccacagccatcgccacctccaccaccacctccttctcctcctcctcccgcatctcctcattgcaaaacctcggttcattttcctgtcgcgatctagggtttccggtcgctgcggcgccaatggcggactcgcgccgcacctggtcctgggacgtgtcggggttcgagccgccgcagccggcgacgacgcaggcagcgtcggcaccgaccgctatgccgcgggctccgccgacggccatgatgccccgcccctccgctggggctccccgcgcctcggccggcgcagtgcccgttgccgaccagctggaccagctcgtggacagcgtccagcttgctagagaggactgcttggagcttagacaggaagctagcgacctccttgagtattctaatgcaaaattgggccgtgtcacccgttatcttggatttcttgccgacagaactcgaaaattagatcaagctgcccttgagactgaagctagaatcacccctttgattcatgagaagaaaaggcttttcaatgacctattgaccttgaaaggcaatgtcaaagtgttttgtcgttgtagaccactatttgaagatgagggtccatcagtactagagtttccggatgattttagtatccgtgtaaacacaggagatgaatctttaaccaatcctaagaaggattatgagtttgatagggtatatggaccccacatcgggcaaggtgaacttttccttgatgttcaaccatttgtgcaatctgccctggatgggtacaatatttctatatttgcgtatggtcaaagccgttctggcaaaacacatacactggaaggatctagtcacgatcgtggtttatatctgcggagctttgaagaactgtttgatctttcaaactcggatactacttctacagcacattttaacttttattttactgcctgtgagctctacaatgatcaggttagggatttgctatcagaatctagtagcactgtcccaaaagttcgaatgggggtccaagaatcctttgtggagcttgttcaagagaaggttgaaaatccactagagttttctgcggcactaaagatagcacttcaaaaccgatcagtaaattcgccaaaggccatggtttctcacctgatcattaccattcatatacactacagaaactatgtaacaggggagcatctatacagtaagctttctctagtggatttgccagcaagtgaatgcttgcttgaagaagatgccaacagggacaatgtaacagatttcttgcatgtctcaaagtcactttctgtgttgggtgatgcatttgcctctttaagcgcaaagaaggagcctgttctatatgggaattcaagaatcacacaaatcttagctgactctctaggaagtagctcaaagatcttgctgatcgtgcatgtaagtccaagtgcttcaaatttgtcaagaactttatccacactcagtttttctgcaagagcaagaaatgctgagctgagccttgggaatcgtgacacaataaagaaatggaaagacgtggcaaatgattcacgcaaacaattgcatgacaaagaaaaggaggttctagacctgcggcaagaagttattgggttaaaacattctctaaaagaggctaacgaccagtgcatacttctgttcaatgaagttcaaaaagcctggagagtttcatcttcactccaagctgatctcaagtctgaaaatttaatgcttgccgagaagcacaagactgagaaagagcagaataaccagctaagggatcagatttctcatcttttgaaagttgaacaagagcaaaacctaaagatgcaggaacgggatttaacaattcagtcactacagactaaactcaagtccattgagtctcagcttaatgaagccctcaatgctagcgatgctagatcaactattgggtctgaatctgcttcagtaatttcttccccaaagataacagaatcaactgctgactcatcttcagtgacgaaaaggcttgaggaggaattggcaaaaagggatgcccttattgaggcttcaagcccttcagcaaacaagccagctaatggtcaaggaagggagataggcaggagtgacagcagcaaaagtcgatcaccagatgtgtttgcatcaccagtgtctcaggataaaactggaaacagtggagctattgtaaaatcaagcaatgagctagcaaaaactacacctgctggggagtaccttacgtctgcactaatggattttgatcctgaccagtttgagggatttgcagcaatagctgatggtgctaataagcttttgatgctggtcttggctgcagttatcaaagctggtgcagctagggagcatgagatacttgccgagatccgtgatgctgtgttttcattcattcgaaagatggaaccgaaaaaagttatggatactatgttagtttcaagagtcaagatattatacatcagatctttgcttgctaaatcacctgaactacagtccatcaaggtctctccagttgagcgtttcttggagaaatcaaatactggtcgaagtagaagttctagtaggggaagtagtcctggcagatctcctgttcaccaccatggtcatggttcccgaactgcgcttgttgatgaacatgtgcatggtttcaaggtgaacattaaacaggaaaagaaatcaaaattctcctcaattgttctgaagcttcgtggtatcgaggaggagacatggagacagcatgttactggagggaagctccgggaaattactgaggaagctaaggccttttcaattggaaacaaggctttagctgctctctttgttcacacgccagctggtgaattacagcgccaaattcgtgcatggcttgctgaaaactttgagtttctatctgtaactggtgcggatgctgctggaggagccgcaggacagcttgaactgctgtcaaccgctattatggatggctggatggctggtcttggtacagcgcagccccctaccactgatgctttaggccagcttttatcagaatacacaaagcgtgtttacacatctcaactacaacacttgaaggacatagctggcacattggcaacggaggaggctgatgatcctgcacatgtcagtaaactccgctctgctctggagtctgtggatcacaaaaggagaaagatcatgcaacaaatgcgaactgacactgccttgttaacaaaagaagaaggtggctcaccaattcgcaatcctcttactgctgcggaggatgcacgattagcatctctcatatctctagataacatcttgaagcaagtcaaggaagtaattagacaaagctctacaggacctatgagaaaatcaaagaggaaagctttgctagagttattggatgacctcttgacacagatgccctctcttcttgatatagatcatccatgtgctcagaagcagatcatggaggcacggaaagttgtcgagtcactgcaagaagaccctgatgatcctgccccacagtctaatgcattgggagagggcgaggtttcacagtggaatgtactgcagttcaacacgggaacgactgcgcctttcatcataaagtgcggagcaaattccagtggtgaactggtgattaaggctgatctgcgagtccaggagcctaaaggtggcgaggtgatccgtgttgttccaagaccaacagttcttgcggacttgagttttgaggaaataaaaggtgtgtttgagcaattgccagaggcagttagcttgcttgccttggcacgaacagcagatggtacaagggccaggtattcaagattgtacagaaccttagccagcaaagtgacggccttgaaagagactgttgcagagatggagagaggtggtgttttcaaagatgtacgataaatgctgtgttattgtagagttatttatgatattgatgttgtatatggatgccatttgtcggcatcccttgtaactgtatttgtttttactatgtggaaacctatgttgtaacactattctttggcaagagatgagccttgcctgccccaacccgtaatactatggttgtgcaaggcattaatgtaaattgtagctgcagctgataaatgtctgcagtgctgcaagtctgaactttccaggttatggaactattcaatgtttatttgtattaagcttttaagatgttaaaattgtgctagttttg

SEQ ID NO: 82083 - DNA, 4316 bp, Zea Mays
ctccgccctctccccctcgaagcgatagatagaataggggcgggcgccgggcggcttcctccgtccacagccacagccatcgccacctccaccaccacctccttctcctcctcctcccgcatctcctcattgcaaaacctcggttcattttcctgtcgcgatctagggtttccggtcgctgcggcgccaatggcggactcgcgccgcacctggtcctgggacgtgtcggggttcgagccgccgcagccggcgacgacgcaggcagcgtcggcaccgaccgctatgccgcgggctccgccgacggccatgatgccccgcccctccgctggggctccccgcgcctcggccggcgcagtgcccgttgccgaccagctggaccagctcgtggacagcgtccagcttgctagagaggactgcttggagcttagacaggaagctagcgacctccttgagtattctaatgcaaaattgggccgtgtcacccgttatcttggatttcttgccgacagaactcgaaaattagatcaagctgcccttgagactgaagctagaatcacccctttgattcatgagaagaaaaggcttttcaatgacctattgaccttgaaaggcaatgtcaaagtgttttgtcgttgtagaccactatttgaagatgagggtccatcagtactagagtttccggatgattttagtatccgtgtaaacacaggagatgaatctttaaccaatcctaagaaggattatgagtttgatagggtatatggaccccacatcgggcaaggtgaacttttccttgatgttcaaccatttgtgcaatctgccctggatgggtacaatatttctatatttgcgtatggtcaaagccgttctggcaaaacacatacactggaaggatctagtcacgatcgtggtttatatctgcggagctttgaagaactgtttgatctttcaaactcggatactacttctacagcacattttaacttttattttactgcctgtgagctctacaatgatcaggttagggatttgctatcagaatctagtagcactgtcccaaaagttcgaatgggggtccaagaatcctttgtggagcttgttcaagagaaggttgaaaatccactagagttttctgcggcactaaagatagcacttcaaaaccgatcagatcattaccattcatatacactacagaaactatgtaacaggggagcatctatacagtaagctttctctagtggatttgccagcaagtgaatgcttgcttgaagaagatgccaacagggacaatgtaacagatttcttgcatgtctcaaagtcactttctgtgttgggtgatgcatttgcctctttaagcgcaaagaaggagcctgttctatatgggaattcaagaatcacacaaatcttagctgactctctaggaagtagctcaaagatcttgctgatcgtgcatgtaagtccaagtgcttcaaatttgtcaagaactttatccacactcagtttttctgcaagagcaagaaatgctgagctgagccttgggaatcgtgacacaataaagaaatggaaagacgtggcaaatgattcacgcaaacaattgcatgacaaagaaaaggaggttctagacctgcggcaagaagttattgggttaaaacattctctaaaagaggctaacgaccagtgcatacttctgttcaatgaagttcaaaaagcctggagagtttcatcttcactccaagctgatctcaagtctgaaaatttaatgcttgccgagaagcacaagactgagaaagagcagaataaccagctaagggatcagatttctcatcttttgaaagttgaacaagagcaaaacctaaagatgcaggaacgggatttaacaattcagtcactacagactaaactcaagtccattgagtctcagcttaatgaagccctcaatgctagcgatgctagatcaactattgggtctgaatctgcttcagtaatttcttccccaaagataacagaatcaactgctgactcatcttcagtgacgaaaaggcttgaggaggaattggcaaaaagggatgcccttattgagaaattacatgaagagaatgagaagctttttgacagacttacagagaagtcaggattaggaagtgctccacaggcttcaagcccttcagcaaacaagccagctaatggtcaaggaagggagataggcaggagtgacagcagcaaaagtcgatcaccagatgtgtttgcatcaccagtgtctcaggataaaactggaaacagtggagctattgtaaaatcaagcaatgagctagcaaaaactacacctgctggggagtaccttacgtctgcactaatggattttgatcctgaccagtttgagggatttgcagcaatagctgatggtgctaataagcttttgatgctggtcttggctgcagttatcaaagctggtgcagctagggagcatgagatacttgccgagatccgtgatgctgtgttttcattcattcgaaagatggaaccgaaaaaagttatggatactatgttagtttcaagagtcaagatattatacatcagatctttgcttgctaaatcacctgaactacagtccatcaaggtctctccagttgagcgtttcttggagaaatcaaatactggtcgaagtagaagttctagtaggggaagtagtcctggcagatctcctgttcaccaccatggtcatggttcccgaactgcgcttgttgatgaacatgtgcatggtttcaaggtgaacattaaacaggaaaagaaatcaaaattctcctcaattgttctgaagcttcgtggtatcgaggaggagacatggagacagcatgttactggagggaagctccgggaaattactgaggaagctaaggccttttcaattggaaacaaggctttagctgctctctttgttcacacgccagctggtgaattacagcgccaaattcgtgcatggcttgctgaaaactttgagtttctatctgtaactggtgcggatgctgctggaggagccgcaggacagcttgaactgctgtcaaccgctattatggatggctggatggctggtcttggtacagcgcagccccctaccactgatgctttaggccagcttttatcagaatacacaaagcgtgtttacacatctcaactacaacacttgaaggacatagctggcacattggcaacggaggaggctgatgatcctgcacatgtcagtaaactccgctctgctctggagtctgtggatcacaaaaggagaaagatcatgcaacaaatgcgaactgacactgccttgttaacaaaagaagaaggtggctcaccaattcgcaatcctcttactgctgcggaggatgcacgattagcatctctcatatctctagataacatcttgaagcaagtcaaggaagtaattagacaaagctctacaggacctatgagaaaatcaaagaggaaagctttgctagagttattggatgacctcttgacacagatgccctctcttcttgatatagatcatccatgtgctcagaagcagatcatggaggcacggaaagttgtcgagtcactgcaagaagaccctgatgatcctgccccacagtctaatgcattgggagagggcgaggtttcacagtggaatgtactgcagttcaacacgggaacgactgcgcctttcatcataaagtgcggagcaaattccagtggtgaactggtgattaaggctgatctgcgagtccaggagcctaaaggtggcgaggtgatccgtgttgttccaagaccaacagttcttgcggacttgagttttgaggaaataaaaggtgtgtttgagcaattgccagaggcagttagcttgcttgccttggcacgaacagcagatggtacaagggccaggtattcaagattgtacagaaccttagccagcaaagtgacggccttgaaagagactgttgcagagatggagagaggtggtgttttcaaagatgtacgataaatgctgtgttattgtagagttatttatgatattgatgttgtatatggatgccatttgtcggcatcccttgtaactgtatttgtttttactatgtggaaacctatgttgtaacactattctttggcaagagatgagccttgcctgccccaacccgtaatactatggttgtgcaaggcattaatgtaaattgtagctgcagctgataaatgtctgcagtgctgcaagtctgaactttccaggttatggaactattcaatgtttatttgtattaagcttttaagatgttaaaattgtgctagttttg

SEQ ID NO: 82084 - DNA, 4087 bp, Zea Mays
aactgaaatgcgaaagcggaaaaatttctggctcctgtcctccgccctctccccctcgaagcgatagatagaataggggcgggcgccgggcggcttcctccgtccacagccacagccatcgccacctccaccaccacctccttctcctcctcctcccgcatctcctcattgcaaaacctcggttcattttcctgtcgcgatctagggtttccggtcgctgcggcgccaatggcggactcgcgccgcacctggtcctgggacgtgtcggggttcgagccgccgcagccggcgacgacgcaggcagcgtcggcaccgaccgctatgccgcgggctccgccgacggccatgatgccccgcccctccgctggggctccccgcgcctcggccggcgcagtgcccgttgccgaccagctggaccagctcgtggacagcgtccagcttgctagagaggactgcttggagcttagacaggaagctagcgacctccttgagtattctaatgcaaaattgggccgtgtcacccgttatcttggatttcttgccgacagaactcgaaaattagatcaagctgcccttgagactgaagctagaatcacccctttgattcatgagaagaaaaggcttttcaatgacctattgaccttgaaaggcaatgtcaaagtgttttgtcgttgtagaccactatttgaagatgagggtccatcagtactagagtttccggatgattttagtatccgtgtaaacacaggagatgaatctttaaccaatcctaagaaggattatgagtttgatagggtatatggaccccacatcgggcaaggtgaacttttccttgatgttcaaccatttgtgcaatctgccctggatgggtacaatatttctatatttgcgtatggtcaaagccgttctggcaaaacacatacactggaaggatctagtcacgatcgtggtttatatctgcggagctttgaagaactgtttgatctttcaaactcggatactacttctacagcacattttaacttttattttactgcctgtgagctctacaatgatcaggttagggatttgctatcagaatctagtagcactgtcccaaaagttcgaatgggggtccaagaatcctttgtggagcttgttcaagagaaggttgaaaatccactagagttttctgcggcactaaagatagcacttcaaaaccgatcagtaaattcgccaaaggccatggtttctcacctgatcattaccattcatatacactacagaaactatgtaacaggggagcatctatacagtaagctttctctagtggatttgccagcaagtgaatgcttgcttgaagaagatgccaacagggacaatgtaacagatttcttgcatgtctcaaagtcactttctgtgttgggtgatgcatttgcctctttaagcgcaaagaaggagcctgttctatatgggaattcaagaatcacacaaatcttagctgactctctaggaagtagctcaaagatcttgctgatcgtgcatgtaagtccaagtgcttcaaatttgtcaagaactttatccacactcagtttttctgcaagagcaagaaatgctgagctgagccttgggaatcgtgacacaataaagaaatggaaagacgtggcaaatgattcacgcaaacaattgcatgacaaagaaaaggaggttctagacctgcggcaagaagttattgggttaaaacattctctaaaagaggctaacgaccagtgcatacttctgttcaatgaagttcaaaaagcctggagagtttcatcttcactccaagctgatctcaagtctgaaaatttaatgcttgccgagaagcacaagactgagaaagagcagaataaccagctaagggatcagatttctcatcttttgaaagttgaacaagagcaaaacctaaagatgcaggaacgggatttaacaattcagtcactacagactaaactcaagtccattgagtctcagcttaatgaagccctcaatgctagcgatgctagatcaactattgggtctgaatctgcttcagtaatttcttccccaaagataacagaatcaactgctgactcatcttcagtgacgaaaaggcttgaggaggaattggcaaaaagggatgcccttattgagaaattacatgaagagaatgagaagctttttgacagacttacagagaagtcaggattaggaagtgctccacaggcttcaagcccttcagcaaacaagccagctaatggtcaaggaagggagataggcaggagtgacagcagcaaaagtcgatcaccagatgtgtttgcatcaccagtgtctcaggataaaactggaaacagtggagctattgtaaaatcaagcaatgagctagcaaaaactacacctgctggggagtaccttacgtctgcactaatggattttgatcctgaccagtttgagggatttgcagcaatagctgatggtgctaataagcttttgatgctggtcttggctgcagttatcaaagctggtgcagctagggagcatgagatacttgccgagatccgtgatgctgtgttttcattcattcgaaagatggaaccgaaaaaagttatggatactatgttagtttcaagagtcaagatattatacatcagatctttgcttgctaaatcacctgaactacagtccatcaaggtctctccagttgagcgtttcttggagaaatcaaatactggtcgaagtagaagttctagtaggggaagtagtcctggcagatctcctgttcaccaccatggtcatggttcccgaactgcgcttgttgatgaacatgtgcatggtttcaaggtgaacattaaacaggaaaagaaatcaaaattctcctcaattgttctgaagcttcgtggtatcgaggaggagacatggagacagcatgttactggagggaagctccgggaaattactgaggaagctaaggccttttcaattggaaacaaggctttagctgctctctttgttcacacgccagctggtgaattacagcgccaaattcgtgcatggcttgctgaaaactttgagtttctatctgtaactggtgcggatgctgctggaggagccgcaggacagcttgaactgctgtcaaccgctattatggatggctggatggctggtcttggtacagcgcagccccctaccactgatgctttaggccagcttttatcagaatacacaaagcgtgtttacacatctcaactacaacacttgaaggacatagctggcacattggcaacggaggaggctgatgatcctgcacatgtcagtaaactccgctctgctctggagtctgtggatcacaaaaggagaaagtcactgcaagaagaccctgatgatcctgccccacagtctaatgcattgggagagggcgaggtttcacagtggaatgtactgcagttcaacacgggaacgactgcgcctttcatcataaagtgcggagcaaattccagtggtgaactggtgattaaggctgatctgcgagtccaggagcctaaaggtggcgaggtgatccgtgttgttccaagaccaacagttcttgcggacttgagttttgaggaaataaaaggtgtgtttgagcaattgccagaggcagttagcttgcttgccttggcacgaacagcagatggtacaagggccaggtattcaagattgtacagaaccttagccagcaaagtgacggccttgaaagagactgttgcagagatggagagaggtggtgttttcaaagatgtacgataaatgctgtgttattgtagagttatttatgatattgatgttgtatatggatgccatttgtcggcatcccttgtaactgtatttgtttttactatgtggaaacctatgttgtaacactattctttggcaagagatgagccttgcctgccccaacccgtaatactatggttgtgcaaggcattaatgtaaattgtagctgcagctgataaatgtctgcagtgctgcaagtctgaactttccaggttatggaactattcaatgtttatttgtattaagcttttaagatgttaaaattgtgctagttttg

SEQ ID NO: 82085 - DNA, 4064 bp, Zea Mays
aacgcaacaaggagaagcaacaaactgaaatgcgaaagcggaaaaatttctggctcctgtcctccgccctctccccctcgaagcgatagatagaataggggcgggcgccgggcggcttcctccgtccacagccacagccatcgccacctccaccaccacctccttctcctcctcctcccgcatctcctcattgcaaaacctcggttcattttcctgtcgcgatctagggtttccggtcgctgcggcgccaatggcggactcgcgccgcacctggtcctgggacgtgtcggggttcgagccgccgcagccggcgacgacgcaggcagcgtcggcaccgaccgctatgccgcgggctccgccgacggccatgatgccccgcccctccgctggggctccccgcgcctcggccggcgcagtgcccgttgccgaccagctggaccagctcgtggacagcgtccagcttgctagagaggactgcttggagcttagacaggaagctagcgacctccttgagtattctaatgcaaaattgggccgtgtcacccgttatcttggatttcttgccgacagaactcgaaaattagatcaagctgcccttgagactgaagctagaatcacccctttgattcatgagaagaaaaggcttttcaatgacctattgaccttgaaaggcaatgtcaaagtgttttgtcgttgtagaccactatttgaagatgagggtccatcagtactagagtttccggatgattttagtatccgtgtaaacacaggagatgaatctttaaccaatcctaagaaggattatgagtttgatagggtatatggaccccacatcgggcaaggtgaacttttccttgatgttcaaccatttgtgcaatctgccctggatgggtacaatatttctatatttgcgtatggtcaaagccgttctggcaaaacacatacactggaaggatctagtcacgatcgtggtttatatctgcggagctttgaagaactgtttgatctttcaaactcggatactacttctacagcacattttaacttttattttactgcctgtgagctctacaatgatcaggttagggatttgctatcagaatctagtagcactgtcccaaaagttcgaatgggggtccaagaatcctttgtggagcttgttcaagagaaggttgaaaatccactagagttttctgcggcactaaagatagcacttcaaaaccgatcagtaaattcgccaaaggccatggtttctcacctgatcattaccattcatatacactacagaaactatgtaacaggggagcatctatacagtaagctttctctagtggatttgccagcaagtgaatgcttgcttgaagaagatgccaacagggacaatgtaacagatttcttgcatgtctcaaagtcactttctgtgttgggtgatgcatttgcctctttaagcgcaaagaaggagcctgttctatatgggaattcaagaatcacacaaatcttagctgactctctaggaagtagctcaaagatcttgctgatcgtgcatgtaagtccaagtgcttcaaatttgtcaagaactttatccacactcagtttttctgcaagagcaagaaatgctgagctgagccttgggaatcgtgacacaataaagaaatggaaagacgtggcaaatgattcacgcaaacaattgcatgacaaagaaaaggaggttctagacctgcggcaagaagttattgggttaaaacattctctaaaagaggctaacgaccagtgcatacttctgttcaatgaagttcaaaaagcctggagagtttcatcttcactccaagctgatctcaagtctgaaaatttaatgcttgccgagaagcacaagactgagaaagagcagaataaccagctaagggatcagatttctcatcttttgaaagttgaacaagagcaaaacctaaagatgcaggaacgggatttaacaattcagtcactacagactaaactcaagtccattgagtctcagcttaatgaagccctcaatgctagcgatgctagatcaactattgggtctgaatctgcttcagtaatttcttccccaaagataacagaatcaactgctgactcatcttcagtgacgaaaaggcttgaggaggaattggcaaaaagggatgcccttattgaggtcttggctgcagttatcaaagctggtgcagctagggagcatgagatacttgccgagatccgtgatgctgtgttttcattcattcgaaagatggaaccgaaaaaagttatggatactatgttagtttcaagagtcaagatattatacatcagatctttgcttgctaaatcacctgaactacagtccatcaaggtctctccagttgagcgtttcttggagaaatcaaatactggtcgaagtagaagttctagtaggggaagtagtcctggcagatctcctgttcaccaccatggtcatggttcccgaactgcgcttgttgatgaacatgtgcatggtttcaaggtgaacattaaacaggaaaagaaatcaaaattctcctcaattgttctgaagcttcgtggtatcgaggaggagacatggagacagcatgttactggagggaagctccgggaaattactgaggaagctaaggccttttcaattggaaacaaggctttagctgctctctttgttcacacgccagctggtgaattacagcgccaaattcgtgcatggcttgctgaaaactttgagtttctatctgtaactggtgcggatgctgctggaggagccgcaggacagcttgaactgctgtcaaccgctattatggatggctggatggctggtcttggtacagcgcagccccctaccactgatgctttaggccagcttttatcagaatacacaaagcgtgtttacacatctcaactacaacacttgaaggacatagctggcacattggcaacggaggaggctgatgatcctgcacatgtcagtaaactccgctctgctctggagtctgtggatcacaaaaggagaaagatcatgcaacaaatgcgaactgacactgccttgttaacaaaagaagaaggtggctcaccaattcgcaatcctcttactgctgcggaggatgcacgattagcatctctcatatctctagataacatcttgaagcaagtcaaggaagtaattagacaaagctctacaggacctatgagaaaatcaaagaggaaagctttgctagagttattggatgacctcttgacacagatgccctctcttcttgatatagatcatccatgtgctcagaagcagatcatggaggcacggaaagttgtcgagtcactgcaagaagaccctgatgatcctgccccacagtctaatgcattgggagagggcgaggtttcacagtggaatgtactgcagttcaacacgggaacgactgcgcctttcatcataaagtgcggagcaaattccagtggtgaactggtgattaaggctgatctgcgagtccaggagcctaaaggtggcgaggtgatccgtgttgttccaagaccaacagttcttgcggacttgagttttgaggaaataaaaggtgtgtttgagcaattgccagaggcagttagcttgcttgccttggcacgaacagcagatggtacaagggccaggtattcaagattgtacagaaccttagccagcaaagtgacggccttgaaagagactgttgcagagatggagagaggtggtgttttcaaagatgtacgataaatgctgtgttattgtagagttatttatgatattgatgttgtatatggatgccatttgtcggcatcccttgtaactgtatttgtttttactatgtggaaacctatgttgtaacactattctttggcaagagatgagccttgcctgccccaacccgtaatactatggttgtgcaaggcattaatgtaaattgtagctgcagctgataaatgtctgcagtgctgcaagtctgaactttccaggttatggaactattcaatgtttatttgtattaagcttttaagatgttaaaattgtgctagttttg

SEQ ID NO: 82086 - DNA, 2677 bp, Zea Mays
ctaggtttggtcgggtttgaaaactcatggattcacgagtttaaatattataggaacaaatccgtacccataaatccatcggatatagatttactaatattaacaaatatacaaatacgaaaattaacctaaactcataacactaacgaaccatcgagtttcagataaccgttgccatctctaagggcatgtacaatgggtatcttaagttgtgtcttagagtgtgtctaggggggtgaatgtaaaaaaactcaagacatgtatcttgacgaagacacagtgtcttagctctatgttcgagacaggagactagctgattggtcactttaatttattgaatgctctgattggtacaatgaatatggtaagacacatgttttagacatgaccattgtattatgtcgtgttttagctgtgtcttgtacttagaggaccgtgcagcagtgtctaggttgtacatgccctaatgcggacgccgcttacgcttctgcacgtggaactgtggaaggctggaagccgctaggcgctagagtcagctcgttgaggcattcagtcaacacactgacttcgtccccgtcccgtcgtgcccgggcctctctctcacatccactgccccgacccgccgccgctcgattgcgacctgacggcggcaatgcacccccgcatcgcatcgggcgccaccggtaagtcgaccgcgccgtacggttcctgggagtcgccgatcagcgccgctgtcgtctccgccgccgggaggaccgccgaggggtttgcaatcgctggcgacggccggctcgtctgggtggagacgcgccccgaggatggagggcgcgcggtcctcgtgaaggaagcggcaggaccaggcggtaaggctcttgatgtgacgccgcagggtttcgcggtgcggtccctggcgcaggagtacggtggtggggcattcgccgtgcaaggggacaccgttgtgttctctaattacactgaccagcgtctgtacaggcagacaataggagataattcaccactaccactgacaccagattatggaccagtagtacgctatgctgatggtgtctttgatccccatttccatcgtttcgtaactataatggaagaccatcggcacaatagctcaaatcccatcactacaattgttgctgtaggaataagtgatccggatgtcaaagagagataaaagaaaagatctgtgttgctggtggagacccaacaatagtagaatctcctactgaacccaagtggtcttcaaaaggcagaatggaaagtcatgttggagtgcttgatcaagattctgagtccttcctgaaaattgacattcccttctcttctgtaactaacatagtggtatctggagatagatccttctatattgagggtgcatctgctactcttccagtatcaatagcaaaggtgacacttgatgaaaagagaactatggcaactgatttctctattgtttggtcctcctctgaggatgttgcacaatatgaatcatacttcagcttgcctgaatttgtggagttcccaaatgtgatcaatggtggacccacagatgaagcacgaggggttctggatcttagtgtgcagtactggacaagccgaggatgggcatttgttgatgttaactatgggggaagctcaggctatgggagagaatttcgagagaggcttttagcacaatggggtgttgttgatgtaaatgattgctgcagttgtgctgcattcttggtggaaactggaagagtggatgggcagcggctttgtgtaactggagaatctgctggtggattcacaactttagcctgccttgctttcagacagaccttcaaggctggttcgtctttatatgggatagctgacctagcgtccttgagggcaggaatgcacaagtttgaagcatactacattgataaccttgtgggtaataaacaagcttactttgagagatctcctataaacttcgttgaaaacttttcatgtccagtgattttgtttcaagggttggaagacacggttgtatcaccagatcaggcaacaaaaatatacaaagccataaaggacaagggccttcccgttgctttggttgagtacgaaggggaacaacatggcttccgcaaggctgagaacatcaaatttaccttggagcaggagatggtgttcttggcaagattagtgggagagttcaaggtgcctgatgacataactccaatcaagattgaaaacttcgattaggccttgtactcacgtttcaaacgtcaattacctgccatcaactgctgaagtgatcaacttggtgcacctgtgcggcagacttgccattcgcagctgttctttcaactgaactctagggctctaggctgttgttacgagcaataaattgaagcaaagcttatcaaaacacactagcttttccccgctgtcggtctgtttccaggttccactgtctgtggacgcggagatctcgttgacgcgcgaggagacaaatgggccatgatttaaggggtgtttccgtagttacgaaaatgaaataaaatagagggacttaaaattaatccctagaaatcaaatgtctccttagttttcttccaaaccgtgagttggatatgattggcccatcaatcatgcttcaacacggttttctactccctccgtttctttttattag

SEQ ID NO: 82087 - DNA, 3339 bp, Zea Mays
ctaggtttggtcgggtttgaaaactcatggattcacgagtttaaatattataggaacaaatccgtacccataaatccatcggatatagatttactaatattaacaaatatacaaatacgaaaattaacctaaactcataacactaacgaaccatcgagtttcagataaccgttgccatctctaagggcatgtacaatgggtatcttaagttgtgtcttagagtgtgtctaggggggtgaatgtaaaaaaactcaagacatgtatcttgacgaagacacagtgtcttagctctatgttcgagacaggagactagctgattggtcactttaatttattgaatgctctgattggtacaatgaatatggtaagacacatgttttagacatgaccattgtattatgtcgtgttttagctgtgtcttgtacttagaggaccgtgcagcagtgtctaggttgtacatgccctaatgcggacgccgcttacgcttctgcacgtggaactgtggaaggctggaagccgctaggcgctagagtcagctcgttgaggcattcagtcaacacactgacttcgtccccgtcccgtcgtgcccgggcctctctctcacatccactgccccgacccgccgccgctcgattgcgacctgacggcggcaatgcacccccgcatcgcatcgggcgccaccggtaagtcgaccgcgccgtacggttcctgggagtcgccgatcagcgccgctgtcgtctccgccgccgggaggaccgccgaggggtttgcaatcgctggcgacggccggctcgtctgggtggagacgcgccccgaggatggagggcgcgcggtcctcgtgaaggaagcggcaggaccaggcggtaaggctcttgatgtgacgccgcagggtttcgcggtgcggtccctggcgcaggagtacggtggtggggcattcgccgtgcaaggggacaccgttgtgttctctaattacactgaccagcgtctgtacaggcagacaataggagataattcaccactaccactgacaccagattatggaccagtagtacgctatgctgatggtgtctttgatccccatttccatcgtttcgtaactataatggaagaccatcggcacaatagctcaaatcccatcactacaattgttgctgtaggaataagtgatccggatgtcaaagaatatactatgctggtcagtggcaatgacttttatgccttcccccgtattgatccaactaaaaaacgtatggcatggattgagtggagtaacccaaacatgtcctgggacaaatcgcagttgtgggttgggtatttcaatgagaaaggagagataaaagaaaagatctgtgttgctggtggagacccaacaatagtagaatctcctactgaacccaagtggtcttcaaaaggcagaatggaaagtcatgttggagtgcttgatcaagattctgagtccttcctgaaaattgacattcccttctcttctgtaactaacatagtggtatctggagatagatccttctatattgagggtgcatctgctactcttccagtatcaatagcaaaggtgacacttgatgaaaagagaactatggcaactgatttctctattgtttggtcctcctctgaggatgttgcacaatatgaatcatacttcagcttgcctgaatttgtggagttcccaaatgtgatcaatggtcagcatgcatatgcttatttttatgctccgtataataatttttttcaaggttcatcagacgaaaagcctcccctactggtcagaactcatggtaaacgaatatattatttttgtccttttttctttatgtcatttatgatcatgacttcatgttacatcagaaataacaagcaaaaacattttgttggattttatgtactttctaatcagtatgtaaagccgtctccagcagattatgcaaaacactagattgtactattcacagagtgaagtttgaaatacaagataggataagtaagctgctgaagacaacctaagagtgacaagtgtttgcctgctactgcagtcagtatctgtcaattcagtctttcggcaacataatctcttagcattttgatgatagacgtgcatacattagtttatgctaacttgattttggtccagatgcttgtcaaaagcatcacatagtgaaaaatcttcttaacattattataagtttatagcttctttataccacatcattgtttaggtggacccacagatgaagcacgaggggttctggatcttagtgtgcagtactggacaagccgaggatgggcatttgttgatgttaactatgggggaagctcaggctatgggagagaatttcgagagaggcttttagcacaatggggtgttgttgatgtaaatgattgctgcagttgtgctgcattcttggtggaaactggaagagtggatgggcagcggctttgtgtaactggagaatctgctggtggattcacaactttagcctgccttgctttcagacagaccttcaaggctgatagctgacctagcgtccttgagggcaggaatgcacaagtttgaagcatactacattgataaccttgtgggtaataaacaagcttactttgagagatctcctataaacttcgttgaaaacttttcatgtccagtgattttgtttcaagggttggaagacacggttgtatcaccagatcaggcaacaaaaatatacaaagccataaaggacaagggccttcccgttgctttggttgagtacgaaggggaacaacatggcttccgcaaggctgagaacatcaaatttaccttggagcaggagatggtgttcttggcaagattagtgggagagttcaaggtgcctgatgacataactccaatcaagattgaaaacttcgattaggccttgtactcacgtttcaaacgtcaattacctgccatcaactgctgaagtgatcaacttggtgcacctgtgcggcagacttgccattcgcagctgttctttcaactgaactctagggctctaggctgttgttacgagcaataaattgaagcaaagcttatcaaaacacactagcttttccccgctgtcggtctgtttccaggttccactgtctgtggacgcggagatctcgttgacgcgcgaggagacaaatgggccatgatttaaggggtgtttccgtagttacgaaaatgaaataaaatagagggacttaaaattaatccctagaaatcaaatgtctccttagttttcttccaaaccgtgagttggatatgattggcccatcaatcatgcttcaacacggttttctactccctccgtttctttttattag

SEQ ID NO: 82088 - DNA, 2692 bp, Zea Mays
ctaggtttggtcgggtttgaaaactcatggattcacgagtttaaatattataggaacaaatccgtacccataaatccatcggatatagatttactaatattaacaaatatacaaatacgaaaattaacctaaactcataacactaacgaaccatcgagtttcagataaccgttgccatctctaagggcatgtacaatgggtatcttaagttgtgtcttagagtgtgtctaggggggtgaatgtaaaaaaactcaagacatgtatcttgacgaagacacagtgtcttagctctatgttcgagacaggagactagctgattggtcactttaatttattgaatgctctgattggtacaatgaatatggtaagacacatgttttagacatgaccattgtattatgtcgtgttttagctgtgtcttgtacttagaggaccgtgcagcagtgtctaggttgtacatgccctaatgcggacgccgcttacgcttctgcacgtggaactgtggaaggctggaagccgctaggcgctagagtcagctcgttgaggcattcagtcaacacactgacttcgtccccgtcccgtcgtgcccgggcctctctctcacatccactgccccgacccgccgccgctcgattgcgacctgacggcggcaatgcacccccgcatcgcatcgggcgccaccggtaagtcgaccgcgccgtacggttcctgggagtcgccgatcagcgccgctgtcgtctccgccgccgggaggaccgccgaggggtttgcaatcgctggcgacggccggctcgtctgggtggagacgcgccccgaggatggagggcgcgcggtcctcgtgaaggaagcggcaggaccaggcggtaaggctcttgatgtgacgccgcagggtttcgcggtgcggtccctggcgcaggagtacggtggtggggcattcgccgtgcaaggggacaccgttgtgttctctaattacactgaccagcgtctgtacaggcagacaataggagagagataaaagaaaagatctgtgttgctggtggagacccaacaatagtagaatctcctactgaacccaagtggtcttcaaaaggggagctgttcttcataaccgatcgaaggagtgggttttggaatatttataaatgggatgaacacagcagagcggtaacacctctgcattcacttgatgctgaattctccaagcccatgtggatttttggtgtcagctcctatggtttccttggaatagatgacacaagtcacaaaattgtttgctcttacagaatggaaagtcatgttggagtgcttgatcaagattctgagtccttcctgaaaattgacattcccttctcttctgtaactaacatagtggtatctggagatagatccttctatattgagggtgcatctgctactcttccagtatcaatagcaaaggtgacacttgatgaaaagagaactatggcaactgatttctctattgtttggtcctcctctgaggatgttgcacaatatgaatcatacttcagcttgcctgaatttgtggagttcccaaatgtgatcaatggtggacccacagatgaagcacgaggggttctggatcttagtgtgcagtactggacaagccgaggatgggcatttgttgatgttaactatgggggaagctcaggctatgggagagaatttcgagagaggcttttagcacaatggggtgttgttgatgtaaatgattgctgcagttgtgctgcattcttggtggaaactggaagagtggatgggcagcggctttgtgtaactggagaatctgctggtggattcacaactttagcctgccttgctttcagacagaccttcaaggctggttcgtctttatatgggatagctgacctagcgtccttgagggcaggaatgcacaagtttgaagcatactacattgataaccttgtgggtaataaacaagcttactttgagagatctcctataaacttcgttgaaaacttttcatgtccagtgattttgtttcaagggttggaagacacggttgtatcaccagatcaggcaacaaaaatatacaaagccataaaggacaagggccttcccgttgctttggttgagtacgaaggggaacaacatggcttccgcaaggctgagaacatcaaatttaccttggagcaggagatggtgttcttggcaagattagtgggagagttcaaggtgcctgatgacataactccaatcaagattgaaaacttcgattaggccttgtactcacgtttcaaacgtcaattacctgccatcaactgctgaagtgatcaacttggtgcacctgtgcggcagacttgccattcgcagctgttctttcaactgaactctagggctctaggctgttgttacgagcaataaattgaagcaaagcttatcaaaacacactagcttttccccgctgtcggtctgtttccaggttccactgtctgtggacgcggagatctcgttgacgcgcgaggagacaaatgggccatgatttaaggggtgtttccgtagttacgaaaatgaaataaaatagagggacttaaaattaatccctagaaatcaaatgtctccttagttttcttccaaaccgtgagttggatatgattggcccatcaatcatgcttcaacacggttttctactccctccgtttctttttattag

SEQ ID NO: 82089 - DNA, 3100 bp, Zea Mays
ctaggtttggtcgggtttgaaaactcatggattcacgagtttaaatattataggaacaaatccgtacccataaatccatcggatatagatttactaatattaacaaatatacaaatacgaaaattaacctaaactcataacactaacgaaccatcgagtttcagataaccgttgccatctctaagggcatgtacaatgggtatcttaagttgtgtcttagagtgtgtctaggggggtgaatgtaaaaaaactcaagacatgtatcttgacgaagacacagtgtcttagctctatgttcgagacaggagactagctgattggtcactttaatttattgaatgctctgattggtacaatgaatatggtaagacacatgttttagacatgaccattgtattatgtcgtgttttagctgtgtcttgtacttagaggaccgtgcagcagtgtctaggttgtacatgccctaatgcggacgccgcttacgcttctgcacgtggaactgtggaaggctggaagccgctaggcgctagagtcagctcgttgaggcattcagtcaacacactgacttcgtccccgtcccgtcgtgcccgggcctctctctcacatccactgccccgacccgccgccgctcgattgcgacctgacggcggcaatgcacccccgcatcgcatcgggcgccaccggtaagtcgaccgcgccgtacggttcctgggagtcgccgatcagcgccgctgtcgtctccgccgccgggaggaccgccgaggggtttgcaatcgctggcgacggccggctcgtctgggtggagacgcgccccgaggatggagggcgcgcggtcctcgtgaaggaagcggcaggaccaggcggtaaggctcttgatgtgacgccgcagggtttcgcggtgcggtccctggcgcaggagtacggtggtggggcattcgccgtgcaaggggacaccgttgtgttctctaattacactgaccagcgtctgtacaggcagacaataggagataattcaccactaccactgacaccagattatggaccagtagtacgctatgctgatggtgtctttgatccccatttccatcgtttcgtaactataatggaagaccatcggcacaatagctcaaatcccatcactacaattgttgctgtaggaataagtgatccggatgtcaaagaatatactatgctggtcagtggcaatgacttttatgccttcccccgtattgatccaactaaaaaacgtatggcatggattgagtggagtaacccaaacatgtcctgggacaaatcgcagttgtgggttgggtatttcaatgagaaaggagagataaaagaaaagatctgtgttgctggtggagacccaacaatagtagaatctcctactgaacccaagtggtcttcaaaaggggagctgttcttcataaccgatcgaaggagtgggttttggaatatttataaatgggatgaacacagcagagcggtaacacctctgcattcacttgatgctgaattctccaagcccatgtggatttttggtgtcagctcctatggtttccttggaatagatgacacaagtcacaaaattgtttgctcttacaggcagaatggaaagtcatgttggagtgcttgatcaagattctgagtccttcctgaaaattgacattcccttctcttctgtaactaacatagtggtatctggagatagatccttctatattgagggtgcatctgctactcttccagtatcaatagcaaaggtgacacttgatgaaaagagaactatggcaactgatttctctattgtttggtcctcctctgaggatgttgcacaatatgaatcatacttcagcttgcctgaatttgtggagttcccaaatgtgatcaatggtcagcatgcatatgcttatttttatgctccgtataataatttttttcaaggttcatcagacgaaaagcctcccctactggtcagaactcatggatgaagcacgaggggttctggatcttagtgtgcagtactggacaagccgaggatgggcatttgttgatgttaactatgggggaagctcaggctatgggagagaatttcgagagaggcttttagcacaatggggtgttgttgatgtaaatgattgctgcagttgtgctgcattcttggtggaaactggaagagtggatgggcagcggctttgtgtaactggagaatctgctggtggattcacaactttagcctgccttgctttcagacagaccttcaaggctggttcgtctttatatgggatagctgacctagcgtccttgagggcaggaatgcacaagtttgaagcatactacattgataaccttgtgggtaataaacaagcttactttgagagatctcctataaacttcgttgaaaacttttcatgtccagtgattttgtttcaagggttggaagacacggttgtatcaccagatcaggcaacaaaaatatacaaagccataaaggacaagggccttcccgttgctttggttgagtacgaaggggaacaacatggcttccgcaaggctgagaacatcaaatttaccttggagcaggagatggtgttcttggcaagattagtgggagagttcaaggtgcctgatgacataactccaatcaagattgaaaacttcgattaggccttgtactcacgtttcaaacgtcaattacctgccatcaactgctgaagtgatcaacttggtgcacctgtgcggcagacttgccattcgcagctgttctttcaactgaactctagggctctaggctgttgttacgagcaataaattgaagcaaagcttatcaaaacacactagcttttccccgctgtcggtctgtttccaggttccactgtctgtggacgcggagatctcgttgacgcgcgaggagacaaatgggccatgatttaaggggtgtttccgtagttacgaaaatgaaataaaatagagggacttaaaattaatccctagaaatcaaatgtctccttagttttcttccaaaccgtgagttggatatgattggcccatcaatcatgcttcaacacggttttctactccctccgtttctttttattag

SEQ ID NO: 82090 - DNA, 3458 bp, Zea Mays
ctaggtttggtcgggtttgaaaactcatggattcacgagtttaaatattataggaacaaatccgtacccataaatccatcggatatagatttactaatattaacaaatatacaaatacgaaaattaacctaaactcataacactaacgaaccatcgagtttcagataaccgttgccatctctaagggcatgtacaatgggtatcttaagttgtgtcttagagtgtgtctaggggggtgaatgtaaaaaaactcaagacatgtatcttgacgaagacacagtgtcttagctctatgttcgagacaggagactagctgattggtcactttaatttattgaatgctctgattggtacaatgaatatggtaagacacatgttttagacatgaccattgtattatgtcgtgttttagctgtgtcttgtacttagaggaccgtgcagcagtgtctaggttgtacatgccctaatgcggacgccgcttacgcttctgcacgtggaactgtggaaggctggaagccgctaggcgctagagtcagctcgttgaggcattcagtcaacacactgacttcgtccccgtcccgtcgtgcccgggcctctctctcacatccactgccccgacccgccgccgctcgattgcgacctgacggcggcaatgcacccccgcatcgcatcgggcgccaccggtaagtcgaccgcgccgtacggttcctgggagtcgccgatcagcgccgctgtcgtctccgccgccgggaggaccgccgaggggtttgcaatcgctggcgacggccggctcgtctgggtggagacgcgccccgaggatggagggcgcgcggtcctcgtgaaggaagcggcaggaccaggcggtaaggctcttgatgtgacgccgcagggtttcgcggtgcggtccctggcgcaggagtacggtggtggggcattcgccgtgcaaggggacaccgttgtgttctctaattacactgaccagcgtctgtacaggcagacaataggagataattcaccactaccactgacaccagattatggaccagtagtacgctatgctgatggtgtctttgatccccatttccatcgtttcgtaactataatggaagaccatcggcacaatagctcaaatcccatcactacaattgttgctgtaggaataagtgatccggatgtcaaagaatatactatgctggtcagtggcaatgacttttatgccttcccccgtattgatccaactaaaaaacgtatggcatggattgagtggagtaacccaaacatgtcctgggacaaatcgcagttgtgggttgggtatttcaatgagaaaggagagataaaagaaaagatctgtgttgctggtggagacccaacaatagtagaatctcctactgaacccaagtggtcttcaaaaggggagctgttcttcataaccgatcgaaggagtgggttttggaatatttataaatgggatgaacacagcagagcggtaacacctctgcattcacttgatgctgaattctccaagcccatgtggatttttggtgtcagctcctatggtttccttggaatagatgacacaagtcacaaaattgtttgctcttacagaatggaaagtcatgttggagtgcttgatcaagattctgagtccttcctgaaaattgacattcccttctcttctgtaactaacatagtggtatctggagatagatccttctatattgagggtgcatctgctactcttccagtatcaatagcaaaggtgacacttgatgaaaagagaactatggcaactgatttctctattgtttggtcctcctctgaggatgttgcacaatatgaatcatacttcagcttgcctgaatttgtggagttcccaaatgtgatcaatggtcagcatgcatatgcttatttttatgctccgtataataatttttttcaaggttcatcagacgaaaagcctcccctactggtcagaactcatggtaaacgaatatattatttttgtccttttttctttatgtcatttatgatcatgacttcatgttacatcagaaataacaagcaaaaacattttgttggattttatgtactttctaatcagtatgtaaagccgtctccagcagattatgcaaaacactagattgtactattcacagagtgaagtttgaaatacaagataggataagtaagctgctgaagacaacctaagagtgacaagtgtttgcctgctactgcagtcagtatctgtcaattcagtctttcggcaacataatctcttagcattttgatgatagacgtgcatacattagtttatgctaacttgattttggtccagatgcttgtcaaaagcatcacatagtgaaaaatcttcttaacattattataagtttatagcttctttataccacatcattgtttaggtggacccacagatgaagcacgaggggttctggatcttagtgtgcagtactggacaagccgaggatgggcatttgttgatgttaactatgggggaagctcaggctatgggagagaatttcgagagaggcttttagcacaatggggtgttgttgatgtaaatgattgctgcagttgtgctgcattcttggtggaaactggaagagtggatgggcagcggctttgtgtaactggagaatctgctggtggattcacaactttagcctgccttgctttcagacagaccttcaaggctggtaataaacaagcttactttgagagatctcctataaacttcgttgaaaacttttcatgtccagtgattttgtttcaagggttggaagacacggttgtatcaccagatcaggcaacaaaaatatacaaagccataaaggacaagggccttcccgttgctttggttgagtacgaaggggaacaacatggcttccgcaaggctgagaacatcaaatttaccttggagcaggagatggtgttcttggcaagattagtgggagagttcaaggtgcctgatgacataactccaatcaagattgaaaacttcgattaggccttgtactcacgtttcaaacgtcaattacctgccatcaactgctgaagtgatcaacttggtgcacctgtgcggcagacttgccattcgcagctgttctttcaactgaactctagggctctaggctgttgttacgagcaataaattgaagcaaagcttatcaaaacacactagcttttccccgctgtcggtctgtttccaggttccactgtctgtggacgcggagatctcgttgacgcgcgaggagacaaatgggccatgatttaaggggtgtttccgtagttacgaaaatgaaataaaatagagggacttaaaattaatccctagaaatcaaatgtctccttagttttcttccaaaccgtgagttggatatgattggcccatcaatcatgcttcaacacggttttctactccctccgtttctttttattag

SEQ ID NO: 82091 - DNA, 2590 bp, Zea Mays
ctaggtttggtcgggtttgaaaactcatggattcacgagtttaaatattataggaacaaatccgtacccataaatccatcggatatagatttactaatattaacaaatatacaaatacgaaaattaacctaaactcataacactaacgaaccatcgagtttcagataaccgttgccatctctaagggcatgtacaatgggtatcttaagttgtgtcttagagtgtgtctaggggggtgaatgtaaaaaaactcaagacatgtatcttgacgaagacacagtgtcttagctctatgttcgagacaggagactagctgattggtcactttaatttattgaatgctctgattggtacaatgaatatggtaagacacatgttttagacatgaccattgtattatgtcgtgttttagctgtgtcttgtacttagaggaccgtgcagcagtgtctaggttgtacatgccctaatgcggacgccgcttacgcttctgcacgtggaactgtggaaggctggaagccgctaggcgctagagtcagctcgttgaggcattcagtcaacacactgacttcgtccccgtcccgtcgtgcccgggcctctctctcacatccactgccccgacccgccgccgctcgattgcgacctgacggcggcaatgcacccccgcatcgcatcgggcgccaccggtaagtcgaccgcgccgtacggttcctgggagtcgccgatcagcgccgctgtcgtctccgccgccgggaggaccgccgaggggtttgcaatcgctggcgacggccggctcgtctgggtggagacgcgccccgaggatggagggcgcgcggtcctcgtgaaggaagcggcaggaccaggcggtaaggctcttgatgtgacgccgcagggtttcgcggtgcggtccctggcgcaggagtacggtggtggggcattcgccgtgcaaggggacaccgttgtgttctctaattacactgaccagcgtctgtacaggcagacaataggagataattcaccactaccactgacaccagattatggaccagtagtacgctatgctgatggtgtctttgatccccatttccatcgtttcgtaactataatggaagaccatcggcacaatagctcaaatcccatcactacaattgttgctgtaggaataagtgatccggatgtcaaagagagataaaagaaaagatctgtgttgctggtggagacccaacaatagtagaatctcctactgaacccaagtggtcttcaaaaggcagaatggaaagtcatgttggagtgcttgatcaagattctgagtccttcctgaaaattgacattcccttctcttctgtaactaacatagtggtatctggagatagatccttctatattgagggtgcatctgctactcttccagtatcaatagcaaaggtgacacttgatgaaaagagaactatggcaactgatttctctattgtttggtcctcctctgaggatgttgcacaatatgaatcatacttcagcttgcctgaatttgtggagttcccaaatgtgatcaatggtggacccacagatgaagcacgaggggttctggatcttagtgtgcagtactggacaagccgaggatgggcatttgttgatgttaactatgggggaagctcaggctatgggagagaatttcgagagaggcttttagcacaatggggtgttgttgatgtaaatgattgctgcagttgtgctgcattcttggtggaaactggaagagtggatgggcagcggctttgtgtaactggagaatctgctggtggattcacaactttagcctgccttgctttcagacagaccttcaaggctggtaataaacaagcttactttgagagatctcctataaacttcgttgaaaacttttcatgtccagtgattttgtttcaagggttggaagacacggttgtatcaccagatcaggcaacaaaaatatacaaagccataaaggacaagggccttcccgttgctttggttgagtacgaaggggaacaacatggcttccgcaaggctgagaacatcaaatttaccttggagcaggagatggtgttcttggcaagattagtgggagagttcaaggtgcctgatgacataactccaatcaagattgaaaacttcgattaggccttgtactcacgtttcaaacgtcaattacctgccatcaactgctgaagtgatcaacttggtgcacctgtgcggcagacttgccattcgcagctgttctttcaactgaactctagggctctaggctgttgttacgagcaataaattgaagcaaagcttatcaaaacacactagcttttccccgctgtcggtctgtttccaggttccactgtctgtggacgcggagatctcgttgacgcgcgaggagacaaatgggccatgatttaaggggtgtttccgtagttacgaaaatgaaataaaatagagggacttaaaattaatccctagaaatcaaatgtctccttagttttcttccaaaccgtgagttggatatgattggcccatcaatcatgcttcaacacggttttctactccctccgtttctttttattag

SEQ ID NO: 82092 - DNA, 2901 bp, Zea Mays
ctaggtttggtcgggtttgaaaactcatggattcacgagtttaaatattataggaacaaatccgtacccataaatccatcggatatagatttactaatattaacaaatatacaaatacgaaaattaacctaaactcataacactaacgaaccatcgagtttcagataaccgttgccatctctaagggcatgtacaatgggtatcttaagttgtgtcttagagtgtgtctaggggggtgaatgtaaaaaaactcaagacatgtatcttgacgaagacacagtgtcttagctctatgttcgagacaggagactagctgattggtcactttaatttattgaatgctctgattggtacaatgaatatggtaagacacatgttttagacatgaccattgtattatgtcgtgttttagctgtgtcttgtacttagaggaccgtgcagcagtgtctaggttgtacatgccctaatgcggacgccgcttacgcttctgcacgtggaactgtggaaggctggaagccgctaggcgctagagtcagctcgttgaggcattcagtcaacacactgacttcgtccccgtcccgtcgtgcccgggcctctctctcacatccactgccccgacccgccgccgctcgattgcgacctgacggcggcaatgcacccccgcatcgcatcgggcgccaccggtaagtcgaccgcgccgtacggttcctgggagtcgccgatcagcgccgctgtcgtctccgccgccgggaggaccgccgaggggtttgcaatcgctggcgacggccggctcgtctgggtggagacgcgccccgaggatggagggcgcgcggtcctcgtgaaggaagcggcaggaccaggcggtaaggctcttgatgtgacgccgcagggtttcgcggtgcggtccctggcgcaggagtacggtggtggggcattcgccgtgcaaggggacaccgttgtgttctctaattacactgaccagcgtctgtacaggcagacaataggagataattcaccactaccactgacaccagattatggaccagtagtacgctatgctgatggtgtctttgatccccatttccatcgtttcgtaactataatggaagaccatcggcacaatagctcaaatcccatcactacaattgttgctgtaggaataagtgatccggatgtcaaagaatatactatgctggtcagtggcaatgacttttatgccttcccccgtattgatccaactaaaaaacgtatggcatggattgagtggagtaacccaaacatgtcctgggacaaatcgcagttgtgggttgggtatttcaatgagaaaggagagataaaagaaaagatctgtgttgctggtggagacccaacaatagtagaatctcctactgaacccaagtggtcttcaaaaggcagaatggaaagtcatgttggagtgcttgatcaagattctgagtccttcctgaaaattgacattcccttctcttctgtaactaacatagtggtatctggagatagatccttctatattgagggtgcatctgctactcttccagtatcaatagcaaaggtgacacttgatgaaaagagaactatggcaactgatttctctattgtttggtcctcctctgaggatgttgcacaatatgaatcatacttcagcttgcctgaatttgtggagttcccaaatgtgatcaatggtcagcatgcatatgcttatttttatgctccgtataataatttttttcaaggttcatcagacgaaaagcctcccctactggtcagaactcatggtggacccacagatgaagcacgaggggttctggatcttagtgtgcagtactggacaagccgaggatgggcatttgttgatgttaactatgggggaagctcaggctatgggagagaatttcgagagaggcttttagcacaatggggtgttgttgatgtaaatgattgctgcagttgtgctgcattcttggtggaaactggaagagtggatgggcagcggctttgtgtaactggagaatctgctggtggattcacaactttagcctgccttgctttcagacagaccttcaaggctgatagctgacctagcgtccttgagggcaggaatgcacaagtttgaagcatactacattgataaccttgtgggtaataaacaagcttactttgagagatctcctataaacttcgttgaaaacttttcatgtccagtgattttgtttcaagggttggaagacacggttgtatcaccagatcaggcaacaaaaatatacaaagccataaaggacaagggccttcccgttgctttggttgagtacgaaggggaacaacatggcttccgcaaggctgagaacatcaaatttaccttggagcaggagatggtgttcttggcaagattagtgggagagttcaaggtgcctgatgacataactccaatcaagattgaaaacttcgattaggccttgtactcacgtttcaaacgtcaattacctgccatcaactgctgaagtgatcaacttggtgcacctgtgcggcagacttgccattcgcagctgttctttcaactgaactctagggctctaggctgttgttacgagcaataaattgaagcaaagcttatcaaaacacactagcttttccccgctgtcggtctgtttccaggttccactgtctgtggacgcggagatctcgttgacgcgcgaggagacaaatgggccatgatttaaggggtgtttccgtagttacgaaaatgaaataaaatagagggacttaaaattaatccctagaaatcaaatgtctccttagttttcttccaaaccgtgagttggatatgattggcccatcaatcatgcttcaacacggttttctactccctccgtttctttttattag

SEQ ID NO: 82093 - DNA, 3356 bp, Zea Mays
ctaggtttggtcgggtttgaaaactcatggattcacgagtttaaatattataggaacaaatccgtacccataaatccatcggatatagatttactaatattaacaaatatacaaatacgaaaattaacctaaactcataacactaacgaaccatcgagtttcagataaccgttgccatctctaagggcatgtacaatgggtatcttaagttgtgtcttagagtgtgtctaggggggtgaatgtaaaaaaactcaagacatgtatcttgacgaagacacagtgtcttagctctatgttcgagacaggagactagctgattggtcactttaatttattgaatgctctgattggtacaatgaatatggtaagacacatgttttagacatgaccattgtattatgtcgtgttttagctgtgtcttgtacttagaggaccgtgcagcagtgtctaggttgtacatgccctaatgcggacgccgcttacgcttctgcacgtggaactgtggaaggctggaagccgctaggcgctagagtcagctcgttgaggcattcagtcaacacactgacttcgtccccgtcccgtcgtgcccgggcctctctctcacatccactgccccgacccgccgccgctcgattgcgacctgacggcggcaatgcacccccgcatcgcatcgggcgccaccggtaagtcgaccgcgccgtacggttcctgggagtcgccgatcagcgccgctgtcgtctccgccgccgggaggaccgccgaggggtttgcaatcgctggcgacggccggctcgtctgggtggagacgcgccccgaggatggagggcgcgcggtcctcgtgaaggaagcggcaggaccaggcggtaaggctcttgatgtgacgccgcagggtttcgcggtgcggtccctggcgcaggagtacggtggtggggcattcgccgtgcaaggggacaccgttgtgttctctaattacactgaccagcgtctgtacaggcagacaataggagataattcaccactaccactgacaccagattatggaccagtagtacgctatgctgatggtgtctttgatccccatttccatcgtttcgtaactataatggaagaccatcggcacaatagctcaaatcccatcactacaattgttgctgtaggaataagtgatccggatgtcaaagaatatactatgctggtcagtggcaatgacttttatgccttcccccgtattgatccaactaaaaaacgtatggcatggattgagtggagtaacccaaacatgtcctgggacaaatcgcagttgtgggttgggtatttcaatgagaaaggagagataaaagaaaagatctgtgttgctggtggagacccaacaatagtagaatctcctactgaacccaagtggtcttcaaaaggcagaatggaaagtcatgttggagtgcttgatcaagattctgagtccttcctgaaaattgacattcccttctcttctgtaactaacatagtggtatctggagatagatccttctatattgagggtgcatctgctactcttccagtatcaatagcaaaggtgacacttgatgaaaagagaactatggcaactgatttctctattgtttggtcctcctctgaggatgttgcacaatatgaatcatacttcagcttgcctgaatttgtggagttcccaaatgtgatcaatggtcagcatgcatatgcttatttttatgctccgtataataatttttttcaaggttcatcagacgaaaagcctcccctactggtcagaactcatggtaaacgaatatattatttttgtccttttttctttatgtcatttatgatcatgacttcatgttacatcagaaataacaagcaaaaacattttgttggattttatgtactttctaatcagtatgtaaagccgtctccagcagattatgcaaaacactagattgtactattcacagagtgaagtttgaaatacaagataggataagtaagctgctgaagacaacctaagagtgacaagtgtttgcctgctactgcagtcagtatctgtcaattcagtctttcggcaacataatctcttagcattttgatgatagacgtgcatacattagtttatgctaacttgattttggtccagatgcttgtcaaaagcatcacatagtgaaaaatcttcttaacattattataagtttatagcttctttataccacatcattgtttaggtggacccacagatgaagcacgaggggttctggatcttagtgtgcagtactggacaagccgaggatgggcatttgttgatgttaactatgggggaagctcaggctatgggagagaatttcgagagaggcttttagcacaatggggtgttgttgatgtaaatgattgctgcagttgtgctgcattcttggtggaaactggaagagtggatgggcagcggctttgtgtaactggagaatctgctggtggattcacaactttagcctgccttgctttcagacagaccttcaaggctggttcgtctttatatgggatagctgacctagcgtccttgagggcaggaatgcacaagtttgaagcatactacattgataaccttgtgggtaataaacaagcttactttgagagatctcctataaacttcgttgaaaacttttcatgtccagtgattttgtttcaagggttggaagacacggttgtatcaccagatcaggcaacaaaaatatacaaagccataaaggacaagggccttcccgttgctttggttgagtacgaaggggaacaacatggcttccgcaaggctgagaacatcaaatttaccttggagcaggagatggtgttcttggcaagattagtgggagagttcaaggtgcctgatgacataactccaatcaagattgaaaacttcgattaggccttgtactcacgtttcaaacgtcaattacctgccatcaactgctgaagtgatcaacttggtgcacctgtgcggcagacttgccattcgcagctgttctttcaactgaactctagggctctaggctgttgttacgagcaataaattgaagcaaagcttatcaaaacacactagcttttccccgctgtcggtctgtttccaggttccactgtctgtggacgcggagatctcgttgacgcgcgaggagacaaatgggccatgatttaaggggtgtttccgtagttacgaaaatgaaataaaatagagggacttaaaattaatccctagaaatcaaatgtctccttagttttcttccaaaccgtgagttggatatgattggcccatcaatcatgcttcaacacggttttctactccctccgtttctttttattag

SEQ ID NO: 82094 - DNA, 2831 bp, Zea Mays
ctaggtttggtcgggtttgaaaactcatggattcacgagtttaaatattataggaacaaatccgtacccataaatccatcggatatagatttactaatattaacaaatatacaaatacgaaaattaacctaaactcataacactaacgaaccatcgagtttcagataaccgttgccatctctaagggcatgtacaatgggtatcttaagttgtgtcttagagtgtgtctaggggggtgaatgtaaaaaaactcaagacatgtatcttgacgaagacacagtgtcttagctctatgttcgagacaggagactagctgattggtcactttaatttattgaatgctctgattggtacaatgaatatggtaagacacatgttttagacatgaccattgtattatgtcgtgttttagctgtgtcttgtacttagaggaccgtgcagcagtgtctaggttgtacatgccctaatgcggacgccgcttacgcttctgcacgtggaactgtggaaggctggaagccgctaggcgctagagtcagctcgttgaggcattcagtcaacacactgacttcgtccccgtcccgtcgtgcccgggcctctctctcacatccactgccccgacccgccgccgctcgattgcgacctgacggcggcaatgcacccccgcatcgcatcgggcgccaccggtaagtcgaccgcgccgtacggttcctgggagtcgccgatcagcgccgctgtcgtctccgccgccgggaggaccgccgaggggtttgcaatcgctggcgacggccggctcgtctgggtggagacgcgccccgaggatggagggcgcgcggtcctcgtgaaggaagcggcaggaccaggcggtaaggctcttgatgtgacgccgcagggtttcgcggtgcggtccctggcgcaggagtacggtggtggggcattcgccgtgcaaggggacaccgttgtgttctctaattacactgaccagcgtctgtacaggcagacaataggagataattcaccactaccactgacaccagattatggaccagtagtacgctatgctgatggtgtctttgatccccatttccatcgtttcgtaactataatggaagaccatcggcacaatagctcaaatcccatcactacaattgttgctgtaggaataagtgatccggatgtcaaagaatatactatgctggtcagtggcaatgacttttatgccttcccccgtattgatccaactaaaaaacgtatggcatggattgagtggagtaacccaaacatgtcctgggacaaatcgcagttgtgggttgggtatttcaatgagaaaggagagataaaagaaaagatctgtgttgctggtggagacccaacaatagtagaatctcctactgaacccaagtggtcttcaaaaggcagaatggaaagtcatgttggagtgcttgatcaagattctgagtccttcctgaaaattgacattcccttctcttctgtaactaacatagtggtatctggagatagatccttctatattgagggtgcatctgctactcttccagtatcaatagcaaaggtgacacttgatgaaaagagaactatggcaactgatttctctattgtttggtcctcctctgaggatgttgcacaatatgaatcatacttcagcttgcctgaatttgtggagttcccaaatgtgatcaatggtcagcatgcatatgcttatttttatgctccgtataataatttttttcaaggttcatcagacgaaaagcctcccctactggtcagaactcatggtggacccacagatgaagcacgaggggttctggatcttagtgtgcagtactggacaagccgaggatgggcatttgttgatgttaactatgggggaagctcaggctatgggagagaatttcgagagaggcttttagcacaatggggtgttgttgatgtaaatgattgctgcagttgtgctgcattcttggtggaaactggaagagtggatgggcagcggctttgtgtaactggagaatctgctggtggattcacaactttagcctgccttgctttcagacagaccttcaaggctggtaataaacaagcttactttgagagatctcctataaacttcgttgaaaacttttcatgtccagtgattttgtttcaagggttggaagacacggttgtatcaccagatcaggcaacaaaaatatacaaagccataaaggacaagggccttcccgttgctttggttgagtacgaaggggaacaacatggcttccgcaaggctgagaacatcaaatttaccttggagcaggagatggtgttcttggcaagattagtgggagagttcaaggtgcctgatgacataactccaatcaagattgaaaacttcgattaggccttgtactcacgtttcaaacgtcaattacctgccatcaactgctgaagtgatcaacttggtgcacctgtgcggcagacttgccattcgcagctgttctttcaactgaactctagggctctaggctgttgttacgagcaataaattgaagcaaagcttatcaaaacacactagcttttccccgctgtcggtctgtttccaggttccactgtctgtggacgcggagatctcgttgacgcgcgaggagacaaatgggccatgatttaaggggtgtttccgtagttacgaaaatgaaataaaatagagggacttaaaattaatccctagaaatcaaatgtctccttagttttcttccaaaccgtgagttggatatgattggcccatcaatcatgcttcaacacggttttctactccctccgtttctttttattag

SEQ ID NO: 82095 - DNA, 2959 bp, Zea Mays
ctaggtttggtcgggtttgaaaactcatggattcacgagtttaaatattataggaacaaatccgtacccataaatccatcggatatagatttactaatattaacaaatatacaaatacgaaaattaacctaaactcataacactaacgaaccatcgagtttcagataaccgttgccatctctaagggcatgtacaatgggtatcttaagttgtgtcttagagtgtgtctaggggggtgaatgtaaaaaaactcaagacatgtatcttgacgaagacacagtgtcttagctctatgttcgagacaggagactagctgattggtcactttaatttattgaatgctctgattggtacaatgaatatggtaagacacatgttttagacatgaccattgtattatgtcgtgttttagctgtgtcttgtacttagaggaccgtgcagcagtgtctaggttgtacatgccctaatgcggacgccgcttacgcttctgcacgtggaactgtggaaggctggaagccgctaggcgctagagtcagctcgttgaggcattcagtcaacacactgacttcgtccccgtcccgtcgtgcccgggcctctctctcacatccactgccccgacccgccgccgctcgattgcgacctgacggcggcaatgcacccccgcatcgcatcgggcgccaccggtaagtcgaccgcgccgtacggttcctgggagtcgccgatcagcgccgctgtcgtctccgccgccgggaggaccgccgaggggtttgcaatcgctggcgacggccggctcgtctgggtggagacgcgccccgaggatggagggcgcgcggtcctcgtgaaggaagcggcaggaccaggcggtaaggctcttgatgtgacgccgcagggtttcgcggtgcggtccctggcgcaggagtacggtggtggggcattcgccgtgcaaggggacaccgttgtgttctctaattacactgaccagcgtctgtacaggcagacaataggagataattcaccactaccactgacaccagattatggaccagtagtacgctatgctgatggtgtctttgatccccatttccatcgtttcgtaactataatggaagaccatcggcacaatagctcaaatcccatcactacaattgttgctgtaggaataagtgatccggatgtcaaagagagataaaagaaaagatctgtgttgctggtggagacccaacaatagtagaatctcctactgaacccaagtggtcttcaaaaggggagctgttcttcataaccgatcgaaggagtgggttttggaatatttataaatgggatgaacacagcagagcggtaacacctctgcattcacttgatgctgaattctccaagcccatgtggatttttggtgtcagctcctatggtttccttggaatagatgacacaagtcacaaaattgtttgctcttacagaatggaaagtcatgttggagtgcttgatcaagattctgagtccttcctgaaaattgacattcccttctcttctgtaactaacatagtggtatctggagatagatccttctatattgagggtgcatctgctactcttccagtatcaatagcaaaggtgacacttgatgaaaagagaactatggcaactgatttctctattgtttggtcctcctctgaggatgttgcacaatatgaatcatacttcagcttgcctgaatttgtggagttcccaaatgtgatcaatggtcagcatgcatatgcttatttttatgctccgtataataatttttttcaaggttcatcagacgaaaagcctcccctactggtcagaactcatggtggacccacagatgaagcacgaggggttctggatcttagtgtgcagtactggacaagccgaggatgggcatttgttgatgttaactatgggggaagctcaggctatgggagagaatttcgagagaggcttttagcacaatggggtgttgttgatgtaaatgattgctgcagttgtgctgcattcttggtggaaactggaagagtggatgggcagcggctttgtgtaactggagaatctgctggtggattcacaactttagcctgccttgctttcagacagaccttcaaggctggttcgtctttatatgggatagctgacctagcgtccttgagggcaggaatgcacaagtttgaagcatactacattgataaccttgtgggtaataaacaagcttactttgagagatctcctataaacttcgttgaaaacttttcatgtccagtgattttgtttcaagggttggaagacacggttgtatcaccagatcaggcaacaaaaatatacaaagccataaaggacaagggccttcccgttgctttggttgagtacgaaggggaacaacatggcttccgcaaggctgagaacatcaaatttaccttggagcaggagatggtgttcttggcaagattagtgggagagttcaaggtgcctgatgacataactccaatcaagattgaaaacttcgattaggccttgtactcacgtttcaaacgtcaattacctgccatcaactgctgaagtgatcaacttggtgcacctgtgcggcagacttgccattcgcagctgttctttcaactgaactctagggctctaggctgttgttacgagcaataaattgaagcaaagcttatcaaaacacactagcttttccccgctgtcggtctgtttccaggttccactgtctgtggacgcggagatctcgttgacgcgcgaggagacaaatgggccatgatttaaggggtgtttccgtagttacgaaaatgaaataaaatagagggacttaaaattaatccctagaaatcaaatgtctccttagttttcttccaaaccgtgagttggatatgattggcccatcaatcatgcttcaacacggttttctactccctccgtttctttttattag

SEQ ID NO: 82096 - DNA, 3111 bp, Zea Mays
ctaggtttggtcgggtttgaaaactcatggattcacgagtttaaatattataggaacaaatccgtacccataaatccatcggatatagatttactaatattaacaaatatacaaatacgaaaattaacctaaactcataacactaacgaaccatcgagtttcagataaccgttgccatctctaagggcatgtacaatgggtatcttaagttgtgtcttagagtgtgtctaggggggtgaatgtaaaaaaactcaagacatgtatcttgacgaagacacagtgtcttagctctatgttcgagacaggagactagctgattggtcactttaatttattgaatgctctgattggtacaatgaatatggtaagacacatgttttagacatgaccattgtattatgtcgtgttttagctgtgtcttgtacttagaggaccgtgcagcagtgtctaggttgtacatgccctaatgcggacgccgcttacgcttctgcacgtggaactgtggaaggctggaagccgctaggcgctagagtcagctcgttgaggcattcagtcaacacactgacttcgtccccgtcccgtcgtgcccgggcctctctctcacatccactgccccgacccgccgccgctcgattgcgacctgacggcggcaatgcacccccgcatcgcatcgggcgccaccggtaagtcgaccgcgccgtacggttcctgggagtcgccgatcagcgccgctgtcgtctccgccgccgggaggaccgccgaggggtttgcaatcgctggcgacggccggctcgtctgggtggagacgcgccccgaggatggagggcgcgcggtcctcgtgaaggaagcggcaggaccaggcggtaaggctcttgatgtgacgccgcagggtttcgcggtgcggtccctggcgcaggagtacggtggtggggcattcgccgtgcaaggggacaccgttgtgttctctaattacactgaccagcgtctgtacaggcagacaataggagataattcaccactaccactgacaccagattatggaccagtagtacgctatgctgatggtgtctttgatccccatttccatcgtttcgtaactataatggaagaccatcggcacaatagctcaaatcccatcactacaattgttgctgtaggaataagtgatccggatgtcaaagaatatactatgctggtcagtggcaatgacttttatgccttcccccgtattgatccaactaaaaaacgtatggcatggattgagtggagtaacccaaacatgtcctgggacaaatcgcagttgtgggttgggtatttcaatgagaaaggagagataaaagaaaagatctgtgttgctggtggagacccaacaatagtagaatctcctactgaacccaagtggtcttcaaaaggggagctgttcttcataaccgatcgaaggagtgggttttggaatatttataaatgggatgaacacagcagagcggtaacacctctgcattcacttgatgctgaattctccaagcccatgtggatttttggtgtcagctcctatggtttccttggaatagatgacacaagtcacaaaattgtttgctcttacaggcagaatggaaagtcatgttggagtgcttgatcaagattctgagtccttcctgaaaattgacattcccttctcttctgtaactaacatagtggtatctggagatagatccttctatattgagggtgcatctgctactcttccagtatcaatagcaaaggtgacacttgatgaaaagagaactatggcaactgatttctctattgtttggtcctcctctgaggatgttgcacaatatgaatcatacttcagcttgcctgaatttgtggagttcccaaatgtgatcaatggtcagcatgcatatgcttatttttatgctccgtataataatttttttcaaggttcatcagacgaaaagcctcccctactggtcagaactcatggtggacccacagatgaagcacgaggggttctggatcttagtgtgcagtactggacaagccgaggatgggcatttgttgatgttaactatgggggaagctcaggctatgggagagaatttcgagagaggcttttagcacaatggggtgttgttgatgtaaatgattgctgcagttgtgctgcattcttggtggaaactggaagagtggatgggcagcggctttgtgtaactggagaatctgctggtggattcacaactttagcctgccttgctttcagacagaccttcaaggctggttcgtctttatatgggatagctgacctagcgtccttgagggcaggaatgcacaagtttgaagcatactacattgataaccttgtgggtaataaacaagcttactttgagagatctcctataaacttcgttgaaaacttttcatgtccagtgattttgtttcaagggttggaagacacggttgtatcaccagatcaggcaacaaaaatatacaaagccataaaggacaagggccttcccgttgctttggttgagtacgaaggggaacaacatggcttccgcaaggctgagaacatcaaatttaccttggagcaggagatggtgttcttggcaagattagtgggagagttcaaggtgcctgatgacataactccaatcaagattgaaaacttcgattaggccttgtactcacgtttcaaacgtcaattacctgccatcaactgctgaagtgatcaacttggtgcacctgtgcggcagacttgccattcgcagctgttctttcaactgaactctagggctctaggctgttgttacgagcaataaattgaagcaaagcttatcaaaacacactagcttttccccgctgtcggtctgtttccaggttccactgtctgtggacgcggagatctcgttgacgcgcgaggagacaaatgggccatgatttaaggggtgtttccgtagttacgaaaatgaaataaaatagagggacttaaaattaatccctagaaatcaaatgtctccttagttttcttccaaaccgtgagttggatatgattggcccatcaatcatgcttcaacacggttttctactccctccgtttctttttattag

SEQ ID NO: 82097 - DNA, 2918 bp, Zea Mays
ctaggtttggtcgggtttgaaaactcatggattcacgagtttaaatattataggaacaaatccgtacccataaatccatcggatatagatttactaatattaacaaatatacaaatacgaaaattaacctaaactcataacactaacgaaccatcgagtttcagataaccgttgccatctctaagggcatgtacaatgggtatcttaagttgtgtcttagagtgtgtctaggggggtgaatgtaaaaaaactcaagacatgtatcttgacgaagacacagtgtcttagctctatgttcgagacaggagactagctgattggtcactttaatttattgaatgctctgattggtacaatgaatatggtaagacacatgttttagacatgaccattgtattatgtcgtgttttagctgtgtcttgtacttagaggaccgtgcagcagtgtctaggttgtacatgccctaatgcggacgccgcttacgcttctgcacgtggaactgtggaaggctggaagccgctaggcgctagagtcagctcgttgaggcattcagtcaacacactgacttcgtccccgtcccgtcgtgcccgggcctctctctcacatccactgccccgacccgccgccgctcgattgcgacctgacggcggcaatgcacccccgcatcgcatcgggcgccaccggtaagtcgaccgcgccgtacggttcctgggagtcgccgatcagcgccgctgtcgtctccgccgccgggaggaccgccgaggggtttgcaatcgctggcgacggccggctcgtctgggtggagacgcgccccgaggatggagggcgcgcggtcctcgtgaaggaagcggcaggaccaggcggtaaggctcttgatgtgacgccgcagggtttcgcggtgcggtccctggcgcaggagtacggtggtggggcattcgccgtgcaaggggacaccgttgtgttctctaattacactgaccagcgtctgtacaggcagacaataggagataattcaccactaccactgacaccagattatggaccagtagtacgctatgctgatggtgtctttgatccccatttccatcgtttcgtaactataatggaagaccatcggcacaatagctcaaatcccatcactacaattgttgctgtaggaataagtgatccggatgtcaaagaatatactatgctggtcagtggcaatgacttttatgccttcccccgtattgatccaactaaaaaacgtatggcatggattgagtggagtaacccaaacatgtcctgggacaaatcgcagttgtgggttgggtatttcaatgagaaaggagagataaaagaaaagatctgtgttgctggtggagacccaacaatagtagaatctcctactgaacccaagtggtcttcaaaaggcagaatggaaagtcatgttggagtgcttgatcaagattctgagtccttcctgaaaattgacattcccttctcttctgtaactaacatagtggtatctggagatagatccttctatattgagggtgcatctgctactcttccagtatcaatagcaaaggtgacacttgatgaaaagagaactatggcaactgatttctctattgtttggtcctcctctgaggatgttgcacaatatgaatcatacttcagcttgcctgaatttgtggagttcccaaatgtgatcaatggtcagcatgcatatgcttatttttatgctccgtataataatttttttcaaggttcatcagacgaaaagcctcccctactggtcagaactcatggtggacccacagatgaagcacgaggggttctggatcttagtgtgcagtactggacaagccgaggatgggcatttgttgatgttaactatgggggaagctcaggctatgggagagaatttcgagagaggcttttagcacaatggggtgttgttgatgtaaatgattgctgcagttgtgctgcattcttggtggaaactggaagagtggatgggcagcggctttgtgtaactggagaatctgctggtggattcacaactttagcctgccttgctttcagacagaccttcaaggctggttcgtctttatatgggatagctgacctagcgtccttgagggcaggaatgcacaagtttgaagcatactacattgataaccttgtgggtaataaacaagcttactttgagagatctcctataaacttcgttgaaaacttttcatgtccagtgattttgtttcaagggttggaagacacggttgtatcaccagatcaggcaacaaaaatatacaaagccataaaggacaagggccttcccgttgctttggttgagtacgaaggggaacaacatggcttccgcaaggctgagaacatcaaatttaccttggagcaggagatggtgttcttggcaagattagtgggagagttcaaggtgcctgatgacataactccaatcaagattgaaaacttcgattaggccttgtactcacgtttcaaacgtcaattacctgccatcaactgctgaagtgatcaacttggtgcacctgtgcggcagacttgccattcgcagctgttctttcaactgaactctagggctctaggctgttgttacgagcaataaattgaagcaaagcttatcaaaacacactagcttttccccgctgtcggtctgtttccaggttccactgtctgtggacgcggagatctcgttgacgcgcgaggagacaaatgggccatgatttaaggggtgtttccgtagttacgaaaatgaaataaaatagagggacttaaaattaatccctagaaatcaaatgtctccttagttttcttccaaaccgtgagttggatatgattggcccatcaatcatgcttcaacacggttttctactccctccgtttctttttattag

SEQ ID NO: 82098 - DNA, 2876 bp, Zea Mays
ctaggtttggtcgggtttgaaaactcatggattcacgagtttaaatattataggaacaaatccgtacccataaatccatcggatatagatttactaatattaacaaatatacaaatacgaaaattaacctaaactcataacactaacgaaccatcgagtttcagataaccgttgccatctctaagggcatgtacaatgggtatcttaagttgtgtcttagagtgtgtctaggggggtgaatgtaaaaaaactcaagacatgtatcttgacgaagacacagtgtcttagctctatgttcgagacaggagactagctgattggtcactttaatttattgaatgctctgattggtacaatgaatatggtaagacacatgttttagacatgaccattgtattatgtcgtgttttagctgtgtcttgtacttagaggaccgtgcagcagtgtctaggttgtacatgccctaatgcggacgccgcttacgcttctgcacgtggaactgtggaaggctggaagccgctaggcgctagagtcagctcgttgaggcattcagtcaacacactgacttcgtccccgtcccgtcgtgcccgggcctctctctcacatccactgccccgacccgccgccgctcgattgcgacctgacggcggcaatgcacccccgcatcgcatcgggcgccaccggtaagtcgaccgcgccgtacggttcctgggagtcgccgatcagcgccgctgtcgtctccgccgccgggaggaccgccgaggggtttgcaatcgctggcgacggccggctcgtctgggtggagacgcgccccgaggatggagggcgcgcggtcctcgtgaaggaagcggcaggaccaggcggtaaggctcttgatgtgacgccgcagggtttcgcggtgcggtccctggcgcaggagtacggtggtggggcattcgccgtgcaaggggacaccgttgtgttctctaattacactgaccagcgtctgtacaggcagacaataggagataattcaccactaccactgacaccagattatggaccagtagtacgctatgctgatggtgtctttgatccccatttccatcgtttcgtaactataatggaagaccatcggcacaatagctcaaatcccatcactacaattgttgctgtaggaataagtgatccggatgtcaaagagagataaaagaaaagatctgtgttgctggtggagacccaacaatagtagaatctcctactgaacccaagtggtcttcaaaaggggagctgttcttcataaccgatcgaaggagtgggttttggaatatttataaatgggatgaacacagcagagcggtaacacctctgcattcacttgatgctgaattctccaagcccatgtggatttttggtgtcagctcctatggtttccttggaatagatgacacaagtcacaaaattgtttgctcttacaggcagaatggaaagtcatgttggagtgcttgatcaagattctgagtccttcctgaaaattgacattcccttctcttctgtaactaacatagtggtatctggagatagatccttctatattgagggtgcatctgctactcttccagtatcaatagcaaaggtgacacttgatgaaaagagaactatggcaactgatttctctattgtttggtcctcctctgaggatgttgcacaatatgaatcatacttcagcttgcctgaatttgtggagttcccaaatgtgatcaatggtcagcatgcatatgcttatttttatgctccgtataataatttttttcaaggttcatcagacgaaaagcctcccctactggtcagaactcatggtggacccacagatgaagcacgaggggttctggatcttagtgtgcagtactggacaagccgaggatgggcatttgttgatgttaactatgggggaagctcaggctatgggagagaatttcgagagaggcttttagcacaatggggtgttgttgatgtaaatgattgctgcagttgtgctgcattcttggtggaaactggaagagtggatgggcagcggctttgtgtaactggagaatctgctggtggattcacaactttagcctgccttgctttcagacagaccttcaaggctggtaataaacaagcttactttgagagatctcctataaacttcgttgaaaacttttcatgtccagtgattttgtttcaagggttggaagacacggttgtatcaccagatcaggcaacaaaaatatacaaagccataaaggacaagggccttcccgttgctttggttgagtacgaaggggaacaacatggcttccgcaaggctgagaacatcaaatttaccttggagcaggagatggtgttcttggcaagattagtgggagagttcaaggtgcctgatgacataactccaatcaagattgaaaacttcgattaggccttgtactcacgtttcaaacgtcaattacctgccatcaactgctgaagtgatcaacttggtgcacctgtgcggcagacttgccattcgcagctgttctttcaactgaactctagggctctaggctgttgttacgagcaataaattgaagcaaagcttatcaaaacacactagcttttccccgctgtcggtctgtttccaggttccactgtctgtggacgcggagatctcgttgacgcgcgaggagacaaatgggccatgatttaaggggtgtttccgtagttacgaaaatgaaataaaatagagggacttaaaattaatccctagaaatcaaatgtctccttagttttcttccaaaccgtgagttggatatgattggcccatcaatcatgcttcaacacggttttctactccctccgtttctttttattag

SEQ ID NO: 82099 - DNA, 3094 bp, Zea Mays
ctaggtttggtcgggtttgaaaactcatggattcacgagtttaaatattataggaacaaatccgtacccataaatccatcggatatagatttactaatattaacaaatatacaaatacgaaaattaacctaaactcataacactaacgaaccatcgagtttcagataaccgttgccatctctaagggcatgtacaatgggtatcttaagttgtgtcttagagtgtgtctaggggggtgaatgtaaaaaaactcaagacatgtatcttgacgaagacacagtgtcttagctctatgttcgagacaggagactagctgattggtcactttaatttattgaatgctctgattggtacaatgaatatggtaagacacatgttttagacatgaccattgtattatgtcgtgttttagctgtgtcttgtacttagaggaccgtgcagcagtgtctaggttgtacatgccctaatgcggacgccgcttacgcttctgcacgtggaactgtggaaggctggaagccgctaggcgctagagtcagctcgttgaggcattcagtcaacacactgacttcgtccccgtcccgtcgtgcccgggcctctctctcacatccactgccccgacccgccgccgctcgattgcgacctgacggcggcaatgcacccccgcatcgcatcgggcgccaccggtaagtcgaccgcgccgtacggttcctgggagtcgccgatcagcgccgctgtcgtctccgccgccgggaggaccgccgaggggtttgcaatcgctggcgacggccggctcgtctgggtggagacgcgccccgaggatggagggcgcgcggtcctcgtgaaggaagcggcaggaccaggcggtaaggctcttgatgtgacgccgcagggtttcgcggtgcggtccctggcgcaggagtacggtggtggggcattcgccgtgcaaggggacaccgttgtgttctctaattacactgaccagcgtctgtacaggcagacaataggagataattcaccactaccactgacaccagattatggaccagtagtacgctatgctgatggtgtctttgatccccatttccatcgtttcgtaactataatggaagaccatcggcacaatagctcaaatcccatcactacaattgttgctgtaggaataagtgatccggatgtcaaagaatatactatgctggtcagtggcaatgacttttatgccttcccccgtattgatccaactaaaaaacgtatggcatggattgagtggagtaacccaaacatgtcctgggacaaatcgcagttgtgggttgggtatttcaatgagaaaggagagataaaagaaaagatctgtgttgctggtggagacccaacaatagtagaatctcctactgaacccaagtggtcttcaaaaggggagctgttcttcataaccgatcgaaggagtgggttttggaatatttataaatgggatgaacacagcagagcggtaacacctctgcattcacttgatgctgaattctccaagcccatgtggatttttggtgtcagctcctatggtttccttggaatagatgacacaagtcacaaaattgtttgctcttacaggcagaatggaaagtcatgttggagtgcttgatcaagattctgagtccttcctgaaaattgacattcccttctcttctgtaactaacatagtggtatctggagatagatccttctatattgagggtgcatctgctactcttccagtatcaatagcaaaggtgacacttgatgaaaagagaactatggcaactgatttctctattgtttggtcctcctctgaggatgttgcacaatatgaatcatacttcagcttgcctgaatttgtggagttcccaaatgtgatcaatggtcagcatgcatatgcttatttttatgctccgtataataatttttttcaaggttcatcagacgaaaagcctcccctactggtcagaactcatggtggacccacagatgaagcacgaggggttctggatcttagtgtgcagtactggacaagccgaggatgggcatttgttgatgttaactatgggggaagctcaggctatgggagagaatttcgagagaggcttttagcacaatggggtgttgttgatgtaaatgattgctgcagttgtgctgcattcttggtggaaactggaagagtggatgggcagcggctttgtgtaactggagaatctgctggtggattcacaactttagcctgccttgctttcagacagaccttcaaggctgatagctgacctagcgtccttgagggcaggaatgcacaagtttgaagcatactacattgataaccttgtgggtaataaacaagcttactttgagagatctcctataaacttcgttgaaaacttttcatgtccagtgattttgtttcaagggttggaagacacggttgtatcaccagatcaggcaacaaaaatatacaaagccataaaggacaagggccttcccgttgctttggttgagtacgaaggggaacaacatggcttccgcaaggctgagaacatcaaatttaccttggagcaggagatggtgttcttggcaagattagtgggagagttcaaggtgcctgatgacataactccaatcaagattgaaaacttcgattaggccttgtactcacgtttcaaacgtcaattacctgccatcaactgctgaagtgatcaacttggtgcacctgtgcggcagacttgccattcgcagctgttctttcaactgaactctagggctctaggctgttgttacgagcaataaattgaagcaaagcttatcaaaacacactagcttttccccgctgtcggtctgtttccaggttccactgtctgtggacgcggagatctcgttgacgcgcgaggagacaaatgggccatgatttaaggggtgtttccgtagttacgaaaatgaaataaaatagagggacttaaaattaatccctagaaatcaaatgtctccttagttttcttccaaaccgtgagttggatatgattggcccatcaatcatgcttcaacacggttttctactccctccgtttctttttattag

SEQ ID NO: 82100 - DNA, 3397 bp, Zea Mays
ctaggtttggtcgggtttgaaaactcatggattcacgagtttaaatattataggaacaaatccgtacccataaatccatcggatatagatttactaatattaacaaatatacaaatacgaaaattaacctaaactcataacactaacgaaccatcgagtttcagataaccgttgccatctctaagggcatgtacaatgggtatcttaagttgtgtcttagagtgtgtctaggggggtgaatgtaaaaaaactcaagacatgtatcttgacgaagacacagtgtcttagctctatgttcgagacaggagactagctgattggtcactttaatttattgaatgctctgattggtacaatgaatatggtaagacacatgttttagacatgaccattgtattatgtcgtgttttagctgtgtcttgtacttagaggaccgtgcagcagtgtctaggttgtacatgccctaatgcggacgccgcttacgcttctgcacgtggaactgtggaaggctggaagccgctaggcgctagagtcagctcgttgaggcattcagtcaacacactgacttcgtccccgtcccgtcgtgcccgggcctctctctcacatccactgccccgacccgccgccgctcgattgcgacctgacggcggcaatgcacccccgcatcgcatcgggcgccaccggtaagtcgaccgcgccgtacggttcctgggagtcgccgatcagcgccgctgtcgtctccgccgccgggaggaccgccgaggggtttgcaatcgctggcgacggccggctcgtctgggtggagacgcgccccgaggatggagggcgcgcggtcctcgtgaaggaagcggcaggaccaggcggtaaggctcttgatgtgacgccgcagggtttcgcggtgcggtccctggcgcaggagtacggtggtggggcattcgccgtgcaaggggacaccgttgtgttctctaattacactgaccagcgtctgtacaggcagacaataggagataattcaccactaccactgacaccagattatggaccagtagtacgctatgctgatggtgtctttgatccccatttccatcgtttcgtaactataatggaagaccatcggcacaatagctcaaatcccatcactacaattgttgctgtaggaataagtgatccggatgtcaaagagagataaaagaaaagatctgtgttgctggtggagacccaacaatagtagaatctcctactgaacccaagtggtcttcaaaaggggagctgttcttcataaccgatcgaaggagtgggttttggaatatttataaatgggatgaacacagcagagcggtaacacctctgcattcacttgatgctgaattctccaagcccatgtggatttttggtgtcagctcctatggtttccttggaatagatgacacaagtcacaaaattgtttgctcttacagaatggaaagtcatgttggagtgcttgatcaagattctgagtccttcctgaaaattgacattcccttctcttctgtaactaacatagtggtatctggagatagatccttctatattgagggtgcatctgctactcttccagtatcaatagcaaaggtgacacttgatgaaaagagaactatggcaactgatttctctattgtttggtcctcctctgaggatgttgcacaatatgaatcatacttcagcttgcctgaatttgtggagttcccaaatgtgatcaatggtcagcatgcatatgcttatttttatgctccgtataataatttttttcaaggttcatcagacgaaaagcctcccctactggtcagaactcatggtaaacgaatatattatttttgtccttttttctttatgtcatttatgatcatgacttcatgttacatcagaaataacaagcaaaaacattttgttggattttatgtactttctaatcagtatgtaaagccgtctccagcagattatgcaaaacactagattgtactattcacagagtgaagtttgaaatacaagataggataagtaagctgctgaagacaacctaagagtgacaagtgtttgcctgctactgcagtcagtatctgtcaattcagtctttcggcaacataatctcttagcattttgatgatagacgtgcatacattagtttatgctaacttgattttggtccagatgcttgtcaaaagcatcacatagtgaaaaatcttcttaacattattataagtttatagcttctttataccacatcattgtttaggtggacccacagatgaagcacgaggggttctggatcttagtgtgcagtactggacaagccgaggatgggcatttgttgatgttaactatgggggaagctcaggctatgggagagaatttcgagagaggcttttagcacaatggggtgttgttgatgtaaatgattgctgcagttgtgctgcattcttggtggaaactggaagagtggatgggcagcggctttgtgtaactggagaatctgctggtggattcacaactttagcctgccttgctttcagacagaccttcaaggctggttcgtctttatatgggatagctgacctagcgtccttgagggcaggaatgcacaagtttgaagcatactacattgataaccttgtgggtaataaacaagcttactttgagagatctcctataaacttcgttgaaaacttttcatgtccagtgattttgtttcaagggttggaagacacggttgtatcaccagatcaggcaacaaaaatatacaaagccataaaggacaagggccttcccgttgctttggttgagtacgaaggggaacaacatggcttccgcaaggctgagaacatcaaatttaccttggagcaggagatggtgttcttggcaagattagtgggagagttcaaggtgcctgatgacataactccaatcaagattgaaaacttcgattaggccttgtactcacgtttcaaacgtcaattacctgccatcaactgctgaagtgatcaacttggtgcacctgtgcggcagacttgccattcgcagctgttctttcaactgaactctagggctctaggctgttgttacgagcaataaattgaagcaaagcttatcaaaacacactagcttttccccgctgtcggtctgtttccaggttccactgtctgtggacgcggagatctcgttgacgcgcgaggagacaaatgggccatgatttaaggggtgtttccgtagttacgaaaatgaaataaaatagagggacttaaaattaatccctagaaatcaaatgtctccttagttttcttccaaaccgtgagttggatatgattggcccatcaatcatgcttcaacacggttttctactccctccgtttctttttattag

SEQ ID NO: 82101 - DNA, 3401 bp, Zea Mays
ctaggtttggtcgggtttgaaaactcatggattcacgagtttaaatattataggaacaaatccgtacccataaatccatcggatatagatttactaatattaacaaatatacaaatacgaaaattaacctaaactcataacactaacgaaccatcgagtttcagataaccgttgccatctctaagggcatgtacaatgggtatcttaagttgtgtcttagagtgtgtctaggggggtgaatgtaaaaaaactcaagacatgtatcttgacgaagacacagtgtcttagctctatgttcgagacaggagactagctgattggtcactttaatttattgaatgctctgattggtacaatgaatatggtaagacacatgttttagacatgaccattgtattatgtcgtgttttagctgtgtcttgtacttagaggaccgtgcagcagtgtctaggttgtacatgccctaatgcggacgccgcttacgcttctgcacgtggaactgtggaaggctggaagccgctaggcgctagagtcagctcgttgaggcattcagtcaacacactgacttcgtccccgtcccgtcgtgcccgggcctctctctcacatccactgccccgacccgccgccgctcgattgcgacctgacggcggcaatgcacccccgcatcgcatcgggcgccaccggtaagtcgaccgcgccgtacggttcctgggagtcgccgatcagcgccgctgtcgtctccgccgccgggaggaccgccgaggggtttgcaatcgctggcgacggccggctcgtctgggtggagacgcgccccgaggatggagggcgcgcggtcctcgtgaaggaagcggcaggaccaggcggtaaggctcttgatgtgacgccgcagggtttcgcggtgcggtccctggcgcaggagtacggtggtggggcattcgccgtgcaaggggacaccgttgtgttctctaattacactgaccagcgtctgtacaggcagacaataggagataattcaccactaccactgacaccagattatggaccagtagtacgctatgctgatggtgtctttgatccccatttccatcgtttcgtaactataatggaagaccatcggcacaatagctcaaatcccatcactacaattgttgctgtaggaataagtgatccggatgtcaaagagagataaaagaaaagatctgtgttgctggtggagacccaacaatagtagaatctcctactgaacccaagtggtcttcaaaaggggagctgttcttcataaccgatcgaaggagtgggttttggaatatttataaatgggatgaacacagcagagcggtaacacctctgcattcacttgatgctgaattctccaagcccatgtggatttttggtgtcagctcctatggtttccttggaatagatgacacaagtcacaaaattgtttgctcttacaggcagaatggaaagtcatgttggagtgcttgatcaagattctgagtccttcctgaaaattgacattcccttctcttctgtaactaacatagtggtatctggagatagatccttctatattgagggtgcatctgctactcttccagtatcaatagcaaaggtgacacttgatgaaaagagaactatggcaactgatttctctattgtttggtcctcctctgaggatgttgcacaatatgaatcatacttcagcttgcctgaatttgtggagttcccaaatgtgatcaatggtcagcatgcatatgcttatttttatgctccgtataataatttttttcaaggttcatcagacgaaaagcctcccctactggtcagaactcatggtaaacgaatatattatttttgtccttttttctttatgtcatttatgatcatgacttcatgttacatcagaaataacaagcaaaaacattttgttggattttatgtactttctaatcagtatgtaaagccgtctccagcagattatgcaaaacactagattgtactattcacagagtgaagtttgaaatacaagataggataagtaagctgctgaagacaacctaagagtgacaagtgtttgcctgctactgcagtcagtatctgtcaattcagtctttcggcaacataatctcttagcattttgatgatagacgtgcatacattagtttatgctaacttgattttggtccagatgcttgtcaaaagcatcacatagtgaaaaatcttcttaacattattataagtttatagcttctttataccacatcattgtttaggtggacccacagatgaagcacgaggggttctggatcttagtgtgcagtactggacaagccgaggatgggcatttgttgatgttaactatgggggaagctcaggctatgggagagaatttcgagagaggcttttagcacaatggggtgttgttgatgtaaatgattgctgcagttgtgctgcattcttggtggaaactggaagagtggatgggcagcggctttgtgtaactggagaatctgctggtggattcacaactttagcctgccttgctttcagacagaccttcaaggctggttcgtctttatatgggatagctgacctagcgtccttgagggcaggaatgcacaagtttgaagcatactacattgataaccttgtgggtaataaacaagcttactttgagagatctcctataaacttcgttgaaaacttttcatgtccagtgattttgtttcaagggttggaagacacggttgtatcaccagatcaggcaacaaaaatatacaaagccataaaggacaagggccttcccgttgctttggttgagtacgaaggggaacaacatggcttccgcaaggctgagaacatcaaatttaccttggagcaggagatggtgttcttggcaagattagtgggagagttcaaggtgcctgatgacataactccaatcaagattgaaaacttcgattaggccttgtactcacgtttcaaacgtcaattacctgccatcaactgctgaagtgatcaacttggtgcacctgtgcggcagacttgccattcgcagctgttctttcaactgaactctagggctctaggctgttgttacgagcaataaattgaagcaaagcttatcaaaacacactagcttttccccgctgtcggtctgtttccaggttccactgtctgtggacgcggagatctcgttgacgcgcgaggagacaaatgggccatgatttaaggggtgtttccgtagttacgaaaatgaaataaaatagagggacttaaaattaatccctagaaatcaaatgtctccttagttttcttccaaaccgtgagttggatatgattggcccatcaatcatgcttcaacacggttttctactccctccgtttctttttattag

SEQ ID NO: 82102 - DNA, 1559 bp, Zea Mays
cccccgcccgtgactcgacggcagacgtccgcagatcccgccaccaacctcaccgccgggtatctcgccccacaccaaaccgcgccccctgccctcgccctcggccacagggtgcgccatgcccccgcccccccgactcggcgccgtgaccgccgcccttgctgtaggaaatgggtcagatactggacagactgattcttggtttgagttgaaggatattttttctgaatcctttgtttcagggtctaagagaaaggttttcacattgcaactcaaacatggatgcaatccaggaaatgggtcagatactggacagactgattcttggtttgagttgaaggttactgaaagttatctaatctagatagttcagataactcattttagccatccaagggatctcctagccatagttggcttcttaatacacatgtctcgttttttagccatagttcacatggtatgttcatttcatagtaatctttaggtttttttagagatcctttttgggatacccaaaacacttttcaattgtaagttgaaagctcaaaattttcaatgaaggaaaaaatacactttgcatcagtctgctatttgacaaagttgaatatttgttttaaaaaagaatttagtgacaaacatctttgttattggtatgaataataacaaaacacttttcaattttaattatatcttccaaaagtttaatgaaaagtaatatatattatgtttcttttaattttcaattaaattatatgcacaggattctacctgtggtccatctctagcaaaagttatctctactactcattaaagggaaggggagatgcgggagcgggggcgaggtatagaggactttgatctataccacggcctccgctcaacgccaggtaaatgtattggtgggccttcttcagcatcctcatttggtttctgtgtctcgtgaaaaatgacttggattccaacatcacaagaaggttggtgccatgaatgcacttgtttgtgtaacagctctccttactactgggcaatccctattaagcgtggtttatttatgcgggaacctgggacctgagtgcattatttatgccatgcttctattccatcgtttactgatgtttgatcctgttaaccaggtctgtcaccaagagcaggagttcaattctgcattttgctgcattttagatggcctttttcgctctcctgcccaggccgaggcatcgagcgcgtcactgtcttcctcgacctctacaactagggatctacgatcaagcttacttcccatatctaacattgttctccatcaactggaagggaaatccaacaaagaactagaatagattgatgtgaaggggaaataatagaaggagaagcttgacctgtatattcaggggaactctcaaggaggatgttttcctgtagaggtgtagatgcttctactggccatgtcgggcatatctgacacacctcttccaagggcagctcgatggaaccgattgaatgcaagatgtattgttggtagcatgcatcaacacaactagaatttcactagatcttgt

SEQ ID NO: 82103 - DNA, 784 bp, Zea Mays
gtggcttccaattctcctttatgccctcagatggagttctagatcagcgcggcagggtccacggcactgcatcgggggcagcgttggagttggaaaagggctgcgtcgtgaccgcggagggaacaacgcaagtgagcggtggaggcgttccactccacaaccctccaaccccgccactgccatccaaccacgtcggcgccgaggtctactaccttccctacgtcaccgacgccgagtactacacgaccggtgctcatcatccgcggcggcagtgtggtactaggactacgccaggcttagggcagtcaccggcaagggcgggccttgctactctacaacatgactcgttgctggatagtctgatcctcgtgttaaagagaaggtattagtgctgataggtacatggcaagatgtgtttggggccacatgcaagatatccacaatactatgcagcataccatgttatcttggtcgatgtctcggttgttgaagtaagtacatcctaaatctcggtatgaatttggcagggtaagttctttcctttcttagtttgtttgctatttctttttatatctgtatgactcctataaagcaagggattggtcctggtgtcatttaggaatctccgttgccaaattcatactatctaagctatctttgttgccaaattcatactactggtgtcatctgctatcttcgttgccaaatttatactgcacaatgagccaaatttaacaacaataaacatagcccacaatgtagacgacacttggctatcacgttc

SEQ ID NO: 82104 - DNA, 432 bp, Zea Mays
gcacacccttggctgagattcatcatccttgtgtttagcttctacgtgttgtccatgcactgctgcttagtgtccctgctcgtagtggtgctggcaccctaggactttcccttcctccacagaattttatacaaagctcagggatactcgcctacatgttcagctgccctaaagactttgtctatgaagttcccctctgcccttgagtccaacctgtgttcatcactagagggacgtaactcttgagttcaagtcggtgttaacccactccacagccacccaacatactgtattccgtgcatcgagtgccagtggcgaccatagcagcagttcacaccctcaccatggccatgattcctcggaggttgtctcggccttgtgttgcccgttccctactcctcgcagaagccgaccgtgtggtagaagattcga

SEQ ID NO: 82105 - DNA, 12938 bp, Zea Mays
cttttgtgcacacccttggctgagattcatcatccttgtgtttagcttctacgtgttgtccatgcactgctgcttagtgtccctgctcgtagtggtgctggcaccctaggactttcccttcctccacagaattttatacaaagctcagggatactcgcctacatgttcagctgccctaaagactttgtctatgaagttcccctctgcccttgagtccaacctgtgttcatcactagagggacgtaactcttgagttcaagtcggtgttaacccactccacagccacccaacatactgtattccgtgcatcgagtgccagtggcgaccatagcagcagttcacaccctcaccatggccatgattcctcggaggttgtctcggccttgtgttgcccgttccctactcctcgcaggtgatgatgagtactctaggtgttcctatggttggagggcgtttccagttctgaaggaagattagttagtcttgtgtataagctttggagggttcctaccttcctgctaatgtaataagttatgcactttgagtatatcaggacttgtaataaatgtaactcttcctatgtaataaccttcagttttagaaatgaaaagaatattttgtaaagtcttccgctcttatctccgaagtgtgtgtatcgaatgtgattactgtaatatgcatgtatggtgggagatccttgggatgatgagttcaagttgttgaactcgtgatagccttgttaagttacctggtacacgtgcatagcgatctgaggccattgaggcaaggattggtgcatgtgggcccgataacttgggagggctgccataatggacctcctcccatttttgatggtgacgattttccatattggaaaattcatatggaagcttacttagaggctatagacattggtgtgtacaaagccgccactcaagggttccccgaaccaagagatcccacaaatcttgtaggagaagagtttaataatgaaaagtggaatgctaaggccaaaaacactctatttagaggcctttgaaaatatgtctttaatagagtaagaaatcatagaaatattcatgatttgtaaatggatatttgcgctctacatgaagggactaaaagtgagcgtgaggagagatatcacattacaatgaaaaaattaaattcttttgagatgcttgcaaatgaaaatgccaatgatatgcactcacgtcttaacattcttgtagaggaagtcaatggcttggggctcacccagatttcacaaccggatgttgtgaggaagattctcagtgtcctcccaattgacagatatggacacattgtcaccatgctacatcagatggatctttcagttgctactccaacacaaatattgggaaagatcaatgctcatgaaatgtacatgcacataaatgacaaggatgggtcatcttccaaaagaaaagacttggctcttaaggccaatcaagaaaagaaagggaaagctaaagtgcaaattgaggaggaatcctcaagtgatgatgatcttgatgctaacattgctttgatggtgagaaagaccaccaaaatgttgaagaaacttaatagagaaggcatcaagtttgactcaagaaagaagaagttcttctccagtaaaagaaagcccatctcagaaatggattgctataattgtggagaactcggtcatcttgctcatcaatgcaacaagcccaagaagaacaagttcaagggcaagaaagataatgacagtgatgatgagaaaaatgaaaagaagttcttcaagagaaaggatgggaaacacaaaagattccataagaagaaaaatggaaaggcatacattattggtgactggctcactgacattgagtcctcaagcgggtcttcttcaagtgaagaagaaaatgatgaaaaaattgccgctatcgctggggacttctcttcaccacgaccatcaccctcatccacttctcacctatgcctcatggctaaaggtgaacggaaggtacaaattgagaatgatgttattgatgatagtgatagtgatagtgatgatgagtttgcttcaccttcctatgatgagttagctgacttacttaaagaatacactcaaatcattaggaagtcaaaggctaaatgtgataatttaagggctagtttggcaacactattttcccatgttatttccaatttcccaagggaaaatgaactaatttcccttgggaaaacgaaaaacccttgggaaaatagggtttccaaactagccctaaaagatgaaaatgaatttttaactgccaaatatgacatagttgtaaaagctagtgatgaaatgaaaaaagaaaataaaactatatcatccactgtaaatgagctcaaatcctccctaaaagatgctaaggataagtatgacaaattaaatgaagcaaataggcagttgaaagatagacttgtaaaatttaaagaatattatacaaaaaataaaattgactatgataatcttcttgttgcaaatgagcttttatcttgcaatacacatgaggctattaaccctgctgttaagattgatgtagcaacctcatgtgatgatttgagccaagatgatcaatctagtcttcatgatgaattgattgaaaaagttgaagttttgacactagacaaccagaaattgaagagatacttggctgatgcaaccactggaggaaatgttgccatagagagcaatgacattaacaatgagttggcagtggacaatgaaaggcttataaatgaggtcaagaaacttaagaatgaaaatgaacatcttgccacaagtgtgcaaaagttcaacaaaggccaataccttcaaaatgagttgctcatgaacactgtcatgaaaaacaacaagagtggtattgaatataattcttttgtgcaaaagaaagcaacaaatcaatacaaggcaaaacagactcctaagcctatcaagtgctttgagtgtggaaaagaaggacattttgcgcacaactacaaagccaaaccaccaactcccttgccaaagcactcaagaccatttgctttcaatgctcattatgttctaagaaaagtagcaaatggaaatgtcaaagttacattcctaggtccaccaagcaagagtagacctagacaaatttgagttgcaaagtctttgattgagaaattcactggtcctatgcaaaatagggccctcaaaattgaagcttgacttatttgttcatgtaggtgaactacaagaccggtgggagccattgggttattgatagtggatgcactcaacatatgactagcaacccacggatgttcacctcacttgatgaaaatgttgatgaacaagacaaaatcacttttggggataattcgaagggaaaagttcaagaacttggcaaggtggctatctcaaatgatctttcaatatcaaatgttatcttggttgcaccattaagcttcaacttattatcagtgggtcaactttgtgatcttggccttcaatgcttattcactcctacagaggttgttgtgtaaaaaatggatgatgagttaatggtgttcaaaggatttagatacatcaatctctacttagtggatttcacctctgaagatgcaaacttaagaacttgcctctttaccaaagcatcacttggatggctatggcatagaaggcttgcacatgttggaatgagcacactcaagaaagtactaaagaaagacatggttagaggactaaaggatgttgtatttgaaaaggacaagccttgtagtgcatgtcaagctggaaagcaagttgctaacacacatcctacaaaagcttttatgtcaacatcaaggccactagaactacttcatatggatctatttggaccaacaacttatgctagtgctggtggcaacctctaccgtctggttattgttgatgacttttcaagatacacttgggtgttctttctccatgataagtctgaagttgcatctatattcaagaagtttgccaagaaggctcaaaatgaatttgattacaaaatcaagaagattataagtgacaacggaaaagaatttgacaacaccaacatacatgaatattgtgatgagattgtgatcaaacatgaagtttctgcaacatacacacctcaagagaatggaattgttgaaagaaagaacatgactttgatcactcttgcaagaacaatggttgatgagtataacacaccggagaggttttgggctgaagctgtcaacactgcatgctatgcatcaaacaggctatttcctcactggctacttgagaagactccctatgaactgctaaatggaaaaaagccagatgtctccttctttctggtgtttagatgcaaatgctacatctataagaaacgccatcacatagggaagtttcaaagacattgtgatattggtttcctacttggttattcatcaaaatccaaagcatatcgagtattcaatcatgccactagcgtggttgaagaaacatatgatgtggagtttgatgagactaatggctcccaaggagcacttgaaaatcttgatgatgtaggtgatgagccacttagagaagctatggagaacgtgccaattggagccattaaaccaaaagaagatgaagaagaggtgcaaaatattgacagaccttattcatcaatgtaccacatgatgatgaaaaagatgagaagcatgcaaatgaagatacatttgtctctcatgaacaagcaagggtacaagctgaagatgttgatgctccaagatcttcttcccaagtggttgacaagagaaactcatcactacttcaagcacacccacaagatcaaatcattggtagtccttcacaaggggttatcactcgttctcataaacatgcctcatttattgaacatcactcttttgtttcttgtgttgagcctacatgtatagatgaggcgctacaggatccagactgggtgaatgccatgcatgaagaattaaacaacttcacccgcaaccaagtttggaccctggagaaacctccacaagatgcaaggattattggaacgaaatgggtgttcagaaacaaacaagatgatcaaggtgtgattgtgcagaacaaggcaagactagttgcaaagggcttctctcaagttgaaggcttagattttggagagacctttgcacaggttgctcgactcgaagccatccgtatcatacttgcatatgcatcatgctatgacataaagctttatcaaatggatgtaaaaagtgcatttgtaaatggcttcataaatgaacttgtatatgttgagcaaccacccgggtttgaagaccctagatatcctaatcatgcttacaggttgtccaaggcgctatatgggctaaagcaggctccaagggcttggtatgagcgtcttcgcgacttcctcatcgaaaagggcttcaagatcgggactatcgacacaactttattcacaaagaaacataacagtgatattttcatttgtcaagtttatgttgatgatataatctttggctcggcaaatgattatcattgcaaggaatttggtgagttgatgtcgaaggagttcgagatgtcaatgattggtgagctaacatacttcctcggctttccagtcaagcaaatgaaagatggaaacttcctctcacaagagaagtataccaaagacttgttgaaaagattcaatatggagaagtgcaaaccaaccaagacacccatgccaactagtggacatctcgaccctagatgagggaggtaacccggttgatcaaactttctaccatttccatgattggtagtttattgtatcttaccgcatctaggcccgatatcatgtttagtgtctgtatgtgtgctcgatttcaagcaaatcctaggaaagctcatctttgcgctgttaaaataattcttaggtatcttaagcacaccccaagcattggcctttagtatcccaaaggagctacttttgatttaattggctattctgattcggattatgccggttgcaaaattgatagaaaaagtacatccgggggatgccacttgcttgggagatcactagtttcatggacatttaagaagcaaaatagtgttgccttgtcaaccgccgaagcgaaatacattgccgcgggtgcttgttgcacacaaattctttatatgaaacaaactcttctagactatggtatagttctagaaaatgtacctttgttgtgtgataatgagagtgatgttaaaattgctaataatcctgtacaacactctcgcaccaagcacattgatatccgtcatcacttccttagagatcatgttgctaaaggagatactattttagaaggagtgagatcggaagatcaattagcggacattttcgcaaagccactagataaaacccacttttgtatcttgagaaatgagctaaatattcttgatctcagaaattttacttaatctcaaaatggtgatgtcaagcttgcattgcatatttaaatttcttgttttgcatctagggcttgtctaacctagttaagataaccgccaacaaagcgagtgaaaaagcttaactcggggtcaaacttgacaagtgttagcatttaagatttttggtacttaaaatttcatttactatgcaattattggttcttgatatatgcatgtggtactgcacttagggggagtattcaaaactcaagtcattcatgaaacccctagtgcaaagcagcaatgcaaatctcaccatttgaatattttctctaaaaactatctagcctatggcaaatactttgaaaaatatgagaggatatgtgagggtaccaatacctgtcccaacaagtgttcttttgtgtgcttataagttgggatttggtttggttcaaaaatacctagaaaatttcaaaagactctgtctgggctcaccggacagtccggtgtgcaccggacactgcactgtgtaatgtccggtgcaccggctggaagcgcgcagatccagttctgtgcctctctgtccggtggttcatcaaacagctactgtgcgctgtccggtgtgcaccagacaagcagtgtaggctgtctggtgtgcccataattggttgaaaaacctttccccgcccgagccagttgccaggtcacttagggtgtgtttggtttgacttttggctttggcttttgtgcccctaaaagccaaaagccaaccaaagggctggatccaggaagcagctttttctaaaaaccgactttctcgtagtgcaaatctgaaagcacctctggacctgcttttagtggcttttcggatggaactgtgaaaacatatatcgaagattttttaacgacttttagtggtttccaccaaacggtttttagctttttaacagcttacagtctacagcagctttttccacagctcacagcccacagcaacttttttcacagccacagcccaaccaaacagacccttagtcttcgctctctctgtctgactgagctctagcgattgccctctcctctccctccccgccggcatgctctggctgatctccggtgaagtctaccccagtctatgctcagctcttccctcctctacttggtgagctgccccttctttgctccttctctctgttcttccactccagtgaagctcaccctcctcccacctcttgattcaatcaatcaaatcttgtgaaatctctgaatccaagcggttgtgtgtgtgtctagtgctccattgagttcctctgcaggtcttgagctccccagggagggtttaatccactcaaatagccatttcaccctcaattcaaatactcgcacgccaagtgctcggtgaaatgcccgaaccactcaaaacttactcaaattgaccccaaaattttccaacacttttatgcaacctctagtaacactctcaccaaattccacgccaatccgatatccgagacaccgattacaccactatttcatatttatagcgaccgtttcggagccaagtgccaaaattctttttctccgccaaatttcaaaccaagcacacacttcactcatatgtactcatatatacctactcgtgaagtattagctcaattccatgtcatttcatgcccatctccaatttcaaacctcctatggcataattcttcgttcaaacgtcattctcgcgttgtttgatcactggttctccaaatcactcagtttctgtgtcttcactctttgtgtatgtatttattcacatttcatatacttatgactatgtgattaatacatgctcacctcttctgtcatttcagtgacctcgtctgcctgcgtgctcgtctcctatcctgcctgaattctctctctttcatgaggtttccaggtagctatcacttcatttatgatcttatcagctgctttctactcctacttagcttttaactcactcatgcagcactcatgttaggatggtgcggacaaagaatgtctcagcgctagggggaggagacgacgaggaccctccttgccccttcaggcaggtcaaggggaagacggtctaccttgagcagcaggagggccaaaagaagcgccgtatgaagagagccgctcgtgcagcacttgtcgcgacaacaacaacatagcaggcagagcagggaggacaattgcagatctcctctgataagattgcctacagagttcgtcgcctcgcatctcagccacgctccactgctccctccacaccttctgccacaatatctactccacctcccacttcaccagctcctgtcgctccagagccatccaccacttccgctatacccaccacctccaccactccagtttccattgttccccgtcccgctcccatttccgctctgcccattccaccaccttgcttcagggagcgtgacgagactgaggtgcgaccactagctgctgatccccgtctcctcgaccttcagcgtgccactgcagctcaggtatgtcggttcagacacgtacccgtggagtcctggttgctagctcagagggaccctactgtggcggctctcttcagtaccagaactcaggagttcttctttcgggcacaactatcagctcagattgccttgtgagcgcatcgacttttggatttacctacctttctgttagcagccggtgccgattcagaggtacatctcacttatctgccaggcctgctttctctgttgatcacgagtggcagatatattgaagagtggatcagagtattctatgctacagtgtggattgaccttgaccattagtggatgcagttccgctttgagagagaggatgtcactttgcatgccagccggattcgctagctctttggatttccagagtcgtcgactcggctctacagtctgtgcaatggcacctcggatcctcctcatcaccctcacgatggagttgcacctgctacagctcacgtcgtggccctgttcagacctcctttcacagatgggtctcgacgatctcctgctgacttcactcctacagtgaagtacttatatgagctgatgagacggacactgctacccaggatgggatatagagaggccactactcatattcagctatggctacttggtgccttgatctcacatttagagtttgatgtggttgacttccttatttgtgagatcgaggatacaatattggatggtctccatgctcgccatcagctgccatatgcgcattatctctgtcacatcttcgcgcagctcatcaggcctcctcagttctagggcaccctcgagtcctctcgcctctagtttggtttgtatcatacagcccctgaggacctagtcctagtgccagatctagtgacaaatgttcaggcggaggatgaggcgttcagatagtttgagacctagggtacagttgctaacacctcttcagatgatgatgacgaccttgggatcctaccaccgcctcctatgccacctcgctcacatgatcatgaggcgagtagttctagtgctgctcctggtgccccacctgctattggccctgctctagccacgattcttcagtctcttacgcagcatcaggctcatctagcagcagagcaggctcgacaggcagccatccatcagcagatgtccgaacggatgctctccatgtttcagacaattcaggaccgtcaggacactctgtagcagcagctcttggcagacagggccgagcaccgggcgtttatgactcatatccttcagcacaccggtgtttagctcccaccagttcagtctgcccctcctccagctcttcatgtaacggttgtaccagctcttcaggcaggacccccacttcctccttttggtccttctccctctccgctctggctggtcactttggacttctcgtcgctggtcatcggaaccgtcagtgctcagccgccagtgccaccagcacctgctgttaccactgctgctatggcagtgtccgtgactgcacctgctccggtggatcctgcatcgcagcctctgtcagagtcagtacctactctagcttctactacagatcctggatccaagactgactctgatcctcaacttgcgtttgtgcttctgcctcgaccgctaccggatgcgccctcgcctcctccttcctcctctagtgtgtaggttcgggtaaccctttttggtgtttgacaccaaagggggagagatataagagttgagagagctagggggagttggggagttagggagttagttcagagtgccttttgtattttgatgtaatatatttgcttgatactctctgtagtagctccacttttgtatggcgcttaactcacaaactctatgatatgctctcgatgtttattattgactgtgtgtgtactgtgttttcacctaagatgttatcaccagtcattcagttcttgttcatcgatttcatttcattcttgtatgaacaagaaacttacgtcgtgtttgagcctatacttattattcttttacacgcctctttctgtcaaaattattgagtataactaaccatcttctatattgatagaaaacaaacaaactactctcacactcttgtagggttgtcatcaatcaccaaaaaggggtagattgaaagcatctaggcccctagttggtttcagtgattaatgacaacataatattatatgtgactaacatgtgttttgtagagcaaatggtaagttaggtcgcattacaagaagttgtactacaacggtgaaaacaatccctgagatgagaacttgaagcgacggctgaaacaacgaatcaaaagatgaaggtcttcgtattccgagtgttaaaggagttacggacactcggtatagagttaggtcttctattttatttttagccgtactataaagagtggttgtggatgagtagtttgaccaagagaatactagtgtagtgttggtgcatattcacactcacatctagtgctaggtgtcactctataacacactcacgagttagaacgaaaacagattcgaaaatcagaatgaaaagaagttagggtttctgtcttaggggcaccggactgtccggtgcgccccctgacagtggggctagccaggcccgggggcagagctttgcccccgagaaaaacccgagagcattgagttgggagattaaattttagctgtcacactggactgtctggtgtgcaccggacaggaactgttcactgtccagtgtgccatcagcccaacggctaggtgtcagaactagtcattggaatcgaccgttggcgcaccggacgctgcgcccatgcgtgaaaaccctagtaacggctagtttggtgggtggggctatttataccccctccaccaccacattgaatgtcttgctgcccacatttataaccatacattgctagagcattgcaagcaccacaaagcatagtaaggtgattagaaaatcttaatcccgcattaggacctcattagtgcaagtgagagccacctagagcacacaccgcatgcattagaagttctcttggtcaagtgaaagtctatggcttgttactcttggtgatcggcatcacctagatggcttggtggcgttgggagcacgatgatcaccttggaggatttgttggtgacacggctcgagattgtaagcggtcgtgagggatccaccgcgccagagtggcaaaggatcatctcattgtgagcacttggttcttgcgaggaccaagggggagcgatacccttgcgcgggtgctccaacaaggactagggaagagtgccaactcttcgatacatcggtaaaaaattggaggagtcttctaaaccttgctttacattccgcatttaattcaagcagtttaccttgtttaattgtttagcaagtagttgaagtgatgtgttagtattattgtctttctagtagtattctcttattgctagtagttgggttaagttgggctcttgcttagggtttaattgtttttgatttttagaaaagcccaattcaccccctcttgtgcatcgtgatcctttgagtgatgtacctctaccttacaaggaggcgtgcacgcaacgagcgttgtcatggtggctccattcccgatcgagttattgaatccattgtgaccatatgagtgccaatgctagaatccgagctgactacttctgtgcacaacctgtgtacacggacgctcattttcgggggaggtatgtcatgttttggtacccaaattctttgttttgtgtagttcacgtgaaaggcaaagtcgatccttactatcaatctcgttttcatataggtttcacatgcatcgtcatgtattcgagcgccttgttgatgttgtgcaacaagttgattcttacttcgtccaacgcccaaaatgtgctggtgagcttggcctctctgctctgcagatggtcgttgctgttgttcgcatcctcgcctatggtattcctatcgatgccgttgacgag

SEQ ID NO: 82106 - DNA, 724 bp, Zea Mays
gcacacccttggctgagattcatcatccttgtgtttagcttctacgtgttgtccatgcactgctgcttagtgtccctgctcgtagtggtgctggcaccctaggactttcccttcctccacagaattttatacaaagctcagggatactcgcctacatgttcagctgccctaaagactttgtctatgaagttcccctctgcccttgagtccaacctgtgttcatcactagagggacgtaactcttgagttcaagtcggtgttaacccactccacagccacccaacatactgtattccgtgcatcgagtgccagtggcgaccatagcagcagttcacaccctcaccatggccatgattcctcggaggttgtctcggccttgtgttgcccgttccctactcctcgcagaaggagtgaagattcaagctgaagtggtgactgaagaggaatctactccagtggctgctgatcaagtggaggagccatctaattggggtttaatagagggatcgagtacctcttcactgcaataaggcaagcccgggtgcatttgcccctttccttgtatttttaaaagacttttatacactttaagtctagtgaaatgtgcattaagtttataggagttgcttggaaactatttgatgcattgactaccttgatatccattcctgttgtagatacttctttggaagtatcaaatattgtttacaaaaatgcttagctt

SEQ ID NO: 82107 - DNA, 530 bp, Zea Mays
gcacacccttggctgagattcatcatccttgtgtttagcttctacgtgttgtccatgcactgctgcttagtgtccctgctcgtagtggtgctggcaccctaggactttcccttcctccacagaattttatacaaagctcagggatactcgcctacatgttcagctgccctaaagactttgtctatgaagttcccctctgcccttgagtccaacctgtgttcatcactagagggacgtaactcttgagttcaagtcggtgttaacccactccacagccacccaacatactgtattccgtgcatcgagtgccagtggcgaccatagcagcagttcacaccctcaccatggccatgattcctcggaggttgtctcggccttgtgttgcccgttccctactcctcgcaggcatatggaatgcagactgattcagtcgactgttattatggttcagtgagtttttaaccacttttggagctctgtggtaattactccaagtagaattgggttagggattccacagcaagatggga

SEQ ID NO: 82108 - DNA, 2002 bp, Zea Mays
gatgacatttggaatctgattacttctttacaccattgtgacattagttgactgtcatttgttgctttttatttgagttgcctggattgaattagtctcaggacagacataggataggacctaagatcgcattagcaaaagctaaaatggtctaggattagaagtgttataccaaatcttccatgaactccagatagcccagagtcttttataatgccacacacaaagctttcatgtgttggaaaaaaatcataggtcaaccgaactaagttatcacaacatttactcaaaccatatcagaaggcacatatgcttacataaatttcattttagttgataccaccggtcctgggtttcatgcttacaactagaaaagggttctattttttcagattatgaacataccatggaaacatgaagcagggttttacttttatatatgctagcaattgttatctgttgtgttgctttacatttctgttacttactcttttgcaggtaaaatatacagactgtggagttagtcctcaggatctacatcatgtattcacaaagtttgctcatcctcaaagtggaggaaaccgagggtttaatggtagtggtcttggccttgccatatgcaagagccatcccggtttctaggattccatgtcgtcccatgagaatataacgaaggaaacaagaagcacattatagaagtagcaagatcacagtacatatcagcatgacattcatgaagccatcccggtttctaggattcttgttttgctctgtccatggcacgccaccaacattcatccctaaaactgacatttttttgcaacataaatcaggtaaacgagagccctggaaataacaggaattaattcaggaaagtacacgagcaagcacccgaggtcaatgagcttacctccattgacaatggagataggaaggaatatcatgaagagaaatgaaaggagagattaaaatcaaagggattgagctacaggagagttgcagtctgtcgttcttttccatgggtgtgattgagactgaaacgatgggtaccagagtgaaggagtcgaagacagttttagtagagaaagagctcgaactgatcgacgagcctcagattcaagagagccctccagttcgtgcattgttgcatgatgaggtggattttgctgaatcgtcacttgctattagagaatctgacattcccgtgaagaaggtgctgataatcgtgacaatcacttttgtttggccacaacagccatattacttgaagcccatgttttgaaagctgtattggcacttcttctatggttagtggtggaatagcccgaacagtcctatgaaacagcaaaaaatctgttacagtccacttaggtggaagaggtagtttgtagatgattttgttttaatatatgaactgtaatagtaaggttacaataaattttcacataggtgatcaaacttctgtttgtgtaaagccaacagatggtctgacctgacatgtgtttttccaggagtcactacttatagaaaaagcttgttcctagaggtggtttctcccggcaatgcagaatcttgaagcacgtctaaagtggcttgatgatagttctaaatttcaactccctgtcattaccaggtgccagataggctgctggtcgattccatcctgaacaagttgcgccaaagattacatgaatattgcgtgccgagatctgtcttcagtaatgcgatgccatcctgaacaagttgcagcgacaattaggataggattttcccacgctttttagtcttgtgtattccttttatgctcttcatctttttttctcattatatccaccaattagatagtcatgtagactttcttttaggcgcttttgttttttatactttgtgttaccttgcttttgttttcatactttgtgttaccttacagatgtaaaaacgctcccctcccgtacattgcactatttatgaggaaaggtaaaatagcgtcatttagcttttt

SEQ ID NO: 82109 - DNA, 2142 bp, Zea Mays
gatgacatttggaatctgattacttctttacaccattgtgacattagttgactgtcatttgttgctttttatttgagttgcctggattgaattagtctcaggacagacataggataggacctaagatcgcattagcaaaagctaaaatggtctaggattagaagtgttataccaaatcttccatgaactccagatagcccagagtcttttataatgccacacacaaagctttcatgtgttggaaaaaaatcataggtcaaccgaactaagttatcacaacatttactcaaaccatatcagaaggcacatatgcttacataaatttcattttagttgataccaccggtcctgggtttcatgcttacaactagaaaagggttctattttttcagattatgaacataccatggaaacatgaagcagggttttacttttatatatgctagcaattgttatctgttgtgttgctttacatttctgttacttactcttttgcaggtaaaatatacagactgtggagttagtcctcaggatctacatcatgtattcacaaagtttgctcatcctcaaagtggaggaaaccgagggtttaatggtagtggtcttggccttgccatatgcaagaggtaaacgagagccctggaaataacaggaattaattcaggaaagtacacgagcaagcacccgaggtcaatgagcttacctccattgacaatggagataggaaggaatatcatgaagagaaatgaaaggaccatataattccaagaccctgatgatggccacaactgcttatattgatgattcctactcggagattattgatcctctaaagactgaggtgctgtatgttgttgaactccctggtgaccatacttagcacccaccaaaaccgaatgtggtggtgtctagcagtgtgtgcaaacttctagaatatccagtctgcttgaatgccatgtatcctattcatcagctgcacattcatactgatccatttggcatgtttatatctaaaaccctgttcaaatgtagtcgattggatgaaaattatggctttactggtttcagcgttcctttcaatatcatgtactgttatcaccattttattctgatccgtttcaatttctatggacgtttagtacataatgtttataaaccttaacttttttactcttttttcttttttgattagctacgatacagtgcagaataatatgttctgcttttttattcaactattcaaatcttattttttattcaactattcaaatcatattttttgattagctgattgcaggagagattaaaatcaaagggattgagctacaggagagttgcagtctgtcgttcttttccatggtagtaggcattttcattgggttcatacatttattctctgtcgatgtttacaagaaaatagtatctaaaaacaagatgtctctgttccatgagggtgtgattgagactgaaacgatgggtaccagagtgaaggagtcgaagacagttttagtagagaaagagctcgaactgatcgacgagcctcagattcaagagagccctccagttcgtgcattgttgcatgatgaggtggattttgctgaatcgtcacttgctattagagaatctgacattcccgtgaagaaggtgctgataatcgtgacaatcacttttgtttggccacaacagccatattacttgaagcccatgttttgaaagctgtattggcacttcttctatggagtcactacttatagaaaaagcttgttcctagaggtgccagataggctgctggtcgattccatcctgaacaagttgcgccaaagattacatgaatattgcgtgccgagatctgtcttcagtaatgcgatgccatcctgaacaagttgcagcgacaattaggataggattttcccacgctttttagtcttgtgtattccttttatgctcttcatctttttttctcattatatccaccaattagatagtcatgtagactttcttttaggcgcttttgttttttatactttgtgttaccttgcttttgttttcatactttgtgttaccttacagatgtaaaaacgctcccctcccgtacattgcactatttatgaggaaaggtaaaatagcgtcatttagcttttt

SEQ ID NO: 82110 - DNA, 1625 bp, Zea Mays
ctttttctttgttcttataatctcatggtgtagaatttctgctggttgggcctgatgacatttggaatctgattacttctttacaccattgtgacattagttgactgtcatttgttgctttttatttgagttgcctggattgaattagtctcaggacagacataggataggacctaagatcgcattagcaaaagctaaaatggtctaggattagaagtgttataccaaatcttccatgaactccagatagcccagagtcttttataatgccacacacaaagctttcatgtgttggaaaaaaatcataggtcaaccgaactaagttatcacaacatttactcaaaccatatcagaaggcacatatgcttacataaatttcattttagttgataccaccggtcctgggtttcatgcttacaactagaaaagggttctattttttcagattatgaacataccatggaaacatgaagcagggttttacttttatatatgctagcaattgttatctgttgtgttgctttacatttctgttacttactcttttgcaggtaaaatatacagactgtggagttagtcctcaggatctacatcatgtattcacaaagtttgctcatcctcaaagtggaggaaaccgagggtttaatggtagtggtcttggccttgccatatgcaagaggtaaacgagagccctggaaataacaggaattaattcaggaaagtacacgagcaagcacccgaggtcaatgagcttacctccattgacaatggagataggaaggaatatcatgaagagaaatgaaagctgattgcaggagagattaaaatcaaagggattgagctacaggagagttgcagtctgtcgttcttttccatggtagtaggcattttcattgggttcatacatttattctctgtcgatgtttacaagaaaatagtatctaaaaacaagatgtctctgttccatgagggtgtgattgagactgaaacgatgggtaccagagtgaaggagtcgaagacagttttagtagagaaagagctcgaactgatcgacgagcctcagattcaagagagccctccagttcgtgcattgttgcatgatgaggtggattttgctgaatcgtcacttgctattagagaatctgacattcccgtgaagaaggtgctgataatcgtgacaatcacttttgtttggccacaacagccatattacttgaagcccatgttttgaaagctgtattggcacttcttctatggtgccagataggctgctggtcgattccatcctgaacaagttgcgccaaagattacatgaatattgcgtgccgagatctgtcttcagtaatgcgatgccatcctgaacaagttgcagcgacaattaggataggattttcccacgctttttagtcttgtgtattccttttatgctcttcatctttttttctcattatatccaccaattagatagtcatgtagactttcttttaggcgcttttgttttttatactttgtgttaccttgcttttgttttcatactttgtgttaccttacagatgtaaaaacgctcccctcccgtacattgcactatttatgaggaaaggtaaaatagcgtcatttagcttttt

SEQ ID NO: 82111 - DNA, 2508 bp, Zea Mays
gctctgtataggtccatgtacaattttccaattcttcctatcaagtttacaaaaacaggtggggcctgtccagctgtacctgactatgatttggggtgggtggggtctgaatctttttctttgttcttataatctcatggtgtagaatttctgctggttgggcctgatgacatttggaatctgattacttctttacaccattgtgacattagttgactgtcatttgttgctttttatttgagttgcctggattgaattagtctcaggacagacataggataggacctaagatcgcattagcaaaagctaaaatggtctaggattagaagtgttataccaaatcttccatgaactccagatagcccagagtcttttataatgccacacacaaagctttcatgtgttggaaaaaaatcataggtcaaccgaactaagttatcacaacatttactcaaaccatatcagaaggcacatatgcttacataaatttcattttagttgataccaccggtcctgggtttcatgcttacaactagaaaagggttctattttttcagattatgaacataccatggaaacatgaagcagggttttacttttatatatgctagcaattgttatctgttgtgttgctttacatttctgttacttactcttttgcaggtaaaatatacagactgtggagttagtcctcaggatctacatcatgtattcacaaagtttgctcatcctcaaagtggaggaaaccgagggtttaatggtagtggtcttggccttgccatatgcaagagccatcccggtttctaggattccatgtcgtcccatgagaatataacgaaggaaacaagaagcacattatagaagtagcaagatcacagtacatatcagcatgacattcatgaagccatcccggtttctaggattcttgttttgctctgtccatggcacgccaccaacattcatccctaaaactgacatttttttgcaacataaatcaggtaaacgagagccctggaaataacaggaattaattcaggaaagtacacgagcaagcacccgaggtcaatgagcttacctccattgacaatggagataggaaggaatatcatgaagagaaatgaaaggaccatataattccaagaccctgatgatggccacaactgcttatattgatgattcctactcggagattattgatcctctaaagactgaggtgctgtatgttgttgaactccctggtgaccatacttagcacccaccaaaaccgaatgtggtggtgtctagcagtgtgtgcaaacttctagaatatccagtctgcttgaatgccatgtatcctattcatcagctgcacattcatactgatccatttggcatgtttatatctaaaaccctgttcaaatgtagtcgattggatgaaaattatggctttactggtttcagcgttcctttcaatatcatgtactgttatcaccattttattctgatccgtttcaatttctatggacgtttagtacataatgtttataaaccttaacttttttactcttttttcttttttgattagctacgatacagtgcagaataatatgttctgcttttttattcaactattcaaatcttattttttattcaactattcaaatcatattttttgattagctgattgcaggagagattaaaatcaaagggattgagctacaggagagttgcagtctgtcgttcttttccatgggtgtgattgagactgaaacgatgggtaccagagtgaaggagtcgaagacagttttagtagagaaagagctcgaactgatcgacgagcctcagattcaagagagccctccagttcgtgcattgttgcatgatgaggtggattttgctgaatcgtcacttgctattagagaatctgacattcccgtgaagaaggtgctgataatcgtgacaatcacttttgtttggccacaacagccatattacttgaagcccatgttttgaaagctgtattggcacttcttctatggagtcactacttatagaaaaagcttgttcctagaggtggtttctcccggcaatgcagaatcttgaagcacgtctaaagtggcttgatgatagttctaaatttcaactccctgtcattaccaggtgccagataggctgctggtcgattccatcctgaacaagttgcgccaaagattacatgaatattgcgtgccgagatctgtcttcagtaatgcgatgccatcctgaacaagttgcagcgacaattaggataggattttcccacgctttttagtcttgtgtattccttttatgctcttcatctttttttctcattatatccaccaattagatagtcatgtagactttcttttaggcgcttttgttttttatactttgtgttaccttgcttttgttttcatactttgtgttaccttacagatgtaaaaacgctcccctcccgtacattgcactatttatgaggaaaggtaaaatagcgtcatttagcttttt

SEQ ID NO: 82112 - DNA, 3143 bp, Zea Mays
cgtgcacagggtggacgttctgcccccgacatcctccccttagctccgctccctgaagccgtgatcgaagccgccatcaacgccctccaccccctccgcgcgcggcagcggcagccggcatttccagcccctaaaatcctatttccctctcccacaccaggcgccgcgcccgtctgattccgcccgccagccacgcccgcagatctcgcttcggcgccctgattccgtcgtatgcaaggtcacagccctgccttccatcgtcgcccccatgccacgctccccttccatcctcgctcacttccagccgcccccattcccagttgaaggagtcgtccaggaaccaggaaccccatcaccggatcaggagcagctgtgtcgcgagcatggtcgttgctgagctcccgatgaccgcccgatggtgtcggaccccgcaccgccgtcggcaccgcgctactcggcgtactcgctgccgtcgacccacctccccggagaggacatcctcttctgcatcgacgtcgacctcgaggtccacgccaagatgaagtccgctgccgtagcgtcctcggatccacgtccaccgcgtcgccgcagtccgtaggagctgatggtgccccgacggtggggagcatcgagccatggctcaagtgcaaggatcagcccccgcagcagggcaaggagatcccgcagaccaaggccgaccgggccaagctcgatggcatgtacaagtgcatcctctgcgcctgctgctccacctcctgcccgtcctactggtggaacccagaggagtacctcggcccagccacgctgttccacgccaacaggtgaacagggcttcagcagggacgctggtttagcaatggaggcgatccattccttgtctgcttcaaaatcaagttatccaatggttgatctcacccaactcttcaaacaacaaaatatctccttatgtgtgactgaatttttcatgcactctggttttggatccatccattatgttcctcataatgaagtatttcatgcttattcagtagcaaaagacgatattttttcttgaaaatcctcttaattaacacgtgcattttcttgtatgaatcgttacctattccttttaatcatgtatcttggtaattaattgcatttgcatcattaaacctggcttgactcttgtgttgcttgatagttcatttgttttgtctataaactatgtgggcgtcagctctgtataggtccatgtacaattttccaattcttcctatcaagtttacaaaaacaggtggggcctgtccagctgtacctgactatgatttggggtgggtggggtctgaatctttttctttgttcttataatctcatggtgtagaatttctgctggttgggcctgatgacatttggaatctgattacttctttacaccattgtgacattagttgactgtcatttgttgctttttatttgagttgcctggattgaattagtctcaggacagacataggataggacctaagatcgcattagcaaaagctaaaatggtctaggattagaagtgttataccaaatcttccatgaactccagatagcccagagtcttttataatgccacacacaaagctttcatgtgttggaaaaaaatcataggtcaaccgaactaagttatcacaacatttactcaaaccatatcagaaggcacatatgcttacataaatttcattttagttgataccaccggtcctgggtttcatgcttacaactagaaaagggttctattttttcagattatgaacataccatggaaacatgaagcagggttttacttttatatatgctagcaattgttatctgttgtgttgctttacatttctgttacttactcttttgcaggtaaaatatacagactgtggagttagtcctcaggatctacatcatgtattcacaaagtttgctcatcctcaaagtggaggaaaccgagggtttaatggtagtggtcttggccttgccatatgcaagaggtaaacgagagccctggaaataacaggaattaattcaggaaagtacacgagcaagcacccgaggtcaatgagcttacctccattgacaatggagataggaaggaatatcatgaagagaaatgaaaggaccatataattccaagaccctgatgatggccacaactgcttatattgatgattcctactcggagattattgatcctctaaagactgagctgattgcaggagagattaaaatcaaagggattgagctacaggagagttgcagtctgtcgttcttttccatgggtgtgattgagactgaaacgatgggtaccagagtgaaggagtcgaagacagttttagtagagaaagagctcgaactgatcgacgagcctcagattcaagagagccctccagttcgtgcattgttgcatgatgaggtggattttgctgaatcgtcacttgctattagagaatctgacattcccgtgaagaaggtgctgataatcgtgacaatcacttttgtttggccacaacagccatattacttgaagcccatgttttgaaagctgtattggcacttcttctatggttagtggtggaatagcccgaacagtcctatgaaacagcaaaaaatctgttacagtccacttaggtggaagaggagtcactacttatagaaaaagcttgttcctagaggtggtttctcccggcaatgcagaatcttgaagcacgtctaaagtggcttgatgatagttctaaatttcaactccctgtcattaccaggtgccagataggctgctggtcgattccatcctgaacaagttgcgccaaagattacatgaatattgcgtgccgagatctgtcttcagtaatgcgatgccatcctgaacaagttgcagcgacaattaggataggattttcccacgctttttagtcttgtgtattccttttatgctcttcatctttttttctcattatatccaccaattagatagtcatgtagactttcttttaggcgcttttgttttttatactttgtgttaccttgcttttgttttcatactttgtgttaccttacagatgtaaaaacgctcccctcccgtacattgcactatttatgaggaaaggtaaaatagcgtcatttagcttttt

SEQ ID NO: 82113 - DNA, 2957 bp, Zea Mays
cgtgcacagggtggacgttctgcccccgacatcctccccttagctccgctccctgaagccgtgatcgaagccgccatcaacgccctccaccccctccgcgcgcggcagcggcagccggcatttccagcccctaaaatcctatttccctctcccacaccaggcgccgcgcccgtctgattccgcccgccagccacgcccgcagatctcgcttcggcgccctgattccgtcgtatgcaaggtcacagccctgccttccatcgtcgcccccatgccacgctccccttccatcctcgctcacttccagccgcccccattcccagttgaaggagtcgtccaggaaccaggaaccccatcaccggatcaggagcagctgtgtcgcgagcatggtcgttgctgagctcccgatgaccgcccgatggtgtcggaccccgcaccgccgtcggcaccgcgctactcggcgtactcgctgccgtcgacccacctccccggagaggacatcctcttctgcatcgacgtcgacctcgaggtccacgccaagatgaagtccgctgccgtagcgtcctcggatccacgtccaccgcgtcgccgcagtccgtaggagctgatggtgccccgacggtggggagcatcgagccatggctcaagtgcaaggatcagcccccgcagcagggcaaggagatcccgcagaccaaggccgaccgggccaagctcgatggcatgtacaagtgcatcctctgcgcctgctgctccacctcctgcccgtcctactggtggaacccagaggagtacctcggcccagccacgctgttccacgccaacaggtgaacagggcttcagcagggacgctggtttagcaatggaggcgatccattccttgtctgcttcaaaatcaagttatccaatggttgatctcacccaactcttcaaacaacaaaatatctccttatgtgtgactgaatttttcatgcactctggttttggatccatccattatgttcctcataatgaagtatttcatgcttattcagtagcaaaagacgatattttttcttgaaaatcctcttaattaacacgtgcattttcttgtatgaatcgttacctattccttttaatcatgtatcttggtaattaattgcatttgcatcattaaacctggcttgactcttgtgttgcttgatagttcatttgttttgtctataaactatgtgggcgtcagctctgtataggtccatgtacaattttccaattcttcctatcaagtttacaaaaacaggtggggcctgtccagctgtacctgactatgatttggggtgggtggggtctgaatctttttctttgttcttataatctcatggtgtagaatttctgctggttgggcctgatgacatttggaatctgattacttctttacaccattgtgacattagttgactgtcatttgttgctttttatttgagttgcctggattgaattagtctcaggacagacataggataggacctaagatcgcattagcaaaagctaaaatggtctaggattagaagtgttataccaaatcttccatgaactccagatagcccagagtcttttataatgccacacacaaagctttcatgtgttggaaaaaaatcataggtcaaccgaactaagttatcacaacatttactcaaaccatatcagaaggcacatatgcttacataaatttcattttagttgataccaccggtcctgggtttcatgcttacaactagaaaagggttctattttttcagattatgaacataccatggaaacatgaagcagggttttacttttatatatgctagcaattgttatctgttgtgttgctttacatttctgttacttactcttttgcaggtaaaatatacagactgtggagttagtcctcaggatctacatcatgtattcacaaagtttgctcatcctcaaagtggaggaaaccgagggtttaatggtagtggtcttggccttgccatatgcaagaggtaaacgagagccctggaaataacaggaattaattcaggaaagtacacgagcaagcacccgaggtcaatgagcttacctccattgacaatggagataggaaggaatatcatgaagagaaatgaaaggagagattaaaatcaaagggattgagctacaggagagttgcagtctgtcgttcttttccatgggtgtgattgagactgaaacgatgggtaccagagtgaaggagtcgaagacagttttagtagagaaagagctcgaactgatcgacgagcctcagattcaagagagccctccagttcgtgcattgttgcatgatgaggtggattttgctgaatcgtcacttgctattagagaatctgacattcccgtgaagaaggtgctgataatcgtgacaatcacttttgtttggccacaacagccatattacttgaagcccatgttttgaaagctgtattggcacttcttctatggttagtggtggaatagcccgaacagtcctatgaaacagcaaaaaatctgttacagtccacttaggtggaagaggagtcactacttatagaaaaagcttgttcctagaggtgccagataggctgctggtcgattccatcctgaacaagttgcgccaaagattacatgaatattgcgtgccgagatctgtcttcagtaatgcgatgccatcctgaacaagttgcagcgacaattaggataggattttcccacgctttttagtcttgtgtattccttttatgctcttcatctttttttctcattatatccaccaattagatagtcatgtagactttcttttaggcgcttttgttttttatactttgtgttaccttgcttttgttttcatactttgtgttaccttacagatgtaaaaacgctcccctcccgtacattgcactatttatgaggaaaggtaaaatagcgtcatttagcttttt

SEQ ID NO: 82114 - DNA, 3045 bp, Zea Mays
cgtgcacagggtggacgttctgcccccgacatcctccccttagctccgctccctgaagccgtgatcgaagccgccatcaacgccctccaccccctccgcgcgcggcagcggcagccggcatttccagcccctaaaatcctatttccctctcccacaccaggcgccgcgcccgtctgattccgcccgccagccacgcccgcagatctcgcttcggcgccctgattccgtcgtatgcaaggtcacagccctgccttccatcgtcgcccccatgccacgctccccttccatcctcgctcacttccagccgcccccattcccagttgaaggagtcgtccaggaaccaggaaccccatcaccggatcaggagcagctgtgtcgcgagcatggtcgttgctgagctcccgatgaccgcccgatggtgtcggaccccgcaccgccgtcggcaccgcgctactcggcgtactcgctgccgtcgacccacctccccggagaggacatcctcttctgcatcgacgtcgacctcgaggtccacgccaagatgaagtccgctgccgtagcgtcctcggatccacgtccaccgcgtcgccgcagtccgtaggagctgatggtgccccgacggtggggagcatcgagccatggctcaagtgcaaggatcagcccccgcagcagggcaaggagatcccgcagaccaaggccgaccgggccaagctcgatggcatgtacaagtgcatcctctgcgcctgctgctccacctcctgcccgtcctactggtggaacccagaggagtacctcggcccagccacgctgttccacgccaacaggtgaacagggcttcagcagggacgctggtttagcaatggaggcgatccattccttgtctgcttcaaaatcaagttatccaatgctctgtataggtccatgtacaattttccaattcttcctatcaagtttacaaaaacaggtggggcctgtccagctgtacctgactatgatttggggtgggtggggtctgaatctttttctttgttcttataatctcatggtgtagaatttctgctggttgggcctgatgacatttggaatctgattacttctttacaccattgtgacattagttgactgtcatttgttgctttttatttgagttgcctggattgaattagtctcaggacagacataggataggacctaagatcgcattagcaaaagctaaaatggtctaggattagaagtgttataccaaatcttccatgaactccagatagcccagagtcttttataatgccacacacaaagctttcatgtgttggaaaaaaatcataggtcaaccgaactaagttatcacaacatttactcaaaccatatcagaaggcacatatgcttacataaatttcattttagttgataccaccggtcctgggtttcatgcttacaactagaaaagggttctattttttcagattatgaacataccatggaaacatgaagcagggttttacttttatatatgctagcaattgttatctgttgtgttgctttacatttctgttacttactcttttgcaggtaaaatatacagactgtggagttagtcctcaggatctacatcatgtattcacaaagtttgctcatcctcaaagtggaggaaaccgagggtttaatggtagtggtcttggccttgccatatgcaagaggtaaacgagagccctggaaataacaggaattaattcaggaaagtacacgagcaagcacccgaggtcaatgagcttacctccattgacaatggagataggaaggaatatcatgaagagaaatgaaaggaccatataattccaagaccctgatgatggccacaactgcttatattgatgattcctactcggagattattgatcctctaaagactgaggagagattaaaatcaaagggattgagctacaggagagttgcagtctgtcgttcttttccatggtagtaggcattttcattgggttcatacatttattctctgtcgatgtttacaagaaaatagtatctaaaaacaagatgtctctgttccatgagggtgtgattgagactgaaacgatgggtaccagagtgaaggagtcgaagacagttttagtagagaaagagctcgaactgatcgacgagcctcagattcaagagagccctccagttcgtgcattgttgcatgatgaggtggattttgctgaatcgtcacttgctattagagaatctgacattcccgtgaagaaggtgctgataatcgtgacaatcacttttgtttggccacaacagccatattacttgaagcccatgttttgaaagctgtattggcacttcttctatggttagtggtggaatagcccgaacagtcctatgaaacagcaaaaaatctgttacagtccacttaggtggaagaggtagtttgtagatgattttgttttaatatatgaactgtaatagtaaggttacaataaattttcacataggtgatcaaacttctgtttgtgtaaagccaacagatggtctgacctgacatgtgtttttccaggagtcactacttatagaaaaagcttgttcctagaggtggtttctcccggcaatgcagaatcttgaagcacgtctaaagtggcttgatgatagttctaaatttcaactccctgtcattaccaggtgccagataggctgctggtcgattccatcctgaacaagttgcgccaaagattacatgaatattgcgtgccgagatctgtcttcagtaatgcgatgccatcctgaacaagttgcagcgacaattaggataggattttcccacgctttttagtcttgtgtattccttttatgctcttcatctttttttctcattatatccaccaattagatagtcatgtagactttcttttaggcgcttttgttttttatactttgtgttaccttgcttttgttttcatactttgtgttaccttacagatgtaaaaacgctcccctcccgtacattgcactatttatgaggaaaggtaaaatagcgtcatttagcttttt

SEQ ID NO: 82115 - DNA, 3277 bp, Zea Mays
cgtgcacagggtggacgttctgcccccgacatcctccccttagctccgctccctgaagccgtgatcgaagccgccatcaacgccctccaccccctccgcgcgcggcagcggcagccggcatttccagcccctaaaatcctatttccctctcccacaccaggcgccgcgcccgtctgattccgcccgccagccacgcccgcagatctcgcttcggcgccctgattccgtcgtatgcaaggtcacagccctgccttccatcgtcgcccccatgccacgctccccttccatcctcgctcacttccagccgcccccattcccagttgaaggagtcgtccaggaaccaggaaccccatcaccggatcaggagcagctgtgtcgcgagcatggtcgttgctgagctcccgatgaccgcccgatggtgtcggaccccgcaccgccgtcggcaccgcgctactcggcgtactcgctgccgtcgacccacctccccggagaggacatcctcttctgcatcgacgtcgacctcgaggtccacgccaagatgaagtccgctgccgtagcgtcctcggatccacgtccaccgcgtcgccgcagtccgtaggagctgatggtgccccgacggtggggagcatcgagccatggctcaagtgcaaggatcagcccccgcagcagggcaaggagatcccgcagaccaaggccgaccgggccaagctcgatggcatgtacaagtgcatcctctgcgcctgctgctccacctcctgcccgtcctactggtggaacccagaggagtacctcggcccagccacgctgttccacgccaacaggtgaacagggcttcagcagggacgctggtttagcaatggaggcgatccattccttgtctgcttcaaaatcaagttatccaatggttgatctcacccaactcttcaaacaacaaaatatctccttatgtgtgactgaatttttcatgcactctggttttggatccatccattatgttcctcataatgaagtatttcatgcttattcagtagcaaaagacgatattttttcttgaaaatcctcttaattaacacgtgcattttcttgtatgaatcgttacctattccttttaatcatgtatcttggtaattaattgcatttgcatcattaaacctggcttgactcttgtgttgcttgatagttcatttgttttgtctataaactatgtgggcgtcagctctgtataggtccatgtacaattttccaattcttcctatcaagtttacaaaaacaggtggggcctgtccagctgtacctgactatgatttggggtgggtggggtctgaatctttttctttgttcttataatctcatggtgtagaatttctgctggttgggcctgatgacatttggaatctgattacttctttacaccattgtgacattagttgactgtcatttgttgctttttatttgagttgcctggattgaattagtctcaggacagacataggataggacctaagatcgcattagcaaaagctaaaatggtctaggattagaagtgttataccaaatcttccatgaactccagatagcccagagtcttttataatgccacacacaaagctttcatgtgttggaaaaaaatcataggtcaaccgaactaagttatcacaacatttactcaaaccatatcagaaggcacatatgcttacataaatttcattttagttgataccaccggtcctgggtttcatgcttacaactagaaaagggttctattttttcagattatgaacataccatggaaacatgaagcagggttttacttttatatatgctagcaattgttatctgttgtgttgctttacatttctgttacttactcttttgcaggtaaaatatacagactgtggagttagtcctcaggatctacatcatgtattcacaaagtttgctcatcctcaaagtggaggaaaccgagggtttaatggtagtggtcttggccttgccatatgcaagagccatcccggtttctaggattccatgtcgtcccatgagaatataacgaaggaaacaagaagcacattatagaagtagcaagatcacagtacatatcagcatgacattcatgaagccatcccggtttctaggattcttgttttgctctgtccatggcacgccaccaacattcatccctaaaactgacatttttttgcaacataaatcaggtaaacgagagccctggaaataacaggaattaattcaggaaagtacacgagcaagcacccgaggtcaatgagcttacctccattgacaatggagataggaaggaatatcatgaagagaaatgaaaggaccatataattccaagaccctgatgatggccacaactgcttatattgatgattcctactcggagattattgatcctctaaagactgagctgattgcaggagagattaaaatcaaagggattgagctacaggagagttgcagtctgtcgttcttttccatgggtgtgattgagactgaaacgatgggtaccagagtgaaggagtcgaagacagttttagtagagaaagagctcgaactgatcgacgagcctcagattcaagagagccctccagttcgtgcattgttgcatgatgaggtggattttgctgaatcgtcacttgctattagagaatctgacattcccgtgaagaaggtgctgataatcgtgacaatcacttttgtttggccacaacagccatattacttgaagcccatgttttgaaagctgtattggcacttcttctatggagtcactacttatagaaaaagcttgttcctagaggtggtttctcccggcaatgcagaatcttgaagcacgtctaaagtggcttgatgatagttctaaatttcaactccctgtcattaccaggtgccagataggctgctggtcgattccatcctgaacaagttgcgccaaagattacatgaatattgcgtgccgagatctgtcttcagtaatgcgatgccatcctgaacaagttgcagcgacaattaggataggattttcccacgctttttagtcttgtgtattccttttatgctcttcatctttttttctcattatatccaccaattagatagtcatgtagactttcttttaggcgcttttgttttttatactttgtgttaccttgcttttgttttcatactttgtgttaccttacagatgtaaaaacgctcccctcccgtacattgcactatttatgaggaaaggtaaaatagcgtcatttagcttttt

SEQ ID NO: 82116 - DNA, 2736 bp, Zea Mays
cgtgcacagggtggacgttctgcccccgacatcctccccttagctccgctccctgaagccgtgatcgaagccgccatcaacgccctccaccccctccgcgcgcggcagcggcagccggcatttccagcccctaaaatcctatttccctctcccacaccaggcgccgcgcccgtctgattccgcccgccagccacgcccgcagatctcgcttcggcgccctgattccgtcgtatgcaaggtcacagccctgccttccatcgtcgcccccatgccacgctccccttccatcctcgctcacttccagccgcccccattcccagttgaaggagtcgtccaggaaccaggaaccccatcaccggatcaggagcagctgtgtcgcgagcatggtcgttgctgagctcccgatgaccgcccgatggtgtcggaccccgcaccgccgtcggcaccgcgctactcggcgtactcgctgccgtcgacccacctccccggagaggacatcctcttctgcatcgacgtcgacctcgaggtccacgccaagatgaagtccgctgccgtagcgtcctcggatccacgtccaccgcgtcgccgcagtccgtaggagctgatggtgccccgacggtggggagcatcgagccatggctcaagtgcaaggatcagcccccgcagcagggcaaggagatcccgcagaccaaggccgaccgggccaagctcgatggcatgtacaagtgcatcctctgcgcctgctgctccacctcctgcccgtcctactggtggaacccagaggagtacctcggcccagccacgctgttccacgccaacaggtgaacagggcttcagcagggacgctggtttagcaatggaggcgatccattccttgtctgcttcaaaatcaagttatccaatggtaaaatatacagactgtggagttagtcctcaggatctacatcatgtattcacaaagtttgctcatcctcaaagtggaggaaaccgagggtttaatggtagtggtcttggccttgccatatgcaagagccatcccggtttctaggattccatgtcgtcccatgagaatataacgaaggaaacaagaagcacattatagaagtagcaagatcacagtacatatcagcatgacattcatgaagccatcccggtaaacgagagccctggaaataacaggaattaattcaggaaagtacacgagcaagcacccgaggtcaatgagcttacctccattgacaatggagataggaaggaatatcatgaagagaaatgaaaggaccatataattccaagaccctgatgatggccacaactgcttatattgatgattcctactcggagattattgatcctctaaagactgaggtgctgtatgttgttgaactccctggtgaccatacttagcacccaccaaaaccgaatgtggtggtgtctagcagtgtgtgcaaacttctagaatatccagtctgcttgaatgccatgtatcctattcatcagctgcacattcatactgatccatttggcatgtttatatctaaaaccctgttcaaatgtagtcgattggatgaaaattatggctttactggtttcagcgttcctttcaatatcatgtactgttatcaccattttattctgatccgtttcaatttctatggacgtttagtacataatgtttataaaccttaacttttttactcttttttcttttttgattagctacgatacagtgcagaataatatgttctgcttttttattcaactattcaaatcttattttttattcaactattcaaatcatattttttgattagctgattgcaggagagattaaaatcaaagggattgagctacaggagagttgcagtctgtcgttcttttccatgggtgtgattgagactgaaacgatgggtaccagagtgaaggagtcgaagacagttttagtagagaaagagctcgaactgatcgacgagcctcagattcaagagagccctccagttcgtgcattgttgcatgatgaggtggattttgctgaatcgtcacttgctattagagaatctgacattcccgtgaagaaggtgctgataatcgtgacaatcacttttgtttggccacaacagccatattacttgaagcccatgttttgaaagctgtattggcacttcttctatggttagtggtggaatagcccgaacagtcctatgaaacagcaaaaaatctgttacagtccacttaggtggaagaggagtcactacttatagaaaaagcttgttcctagaggtggtttctcccggcaatgcagaatcttgaagcacgtctaaagtggcttgatgatagttctaaatttcaactccctgtcattaccaggtgccagataggctgctggtcgattccatcctgaacaagttgcgccaaagattacatgaatattgcgtgccgagatctgtcttcagtaatgcgatgccatcctgaacaagttgcagcgacaattaggataggattttcccacgctttttagtcttgtgtattccttttatgctcttcatctttttttctcattatatccaccaattagatagtcatgtagactttcttttaggcgcttttgttttttatactttgtgttaccttgcttttgttttcatactttgtgttaccttacagatgtaaaaacgctcccctcccgtacattgcactatttatgaggaaaggtaaaatagcgtcatttagcttttt

SEQ ID NO: 82117 - DNA, 2862 bp, Zea Mays
cgtgcacagggtggacgttctgcccccgacatcctccccttagctccgctccctgaagccgtgatcgaagccgccatcaacgccctccaccccctccgcgcgcggcagcggcagccggcatttccagcccctaaaatcctatttccctctcccacaccaggcgccgcgcccgtctgattccgcccgccagccacgcccgcagatctcgcttcggcgccctgattccgtcgtatgcaaggtcacagccctgccttccatcgtcgcccccatgccacgctccccttccatcctcgctcacttccagccgcccccattcccagttgaaggagtcgtccaggaaccaggaaccccatcaccggatcaggagcagctgtgtcgcgagcatggtcgttgctgagctcccgatgaccgcccgatggtgtcggaccccgcaccgccgtcggcaccgcgctactcggcgtactcgctgccgtcgacccacctccccggagaggacatcctcttctgcatcgacgtcgacctcgaggtccacgccaagatgaagtccgctgccgtagcgtcctcggatccacgtccaccgcgtcgccgcagtccgtaggagctgatggtgccccgacggtggggagcatcgagccatggctcaagtgcaaggatcagcccccgcagcagggcaaggagatcccgcagaccaaggccgaccgggccaagctcgatggcatgtacaagtgcatcctctgcgcctgctgctccacctcctgcccgtcctactggtggaacccagaggagtacctcggcccagccacgctgttccacgccaacaggtgaacagggcttcagcagggacgctggtttagcaatggaggcgatccattccttgtctgcttcaaaatcaagttatccaatggttgatctcacccaactcttcaaacaacaaaatatctccttatgtgtgactgaatttttcatgcactctggttttggatccatccattatgttcctcataatgaagtatttcatgcttattcagtagcaaaagacgatattttttcttgaaaatcctcttaattaacacgtgcattttcttgtatgaatcgttacctattccttttaatcatgtatcttggtaattaattgcatttgcatcattaaacctggcttgactcttgtgttgcttgatagttcatttgttttgtctataaactatgtgggcgtcagctctgtataggtccatgtacaattttccaattcttcctatcaagtttacaaaaacaggtggggcctgtccagctgtacctgactatgatttggggtgggtggggtctgaatctttttctttgttcttataatctcatggtgtagaatttctgctggttgggcctgatgacatttggaatctgattacttctttacaccattgtgacattagttgactgtcatttgttgctttttatttgagttgcctggattgaattagtctcaggacagacataggataggacctaagatcgcattagcaaaagctaaaatggtctaggattagaagtgttataccaaatcttccatgaactccagatagcccagagtcttttataatgccacacacaaagctttcatgtgttggaaaaaaatcataggtcaaccgaactaagttatcacaacatttactcaaaccatatcagaaggcacatatgcttacataaatttcattttagttgataccaccggtcctgggtttcatgcttacaactagaaaagggttctattttttcagattatgaacataccatggaaacatgaagcagggttttacttttatatatgctagcaattgttatctgttgtgttgctttacatttctgttacttactcttttgcaggtaaaatatacagactgtggagttagtcctcaggatctacatcatgtattcacaaagtttgctcatcctcaaagtggaggaaaccgagggtttaatggtagtggtcttggccttgccatatgcaagaggtaaacgagagccctggaaataacaggaattaattcaggaaagtacacgagcaagcacccgaggtcaatgagcttacctccattgacaatggagataggaaggaatatcatgaagagaaatgaaagctgattgcaggagagattaaaatcaaagggattgagctacaggagagttgcagtctgtcgttcttttccatgagtgaaggagtcgaagacagttttagtagagaaagagctcgaactgatcgacgagcctcagattcaagagagccctccagttcgtgcattgttgcatgatgaggtggattttgctgaatcgtcacttgctattagagaatctgacattcccgtgaagaaggtgctgataatcgtgacaatcacttttgtttggccacaacagccatattacttgaagcccatgttttgaaagctgtattggcacttcttctatggagtcactacttatagaaaaagcttgttcctagaggtgccagataggctgctggtcgattccatcctgaacaagttgcgccaaagattacatgaatattgcgtgccgagatctgtcttcagtaatgcgatgccatcctgaacaagttgcagcgacaattaggataggattttcccacgctttttagtcttgtgtattccttttatgctcttcatctttttttctcattatatccaccaattagatagtcatgtagactttcttttaggcgcttttgttttttatactttgtgttaccttgcttttgttttcatactttgtgttaccttacagatgtaaaaacgctcccctcccgtacattgcactatttatgaggaaaggtaaaatagcgtcatttagcttttt

SEQ ID NO: 82118 - DNA, 2884 bp, Zea Mays
cgtgcacagggtggacgttctgcccccgacatcctccccttagctccgctccctgaagccgtgatcgaagccgccatcaacgccctccaccccctccgcgcgcggcagcggcagccggcatttccagcccctaaaatcctatttccctctcccacaccaggcgccgcgcccgtctgattccgcccgccagccacgcccgcagatctcgcttcggcgccctgattccgtcgtatgcaaggtcacagccctgccttccatcgtcgcccccatgccacgctccccttccatcctcgctcacttccagccgcccccattcccagttgaaggagtcgtccaggaaccaggaaccccatcaccggatcaggagcagctgtgtcgcgagcatggtcgttgctgagctcccgatgaccgcccgatggtgtcggaccccgcaccgccgtcggcaccgcgctactcggcgtactcgctgccgtcgacccacctccccggagaggacatcctcttctgcatcgacgtcgacctcgaggtccacgccaagatgaagtccgctgccgtagcgtcctcggatccacgtccaccgcgtcgccgcagtccgtaggagctgatggtgccccgacggtggggagcatcgagccatggctcaagtgcaaggatcagcccccgcagcagggcaaggagatcccgcagaccaaggccgaccgggccaagctcgatggcatgtacaagtgcatcctctgcgcctgctgctccacctcctgcccgtcctactggtggaacccagaggagtacctcggcccagccacgctgttccacgccaacaggtgaacagggcttcagcagggacgctggtttagcaatggaggcgatccattccttgtctgcttcaaaatcaagttatccaatggttgatctcacccaactcttcaaacaacaaaatatctccttatgtgtgactgaatttttcatgcactctggttttggatccatccattatgttcctcataatgaagtatttcatgcttattcagtagcaaaagacgatattttttcttgaaaatcctcttaattaacacgtgcattttcttgtatgaatcgttacctattccttttaatcatgtatcttggtaattaattgcatttgcatcattaaacctggcttgactcttgtgttgcttgatagttcatttgttttgtctataaactatgtgggcgtcagctctgtataggtccatgtacaattttccaattcttcctatcaagtttacaaaaacaggtggggcctgtccagctgtacctgactatgatttggggtgggtggggtctgaatctttttctttgttcttataatctcatggtgtagaatttctgctggttgggcctgatgacatttggaatctgattacttctttacaccattgtgacattagttgactgtcatttgttgctttttatttgagttgcctggattgaattagtctcaggacagacataggataggacctaagatcgcattagcaaaagctaaaatggtctaggattagaagtgttataccaaatcttccatgaactccagatagcccagagtcttttataatgccacacacaaagctttcatgtgttggaaaaaaatcataggtcaaccgaactaagttatcacaacatttactcaaaccatatcagaaggcacatatgcttacataaatttcattttagttgataccaccggtcctgggtttcatgcttacaactagaaaagggttctattttttcagattatgaacataccatggaaacatgaagcagggttttacttttatatatgctagcaattgttatctgttgtgttgctttacatttctgttacttactcttttgcaggtaaaatatacagactgtggagttagtcctcaggatctacatcatgtattcacaaagtttgctcatcctcaaagtggaggaaaccgagggtttaatggtagtggtcttggccttgccatatgcaagaggtaaacgagagccctggaaataacaggaattaattcaggaaagtacacgagcaagcacccgaggtcaatgagcttacctccattgacaatggagataggaaggaatatcatgaagagaaatgaaaggagagattaaaatcaaagggattgagctacaggagagttgcagtctgtcgttcttttccatgggtgtgattgagactgaaacgatgggtaccagagtgaaggagtcgaagacagttttagtagagaaagagctcgaactgatcgacgagcctcagattcaagagagccctccagttcgtgcattgttgcatgatgaggtggattttgctgaatcgtcacttgctattagagaatctgacattcccgtgaagaaggtgctgataatcgtgacaatcacttttgtttggccacaacagccatattacttgaagcccatgttttgaaagctgtattggcacttcttctatggagtcactacttatagaaaaagcttgttcctagaggtgccagataggctgctggtcgattccatcctgaacaagttgcgccaaagattacatgaatattgcgtgccgagatctgtcttcagtaatgcgatgccatcctgaacaagttgcagcgacaattaggataggattttcccacgctttttagtcttgtgtattccttttatgctcttcatctttttttctcattatatccaccaattagatagtcatgtagactttcttttaggcgcttttgttttttatactttgtgttaccttgcttttgttttcatactttgtgttaccttacagatgtaaaaacgctcccctcccgtacattgcactatttatgaggaaaggtaaaatagcgtcatttagcttttt

SEQ ID NO: 82119 - DNA, 2967 bp, Zea Mays
cgtgcacagggtggacgttctgcccccgacatcctccccttagctccgctccctgaagccgtgatcgaagccgccatcaacgccctccaccccctccgcgcgcggcagcggcagccggcatttccagcccctaaaatcctatttccctctcccacaccaggcgccgcgcccgtctgattccgcccgccagccacgcccgcagatctcgcttcggcgccctgattccgtcgtatgcaaggtcacagccctgccttccatcgtcgcccccatgccacgctccccttccatcctcgctcacttccagccgcccccattcccagttgaaggagtcgtccaggaaccaggaaccccatcaccggatcaggagcagctgtgtcgcgagcatggtcgttgctgagctcccgatgaccgcccgatggtgtcggaccccgcaccgccgtcggcaccgcgctactcggcgtactcgctgccgtcgacccacctccccggagaggacatcctcttctgcatcgacgtcgacctcgaggtccacgccaagatgaagtccgctgccgtagcgtcctcggatccacgtccaccgcgtcgccgcagtccgtaggagctgatggtgccccgacggtggggagcatcgagccatggctcaagtgcaaggatcagcccccgcagcagggcaaggagatcccgcagaccaaggccgaccgggccaagctcgatggcatgtacaagtgcatcctctgcgcctgctgctccacctcctgcccgtcctactggtggaacccagaggagtacctcggcccagccacgctgttccacgccaacaggtgaacagggcttcagcagggacgctggtttagcaatggaggcgatccattccttgtctgcttcaaaatcaagttatccaatggttgatctcacccaactcttcaaacaacaaaatatctccttatgtgtgactgaatttttcatgcactctggttttggatccatccattatgttcctcataatgaagtatttcatgcttattcagtagcaaaagacgatattttttcttgaaaatcctcttaattaacacgtgcattttcttgtatgaatcgttacctattccttttaatcatgtatcttggtaattaattgcatttgcatcattaaacctggcttgactcttgtgttgcttgatagttcatttgttttgtctataaactatgtgggcgtcagctctgtataggtccatgtacaattttccaattcttcctatcaagtttacaaaaacaggtggggcctgtccagctgtacctgactatgatttggggtgggtggggtctgaatctttttctttgttcttataatctcatggtgtagaatttctgctggttgggcctgatgacatttggaatctgattacttctttacaccattgtgacattagttgactgtcatttgttgctttttatttgagttgcctggattgaattagtctcaggacagacataggataggacctaagatcgcattagcaaaagctaaaatggtctaggattagaagtgttataccaaatcttccatgaactccagatagcccagagtcttttataatgccacacacaaagctttcatgtgttggaaaaaaatcataggtcaaccgaactaagttatcacaacatttactcaaaccatatcagaaggcacatatgcttacataaatttcattttagttgataccaccggtcctgggtttcatgcttacaactagaaaagggttctattttttcagattatgaacataccatggaaacatgaagcagggttttacttttatatatgctagcaattgttatctgttgtgttgctttacatttctgttacttactcttttgcaggtaaaatatacagactgtggagttagtcctcaggatctacatcatgtattcacaaagtttgctcatcctcaaagtggaggaaaccgagggtttaatggtagtggtcttggccttgccatatgcaagaggtaaacgagagccctggaaataacaggaattaattcaggaaagtacacgagcaagcacccgaggtcaatgagcttacctccattgacaatggagataggaaggaatatcatgaagagaaatgaaagctgattgcaggagagattaaaatcaaagggattgagctacaggagagttgcagtctgtcgttcttttccatgggtgtgattgagactgaaacgatgggtaccagagtgaaggagtcgaagacagttttagtagagaaagagctcgaactgatcgacgagcctcagattcaagagagccctccagttcgtgcattgttgcatgatgaggtggattttgctgaatcgtcacttgctattagagaatctgacattcccgtgaagaaggtgctgataatcgtgacaatcacttttgtttggccacaacagccatattacttgaagcccatgttttgaaagctgtattggcacttcttctatggttagtggtggaatagcccgaacagtcctatgaaacagcaaaaaatctgttacagtccacttaggtggaagaggagtcactacttatagaaaaagcttgttcctagaggtgccagataggctgctggtcgattccatcctgaacaagttgcgccaaagattacatgaatattgcgtgccgagatctgtcttcagtaatgcgatgccatcctgaacaagttgcagcgacaattaggataggattttcccacgctttttagtcttgtgtattccttttatgctcttcatctttttttctcattatatccaccaattagatagtcatgtagactttcttttaggcgcttttgttttttatactttgtgttaccttgcttttgttttcatactttgtgttaccttacagatgtaaaaacgctcccctcccgtacattgcactatttatgaggaaaggtaaaatagcgtcatttagcttttt

SEQ ID NO: 82120 - DNA, 3589 bp, Zea Mays
cgtgcacagggtggacgttctgcccccgacatcctccccttagctccgctccctgaagccgtgatcgaagccgccatcaacgccctccaccccctccgcgcgcggcagcggcagccggcatttccagcccctaaaatcctatttccctctcccacaccaggcgccgcgcccgtctgattccgcccgccagccacgcccgcagatctcgcttcggcgccctgattccgtcgtatgcaaggtcacagccctgccttccatcgtcgcccccatgccacgctccccttccatcctcgctcacttccagccgcccccattcccagttgaaggagtcgtccaggaaccaggaaccccatcaccggatcaggagcagctgtgtcgcgagcatggtcgttgctgagctcccgatgaccgcccgatggtgtcggaccccgcaccgccgtcggcaccgcgctactcggcgtactcgctgccgtcgacccacctccccggagaggacatcctcttctgcatcgacgtcgacctcgaggtccacgccaagatgaagtccgctgccgtagcgtcctcggatccacgtccaccgcgtcgccgcagtccgtaggagctgatggtgccccgacggtggggagcatcgagccatggctcaagtgcaaggatcagcccccgcagcagggcaaggagatcccgcagaccaaggccgaccgggccaagctcgatggcatgtacaagtgcatcctctgcgcctgctgctccacctcctgcccgtcctactggtggaacccagaggagtacctcggcccagccacgctgttccacgccaacaggtgaacagggcttcagcagggacgctggtttagcaatggaggcgatccattccttgtctgcttcaaaatcaagttatccaatggttgatctcacccaactcttcaaacaacaaaatatctccttatgtgtgactgaatttttcatgcactctggttttggatccatccattatgttcctcataatgaagtatttcatgcttattcagtagcaaaagacgatattttttcttgaaaatcctcttaattaacacgtgcattttcttgtatgaatcgttacctattccttttaatcatgtatcttggtaattaattgcatttgcatcattaaacctggcttgactcttgtgttgcttgatagttcatttgttttgtctataaactatgtgggcgtcagctctgtataggtccatgtacaattttccaattcttcctatcaagtttacaaaaacaggtggggcctgtccagctgtacctgactatgatttggggtgggtggggtctgaatctttttctttgttcttataatctcatggtgtagaatttctgctggttgggcctgatgacatttggaatctgattacttctttacaccattgtgacattagttgactgtcatttgttgctttttatttgagttgcctggattgaattagtctcaggacagacataggataggacctaagatcgcattagcaaaagctaaaatggtctaggattagaagtgttataccaaatcttccatgaactccagatagcccagagtcttttataatgccacacacaaagctttcatgtgttggaaaaaaatcataggtcaaccgaactaagttatcacaacatttactcaaaccatatcagaaggcacatatgcttacataaatttcattttagttgataccaccggtcctgggtttcatgcttacaactagaaaagggttctattttttcagattatgaacataccatggaaacatgaagcagggttttacttttatatatgctagcaattgttatctgttgtgttgctttacatttctgttacttactcttttgcaggtaaaatatacagactgtggagttagtcctcaggatctacatcatgtattcacaaagtttgctcatcctcaaagtggaggaaaccgagggtttaatggtagtggtcttggccttgccatatgcaagaggtaaacgagagccctggaaataacaggaattaattcaggaaagtacacgagcaagcacccgaggtcaatgagcttacctccattgacaatggagataggaaggaatatcatgaagagaaatgaaaggaccatataattccaagaccctgatgatggccacaactgcttatattgatgattcctactcggagattattgatcctctaaagactgaggtgctgtatgttgttgaactccctggtgaccatacttagcacccaccaaaaccgaatgtggtggtgtctagcagtgtgtgcaaacttctagaatatccagtctgcttgaatgccatgtatcctattcatcagctgcacattcatactgatccatttggcatgtttatatctaaaaccctgttcaaatgtagtcgattggatgaaaattatggctttactggtttcagcgttcctttcaatatcatgtactgttatcaccattttattctgatccgtttcaatttctatggacgtttagtacataatgtttataaaccttaacttttttactcttttttcttttttgattagctacgatacagtgcagaataatatgttctgcttttttattcaactattcaaatcttattttttattcaactattcaaatcatattttttgattagctgattgcaggagagattaaaatcaaagggattgagctacaggagagttgcagtctgtcgttcttttccatgggtgtgattgagactgaaacgatgggtaccagagtgaaggagtcgaagacagttttagtagagaaagagctcgaactgatcgacgagcctcagattcaagagagccctccagttcgtgcattgttgcatgatgaggtggattttgctgaatcgtcacttgctattagagaatctgacattcccgtgaagaaggtgctgataatcgtgacaatcacttttgtttggccacaacagccatattacttgaagcccatgttttgaaagctgtattggcacttcttctatggttagtggtggaatagcccgaacagtcctatgaaacagcaaaaaatctgttacagtccacttaggtggaagaggagtcactacttatagaaaaagcttgttcctagaggtggtttctcccggcaatgcagaatcttgaagcacgtctaaagtggcttgatgatagttctaaatttcaactccctgtcattaccaggtgccagataggctgctggtcgattccatcctgaacaagttgcgccaaagattacatgaatattgcgtgccgagatctgtcttcagtaatgcgatgccatcctgaacaagttgcagcgacaattaggataggattttcccacgctttttagtcttgtgtattccttttatgctcttcatctttttttctcattatatccaccaattagatagtcatgtagactttcttttaggcgcttttgttttttatactttgtgttaccttgcttttgttttcatactttgtgttaccttacagatgtaaaaacgctcccctcccgtacattgcactatttatgaggaaaggtaaaatagcgtcatttagcttttt

SEQ ID NO: 82121 - DNA, 3261 bp, Zea Mays
cgtgcacagggtggacgttctgcccccgacatcctccccttagctccgctccctgaagccgtgatcgaagccgccatcaacgccctccaccccctccgcgcgcggcagcggcagccggcatttccagcccctaaaatcctatttccctctcccacaccaggcgccgcgcccgtctgattccgcccgccagccacgcccgcagatctcgcttcggcgccctgattccgtcgtatgcaaggtcacagccctgccttccatcgtcgcccccatgccacgctccccttccatcctcgctcacttccagccgcccccattcccagttgaaggagtcgtccaggaaccaggaaccccatcaccggatcaggagcagctgtgtcgcgagcatggtcgttgctgagctcccgatgaccgcccgatggtgtcggaccccgcaccgccgtcggcaccgcgctactcggcgtactcgctgccgtcgacccacctccccggagaggacatcctcttctgcatcgacgtcgacctcgaggtccacgccaagatgaagtccgctgccgtagcgtcctcggatccacgtccaccgcgtcgccgcagtccgtaggagctgatggtgccccgacggtggggagcatcgagccatggctcaagtgcaaggatcagcccccgcagcagggcaaggagatcccgcagaccaaggccgaccgggccaagctcgatggcatgtacaagtgcatcctctgcgcctgctgctccacctcctgcccgtcctactggtggaacccagaggagtacctcggcccagccacgctgttccacgccaacaggtgaacagggcttcagcagggacgctggtttagcaatggaggcgatccattccttgtctgcttcaaaatcaagttatccaatggttgatctcacccaactcttcaaacaacaaaatatctccttatgtgtgactgaatttttcatgcactctggttttggatccatccattatgttcctcataatgaagtatttcatgcttattcagtagcaaaagacgatattttttcttgaaaatcctcttaattaacacgtgcattttcttgtatgaatcgttacctattccttttaatcatgtatcttggtaattaattgcatttgcatcattaaacctggcttgactcttgtgttgcttgatagttcatttgttttgtctataaactatgtgggcgtcagctctgtataggtccatgtacaattttccaattcttcctatcaagtttacaaaaacaggtggggcctgtccagctgtacctgactatgatttggggtgggtggggtctgaatctttttctttgttcttataatctcatggtgtagaatttctgctggttgggcctgatgacatttggaatctgattacttctttacaccattgtgacattagttgactgtcatttgttgctttttatttgagttgcctggattgaattagtctcaggacagacataggataggacctaagatcgcattagcaaaagctaaaatggtctaggattagaagtgttataccaaatcttccatgaactccagatagcccagagtcttttataatgccacacacaaagctttcatgtgttggaaaaaaatcataggtcaaccgaactaagttatcacaacatttactcaaaccatatcagaaggcacatatgcttacataaatttcattttagttgataccaccggtcctgggtttcatgcttacaactagaaaagggttctattttttcagattatgaacataccatggaaacatgaagcagggttttacttttatatatgctagcaattgttatctgttgtgttgctttacatttctgttacttactcttttgcaggtaaaatatacagactgtggagttagtcctcaggatctacatcatgtattcacaaagtttgctcatcctcaaagtggaggaaaccgagggtttaatggtagtggtcttggccttgccatatgcaagagccatcccggtttctaggattccatgtcgtcccatgagaatataacgaaggaaacaagaagcacattatagaagtagcaagatcacagtacatatcagcatgacattcatgaagccatcccggtttctaggattcttgttttgctctgtccatggcacgccaccaacattcatccctaaaactgacatttttttgcaacataaatcaggtaaacgagagccctggaaataacaggaattaattcaggaaagtacacgagcaagcacccgaggtcaatgagcttacctccattgacaatggagataggaaggaatatcatgaagagaaatgaaagctgattgcaggagagattaaaatcaaagggattgagctacaggagagttgcagtctgtcgttcttttccatgggtgtgattgagactgaaacgatgggtaccagagtgaaggagtcgaagacagttttagtagagaaagagctcgaactgatcgacgagcctcagattcaagagagccctccagttcgtgcattgttgcatgatgaggtggattttgctgaatcgtcacttgctattagagaatctgacattcccgtgaagaaggtgctgataatcgtgacaatcacttttgtttggccacaacagccatattacttgaagcccatgttttgaaagctgtattggcacttcttctatggttagtggtggaatagcccgaacagtcctatgaaacagcaaaaaatctgttacagtccacttaggtggaagaggagtcactacttatagaaaaagcttgttcctagaggtggtttctcccggcaatgcagaatcttgaagcacgtctaaagtggcttgatgatagttctaaatttcaactccctgtcattaccaggtgccagataggctgctggtcgattccatcctgaacaagttgcgccaaagattacatgaatattgcgtgccgagatctgtcttcagtaatgcgatgccatcctgaacaagttgcagcgacaattaggataggattttcccacgctttttagtcttgtgtattccttttatgctcttcatctttttttctcattatatccaccaattagatagtcatgtagactttcttttaggcgcttttgttttttatactttgtgttaccttgcttttgttttcatactttgtgttaccttacagatgtaaaaacgctcccctcccgtacattgcactatttatgaggaaaggtaaaatagcgtcatttagcttttt

SEQ ID NO: 82122 - DNA, 2304 bp, Zea Mays
cgtgcacagggtggacgttctgcccccgacatcctccccttagctccgctccctgaagccgtgatcgaagccgccatcaacgccctccaccccctccgcgcgcggcagcggcagccggcatttccagcccctaaaatcctatttccctctcccacaccaggcgccgcgcccgtctgattccgcccgccagccacgcccgcagatctcgcttcggcgccctgattccgtcgtatgcaaggtcacagccctgccttccatcgtcgcccccatgccacgctccccttccatcctcgctcacttccagccgcccccattcccagttgaaggagtcgtccaggaaccaggaaccccatcaccggatcaggagcagctgtgtcgcgagcatggtcgttgctgagctcccgatgaccgcccgatggtgtcggaccccgcaccgccgtcggcaccgcgctactcggcgtactcgctgccgtcgacccacctccccggagaggacatcctcttctgcatcgacgtcgacctcgaggtccacgccaagatgaagtccgctgccgtagcgtcctcggatccacgtccaccgcgtcgccgcagtccgtaggagctgatggtgccccgacggtggggagcatcgagccatggctcaagtgcaaggatcagcccccgcagcagggcaaggagatcccgcagaccaaggccgaccgggccaagctcgatggcatgtacaagtgcatcctctgcgcctgctgctccacctcctgcccgtcctactggtggaacccagaggagtacctcggcccagccacgctgttccacgccaacaggtgaacagggcttcagcagggacgctggtttagcaatggaggcgatccattccttgtctgcttcaaaatcaagttatccaatggtaaaatatacagactgtggagttagtcctcaggatctacatcatgtattcacaaagtttgctcatcctcaaagtggaggaaaccgagggtttaatggtagtggtcttggccttgccatatgcaagaggtaaacgagagccctggaaataacaggaattaattcaggaaagtacacgagcaagcacccgaggtcaatgagcttacctccattgacaatggagataggaaggaatatcatgaagagaaatgaaagctgattgcaggagagattaaaatcaaagggattgagctacaggagagttgcagtctgtcgttcttttccatggtagtaggcattttcattgggttcatacatttattctctgtcgatgtttacaagaaaatagtatctaaaaacaagatgtctctgttccatgagggtgtgattgagactgaaacgatgggtaccagagtgaaggagtcgaagacagttttagtagagaaagagctcgaactgatcgacgagcctcagattcaagagagccctccagttcgtgcattgttgcatgatgaggtggattttgctgaatcgtcacttgctattagagaatctgacattcccgtgaagaaggtgctgataatcgtgacaatcacttttgtttggccacaacagccatattacttgaagcccatgttttgaaagctgtattggcacttcttctatggttagtggtggaatagcccgaacagtcctatgaaacagcaaaaaatctgttacagtccacttaggtggaagaggtagtttgtagatgattttgttttaatatatgaactgtaatagtaaggttacaataaattttcacataggtgatcaaacttctgtttgtgtaaagccaacagatggtctgacctgacatgtgtttttccaggagtcactacttatagaaaaagcttgttcctagaggtggtttctcccggcaatgcagaatcttgaagcacgtctaaagtggcttgatgatagttctaaatttcaactccctgtcattaccaggtgccagataggctgctggtcgattccatcctgaacaagttgcgccaaagattacatgaatattgcgtgccgagatctgtcttcagtaatgcgatgccatcctgaacaagttgcagcgacaattaggataggattttcccacgctttttagtcttgtgtattccttttatgctcttcatctttttttctcattatatccaccaattagatagtcatgtagactttcttttaggcgcttttgttttttatactttgtgttaccttgcttttgttttcatactttgtgttaccttacagatgtaaaaacgctcccctcccgtacattgcactatttatgaggaaaggtaaaatagcgtcatttagcttttt

SEQ ID NO: 82123 - DNA, 3070 bp, Zea Mays
cgtgcacagggtggacgttctgcccccgacatcctccccttagctccgctccctgaagccgtgatcgaagccgccatcaacgccctccaccccctccgcgcgcggcagcggcagccggcatttccagcccctaaaatcctatttccctctcccacaccaggcgccgcgcccgtctgattccgcccgccagccacgcccgcagatctcgcttcggcgccctgattccgtcgtatgcaaggtcacagccctgccttccatcgtcgcccccatgccacgctccccttccatcctcgctcacttccagccgcccccattcccagttgaaggagtcgtccaggaaccaggaaccccatcaccggatcaggagcagctgtgtcgcgagcatggtcgttgctgagctcccgatgaccgcccgatggtgtcggaccccgcaccgccgtcggcaccgcgctactcggcgtactcgctgccgtcgacccacctccccggagaggacatcctcttctgcatcgacgtcgacctcgaggtccacgccaagatgaagtccgctgccgtagcgtcctcggatccacgtccaccgcgtcgccgcagtccgtaggagctgatggtgccccgacggtggggagcatcgagccatggctcaagtgcaaggatcagcccccgcagcagggcaaggagatcccgcagaccaaggccgaccgggccaagctcgatggcatgtacaagtgcatcctctgcgcctgctgctccacctcctgcccgtcctactggtggaacccagaggagtacctcggcccagccacgctgttccacgccaacaggtgaacagggcttcagcagggacgctggtttagcaatggaggcgatccattccttgtctgcttcaaaatcaagttatccaatggttgatctcacccaactcttcaaacaacaaaatatctccttatgtgtgactgaatttttcatgcactctggttttggatccatccattatgttcctcataatgaagtatttcatgcttattcagtagcaaaagacgatattttttcttgaaaatcctcttaattaacacgtgcattttcttgtatgaatcgttacctattccttttaatcatgtatcttggtaattaattgcatttgcatcattaaacctggcttgactcttgtgttgcttgatagttcatttgttttgtctataaactatgtgggcgtcagctctgtataggtccatgtacaattttccaattcttcctatcaagtttacaaaaacaggtggggcctgtccagctgtacctgactatgatttggggtgggtggggtctgaatctttttctttgttcttataatctcatggtgtagaatttctgctggttgggcctgatgacatttggaatctgattacttctttacaccattgtgacattagttgactgtcatttgttgctttttatttgagttgcctggattgaattagtctcaggacagacataggataggacctaagatcgcattagcaaaagctaaaatggtctaggattagaagtgttataccaaatcttccatgaactccagatagcccagagtcttttataatgccacacacaaagctttcatgtgttggaaaaaaatcataggtcaaccgaactaagttatcacaacatttactcaaaccatatcagaaggcacatatgcttacataaatttcattttagttgataccaccggtcctgggtttcatgcttacaactagaaaagggttctattttttcagattatgaacataccatggaaacatgaagcagggttttacttttatatatgctagcaattgttatctgttgtgttgctttacatttctgttacttactcttttgcaggtaaaatatacagactgtggagttagtcctcaggatctacatcatgtattcacaaagtttgctcatcctcaaagtggaggaaaccgagggtttaatggtagtggtcttggccttgccatatgcaagaggtaaacgagagccctggaaataacaggaattaattcaggaaagtacacgagcaagcacccgaggtcaatgagcttacctccattgacaatggagataggaaggaatatcatgaagagaaatgaaaggaccatataattccaagaccctgatgatggccacaactgcttatattgatgattcctactcggagattattgatcctctaaagactgagctgattgcaggagagattaaaatcaaagggattgagctacaggagagttgcagtctgtcgttcttttccatgggtgtgattgagactgaaacgatgggtaccagagtgaaggagtcgaagacagttttagtagagaaagagctcgaactgatcgacgagcctcagattcaagagagccctccagttcgtgcattgttgcatgatgaggtggattttgctgaatcgtcacttgctattagagaatctgacattcccgtgaagaaggtgctgataatcgtgacaatcacttttgtttggccacaacagccatattacttgaagcccatgttttgaaagctgtattggcacttcttctatggagtcactacttatagaaaaagcttgttcctagaggtggtttctcccggcaatgcagaatcttgaagcacgtctaaagtggcttgatgatagttctaaatttcaactccctgtcattaccaggtgccagataggctgctggtcgattccatcctgaacaagttgcgccaaagattacatgaatattgcgtgccgagatctgtcttcagtaatgcgatgccatcctgaacaagttgcagcgacaattaggataggattttcccacgctttttagtcttgtgtattccttttatgctcttcatctttttttctcattatatccaccaattagatagtcatgtagactttcttttaggcgcttttgttttttatactttgtgttaccttgcttttgttttcatactttgtgttaccttacagatgtaaaaacgctcccctcccgtacattgcactatttatgaggaaaggtaaaatagcgtcatttagcttttt

SEQ ID NO: 82124 - DNA, 3177 bp, Zea Mays
cgtgcacagggtggacgttctgcccccgacatcctccccttagctccgctccctgaagccgtgatcgaagccgccatcaacgccctccaccccctccgcgcgcggcagcggcagccggcatttccagcccctaaaatcctatttccctctcccacaccaggcgccgcgcccgtctgattccgcccgccagccacgcccgcagatctcgcttcggcgccctgattccgtcgtatgcaaggtcacagccctgccttccatcgtcgcccccatgccacgctccccttccatcctcgctcacttccagccgcccccattcccagttgaaggagtcgtccaggaaccaggaaccccatcaccggatcaggagcagctgtgtcgcgagcatggtcgttgctgagctcccgatgaccgcccgatggtgtcggaccccgcaccgccgtcggcaccgcgctactcggcgtactcgctgccgtcgacccacctccccggagaggacatcctcttctgcatcgacgtcgacctcgaggtccacgccaagatgaagtccgctgccgtagcgtcctcggatccacgtccaccgcgtcgccgcagtccgtaggagctgatggtgccccgacggtggggagcatcgagccatggctcaagtgcaaggatcagcccccgcagcagggcaaggagatcccgcagaccaaggccgaccgggccaagctcgatggcatgtacaagtgcatcctctgcgcctgctgctccacctcctgcccgtcctactggtggaacccagaggagtacctcggcccagccacgctgttccacgccaacaggtgaacagggcttcagcagggacgctggtttagcaatggaggcgatccattccttgtctgcttcaaaatcaagttatccaatggttgatctcacccaactcttcaaacaacaaaatatctccttatgtgtgactgaatttttcatgcactctggttttggatccatccattatgttcctcataatgaagtatttcatgcttattcagtagcaaaagacgatattttttcttgaaaatcctcttaattaacacgtgcattttcttgtatgaatcgttacctattccttttaatcatgtatcttggtaattaattgcatttgcatcattaaacctggcttgactcttgtgttgcttgatagttcatttgttttgtctataaactatgtgggcgtcagctctgtataggtccatgtacaattttccaattcttcctatcaagtttacaaaaacaggtggggcctgtccagctgtacctgactatgatttggggtgggtggggtctgaatctttttctttgttcttataatctcatggtgtagaatttctgctggttgggcctgatgacatttggaatctgattacttctttacaccattgtgacattagttgactgtcatttgttgctttttatttgagttgcctggattgaattagtctcaggacagacataggataggacctaagatcgcattagcaaaagctaaaatggtctaggattagaagtgttataccaaatcttccatgaactccagatagcccagagtcttttataatgccacacacaaagctttcatgtgttggaaaaaaatcataggtcaaccgaactaagttatcacaacatttactcaaaccatatcagaaggcacatatgcttacataaatttcattttagttgataccaccggtcctgggtttcatgcttacaactagaaaagggttctattttttcagattatgaacataccatggaaacatgaagcagggttttacttttatatatgctagcaattgttatctgttgtgttgctttacatttctgttacttactcttttgcaggtaaaatatacagactgtggagttagtcctcaggatctacatcatgtattcacaaagtttgctcatcctcaaagtggaggaaaccgagggtttaatggtagtggtcttggccttgccatatgcaagagccatcccggtttctaggattccatgtcgtcccatgagaatataacgaaggaaacaagaagcacattatagaagtagcaagatcacagtacatatcagcatgacattcatgaagccatcccggtaaacgagagccctggaaataacaggaattaattcaggaaagtacacgagcaagcacccgaggtcaatgagcttacctccattgacaatggagataggaaggaatatcatgaagagaaatgaaaggaccatataattccaagaccctgatgatggccacaactgcttatattgatgattcctactcggagattattgatcctctaaagactgagctgattgcaggagagattaaaatcaaagggattgagctacaggagagttgcagtctgtcgttcttttccatgggtgtgattgagactgaaacgatgggtaccagagtgaaggagtcgaagacagttttagtagagaaagagctcgaactgatcgacgagcctcagattcaagagagccctccagttcgtgcattgttgcatgatgaggtggattttgctgaatcgtcacttgctattagagaatctgacattcccgtgaagaaggtgctgataatcgtgacaatcacttttgtttggccacaacagccatattacttgaagcccatgttttgaaagctgtattggcacttcttctatggttagtggtggaatagcccgaacagtcctatgaaacagcaaaaaatctgttacagtccacttaggtggaagaggagtcactacttatagaaaaagcttgttcctagaggtgccagataggctgctggtcgattccatcctgaacaagttgcgccaaagattacatgaatattgcgtgccgagatctgtcttcagtaatgcgatgccatcctgaacaagttgcagcgacaattaggataggattttcccacgctttttagtcttgtgtattccttttatgctcttcatctttttttctcattatatccaccaattagatagtcatgtagactttcttttaggcgcttttgttttttatactttgtgttaccttgcttttgttttcatactttgtgttaccttacagatgtaaaaacgctcccctcccgtacattgcactatttatgaggaaaggtaaaatagcgtcatttagcttttt

SEQ ID NO: 82125 - DNA, 3796 bp, Zea Mays
cgtgcacagggtggacgttctgcccccgacatcctccccttagctccgctccctgaagccgtgatcgaagccgccatcaacgccctccaccccctccgcgcgcggcagcggcagccggcatttccagcccctaaaatcctatttccctctcccacaccaggcgccgcgcccgtctgattccgcccgccagccacgcccgcagatctcgcttcggcgccctgattccgtcgtatgcaaggtcacagccctgccttccatcgtcgcccccatgccacgctccccttccatcctcgctcacttccagccgcccccattcccagttgaaggagtcgtccaggaaccaggaaccccatcaccggatcaggagcagctgtgtcgcgagcatggtcgttgctgagctcccgatgaccgcccgatggtgtcggaccccgcaccgccgtcggcaccgcgctactcggcgtactcgctgccgtcgacccacctccccggagaggacatcctcttctgcatcgacgtcgacctcgaggtccacgccaagatgaagtccgctgccgtagcgtcctcggatccacgtccaccgcgtcgccgcagtccgtaggagctgatggtgccccgacggtggggagcatcgagccatggctcaagtgcaaggatcagcccccgcagcagggcaaggagatcccgcagaccaaggccgaccgggccaagctcgatggcatgtacaagtgcatcctctgcgcctgctgctccacctcctgcccgtcctactggtggaacccagaggagtacctcggcccagccacgctgttccacgccaacaggtgaacagggcttcagcagggacgctggtttagcaatggaggcgatccattccttgtctgcttcaaaatcaagttatccaatggttgatctcacccaactcttcaaacaacaaaatatctccttatgtgtgactgaatttttcatgcactctggttttggatccatccattatgttcctcataatgaagtatttcatgcttattcagtagcaaaagacgatattttttcttgaaaatcctcttaattaacacgtgcattttcttgtatgaatcgttacctattccttttaatcatgtatcttggtaattaattgcatttgcatcattaaacctggcttgactcttgtgttgcttgatagttcatttgttttgtctataaactatgtgggcgtcagctctgtataggtccatgtacaattttccaattcttcctatcaagtttacaaaaacaggtggggcctgtccagctgtacctgactatgatttggggtgggtggggtctgaatctttttctttgttcttataatctcatggtgtagaatttctgctggttgggcctgatgacatttggaatctgattacttctttacaccattgtgacattagttgactgtcatttgttgctttttatttgagttgcctggattgaattagtctcaggacagacataggataggacctaagatcgcattagcaaaagctaaaatggtctaggattagaagtgttataccaaatcttccatgaactccagatagcccagagtcttttataatgccacacacaaagctttcatgtgttggaaaaaaatcataggtcaaccgaactaagttatcacaacatttactcaaaccatatcagaaggcacatatgcttacataaatttcattttagttgataccaccggtcctgggtttcatgcttacaactagaaaagggttctattttttcagattatgaacataccatggaaacatgaagcagggttttacttttatatatgctagcaattgttatctgttgtgttgctttacatttctgttacttactcttttgcaggtaaaatatacagactgtggagttagtcctcaggatctacatcatgtattcacaaagtttgctcatcctcaaagtggaggaaaccgagggtttaatggtagtggtcttggccttgccatatgcaagagccatcccggtttctaggattccatgtcgtcccatgagaatataacgaaggaaacaagaagcacattatagaagtagcaagatcacagtacatatcagcatgacattcatgaagccatcccggtttctaggattcttgttttgctctgtccatggcacgccaccaacattcatccctaaaactgacatttttttgcaacataaatcaggtaaacgagagccctggaaataacaggaattaattcaggaaagtacacgagcaagcacccgaggtcaatgagcttacctccattgacaatggagataggaaggaatatcatgaagagaaatgaaaggaccatataattccaagaccctgatgatggccacaactgcttatattgatgattcctactcggagattattgatcctctaaagactgaggtgctgtatgttgttgaactccctggtgaccatacttagcacccaccaaaaccgaatgtggtggtgtctagcagtgtgtgcaaacttctagaatatccagtctgcttgaatgccatgtatcctattcatcagctgcacattcatactgatccatttggcatgtttatatctaaaaccctgttcaaatgtagtcgattggatgaaaattatggctttactggtttcagcgttcctttcaatatcatgtactgttatcaccattttattctgatccgtttcaatttctatggacgtttagtacataatgtttataaaccttaacttttttactcttttttcttttttgattagctacgatacagtgcagaataatatgttctgcttttttattcaactattcaaatcttattttttattcaactattcaaatcatattttttgattagctgattgcaggagagattaaaatcaaagggattgagctacaggagagttgcagtctgtcgttcttttccatgggtgtgattgagactgaaacgatgggtaccagagtgaaggagtcgaagacagttttagtagagaaagagctcgaactgatcgacgagcctcagattcaagagagccctccagttcgtgcattgttgcatgatgaggtggattttgctgaatcgtcacttgctattagagaatctgacattcccgtgaagaaggtgctgataatcgtgacaatcacttttgtttggccacaacagccatattacttgaagcccatgttttgaaagctgtattggcacttcttctatggttagtggtggaatagcccgaacagtcctatgaaacagcaaaaaatctgttacagtccacttaggtggaagaggagtcactacttatagaaaaagcttgttcctagaggtggtttctcccggcaatgcagaatcttgaagcacgtctaaagtggcttgatgatagttctaaatttcaactccctgtcattaccaggtgccagataggctgctggtcgattccatcctgaacaagttgcgccaaagattacatgaatattgcgtgccgagatctgtcttcagtaatgcgatgccatcctgaacaagttgcagcgacaattaggataggattttcccacgctttttagtcttgtgtattccttttatgctcttcatctttttttctcattatatccaccaattagatagtcatgtagactttcttttaggcgcttttgttttttatactttgtgttaccttgcttttgttttcatactttgtgttaccttacagatgtaaaaacgctcccctcccgtacattgcactatttatgaggaaaggtaaaatagcgtcatttagcttttt

SEQ ID NO: 82126 - DNA, 3090 bp, Zea Mays
cgtgcacagggtggacgttctgcccccgacatcctccccttagctccgctccctgaagccgtgatcgaagccgccatcaacgccctccaccccctccgcgcgcggcagcggcagccggcatttccagcccctaaaatcctatttccctctcccacaccaggcgccgcgcccgtctgattccgcccgccagccacgcccgcagatctcgcttcggcgccctgattccgtcgtatgcaaggtcacagccctgccttccatcgtcgcccccatgccacgctccccttccatcctcgctcacttccagccgcccccattcccagttgaaggagtcgtccaggaaccaggaaccccatcaccggatcaggagcagctgtgtcgcgagcatggtcgttgctgagctcccgatgaccgcccgatggtgtcggaccccgcaccgccgtcggcaccgcgctactcggcgtactcgctgccgtcgacccacctccccggagaggacatcctcttctgcatcgacgtcgacctcgaggtccacgccaagatgaagtccgctgccgtagcgtcctcggatccacgtccaccgcgtcgccgcagtccgtaggagctgatggtgccccgacggtggggagcatcgagccatggctcaagtgcaaggatcagcccccgcagcagggcaaggagatcccgcagaccaaggccgaccgggccaagctcgatggcatgtacaagtgcatcctctgcgcctgctgctccacctcctgcccgtcctactggtggaacccagaggagtacctcggcccagccacgctgttccacgccaacaggtgaacagggcttcagcagggacgctggtttagcaatggaggcgatccattccttgtctgcttcaaaatcaagttatccaatggttgatctcacccaactcttcaaacaacaaaatatctccttatgtgtgactgaatttttcatgcactctggttttggatccatccattatgttcctcataatgaagtatttcatgcttattcagtagcaaaagacgatattttttcttgaaaatcctcttaattaacacgtgcattttcttgtatgaatcgttacctattccttttaatcatgtatcttggtaattaattgcatttgcatcattaaacctggcttgactcttgtgttgcttgatagttcatttgttttgtctataaactatgtgggcgtcagctctgtataggtccatgtacaattttccaattcttcctatcaagtttacaaaaacaggtggggcctgtccagctgtacctgactatgatttggggtgggtggggtctgaatctttttctttgttcttataatctcatggtgtagaatttctgctggttgggcctgatgacatttggaatctgattacttctttacaccattgtgacattagttgactgtcatttgttgctttttatttgagttgcctggattgaattagtctcaggacagacataggataggacctaagatcgcattagcaaaagctaaaatggtctaggattagaagtgttataccaaatcttccatgaactccagatagcccagagtcttttataatgccacacacaaagctttcatgtgttggaaaaaaatcataggtcaaccgaactaagttatcacaacatttactcaaaccatatcagaaggcacatatgcttacataaatttcattttagttgataccaccggtcctgggtttcatgcttacaactagaaaagggttctattttttcagattatgaacataccatggaaacatgaagcagggttttacttttatatatgctagcaattgttatctgttgtgttgctttacatttctgttacttactcttttgcaggtaaaatatacagactgtggagttagtcctcaggatctacatcatgtattcacaaagtttgctcatcctcaaagtggaggaaaccgagggtttaatggtagtggtcttggccttgccatatgcaagaggtaaacgagagccctggaaataacaggaattaattcaggaaagtacacgagcaagcacccgaggtcaatgagcttacctccattgacaatggagataggaaggaatatcatgaagagaaatgaaagctgattgcaggagagattaaaatcaaagggattgagctacaggagagttgcagtctgtcgttcttttccatgggtgtgattgagactgaaacgatgggtaccagagtgaaggagtcgaagacagttttagtagagaaagagctcgaactgatcgacgagcctcagattcaagagagccctccagttcgtgcattgttgcatgatgaggtggattttgctgaatcgtcacttgctattagagaatctgacattcccgtgaagaaggtgctgataatcgtgacaatcacttttgtttggccacaacagccatattacttgaagcccatgttttgaaagctgtattggcacttcttctatggttagtggtggaatagcccgaacagtcctatgaaacagcaaaaaatctgttacagtccacttaggtggaagagccaacagatggtctgacctgacatgtgtttttccaggagtcactacttatagaaaaagcttgttcctagaggtggtttctcccggcaatgcagaatcttgaagcacgtctaaagtggcttgatgatagttctaaatttcaactccctgtcattaccaggtgccagataggctgctggtcgattccatcctgaacaagttgcgccaaagattacatgaatattgcgtgccgagatctgtcttcagtaatgcgatgccatcctgaacaagttgcagcgacaattaggataggattttcccacgctttttagtcttgtgtattccttttatgctcttcatctttttttctcattatatccaccaattagatagtcatgtagactttcttttaggcgcttttgttttttatactttgtgttaccttgcttttgttttcatactttgtgttaccttacagatgtaaaaacgctcccctcccgtacattgcactatttatgaggaaaggtaaaatagcgtcatttagcttttt

SEQ ID NO: 82127 - DNA, 2827 bp, Zea Mays
ctctcgcttctgttcccctatcgtcggcctccacaagcgccacgtctcgcgccctcgtccgctccccgccgatgagctgccgcgcggcgccgtggagtcgcccgtcgcacattgctggtccgcgtgtgcccaccccggcgcggccgcgcttcgcacttggaagtaggaatctgtggaagaactcatggacaattggtgctggtgtttcaaatatgtttgcgctgccatcaacactgtttaggtgcatggcttcaagtggctctggtgatggtgattttgctcggtctacattgactgacgaagcagcaccatttccattatactcttggccagataagcagagaccacgagtgtgcattttaggtggtgggtttggtggcctgtacaccgctttaagacttgaatctcttgtgtggcccaatgataagaggcctcaggttcttctggttgatcaatctgataaatttgtatttaaacccatgttgtacgagctattgtcaggagaagtggatatctgggagatagctccatcttttacagagttgctgaaaaacactagtgttcaatttgtgagagacagtgtaaagcttctgcgcccttctgatcacttaagaagaaaacctggagaaccatgcactggtggagttgttcatctggaaagtggcactgtcattgaatatgattggctcgttctagctttaggggctgaagctaaaattgatgttgttcccggttctgctgaatatgcgcttcctttcacgacattagaggatgccttgagggttgaaagcaagttgaaaatgctagagaggaaaaggtttggtaagagttcccctactattgaggtggcaattgtgggattgggctattccggtgttgaattagctgcgactatatctgagagattaaaaaacactgggactgtaaaggcaataaatgttcaaacaaccgtatgtcccactgctccacaaggaaatcgtgacgctgctctgaaggttcttgagtctcggaatattcagcttttcttgggatattttgtgagctgcatcaaagaggctcctacatctgatgagtcaagtagcacagttacatactctgaagttgacggtgatcataggaaactaattttggaccttcaacctgctgaaagaggcctcaaagggcagaccctcgatgccgatttggtgctgtggacagtgggttcaacatctcagattccacggttacagcctcctgatgctccctatgttattcctctgaatggtcgaggacaggtggagacagaggaaacccttcaagtaaaaggccatccccggacatttgcgattggcgattcagcagctctaagggatccatcaggcaaactcctcccggccactgcacaggttgccttccaacaagcagattttgctggatggaatctctgggcggcaataaatgaccggcctctcctgccgttcaggttccagaacctcggcgagatgatgacgctcggtagaaatgatgccgcggtaacagcaagtttcattgaagggctgaccttggaaggacctctcggacatgccgctcggaagctcgtgtactgcctcagaatgcccacggatgagcaccgggtgaaggttgggatcagctggttcacaaaggctgcgatcgattcgcttgcctccgtgcaaaacgcggtagccagctcgtttcctcccccaacccaaatgggcgactccaccgccaccaacccctcctcgccgaccgcagccatggatcccgactccgaggtcgtcttcgacttcccgccctacctctgccagtacaagagcggccgcatccaccgccccggcggcgcccccaccgtcccagctggcacggacccagccaccggcgtcgtgtccaaggacatccgcgccggccccgcctccgcgcgagtctacctccctcccggcgcagccggcaagatcccggtggtcgtctacttccacggcggcgggttcgtggtcggctcgccggcgcggccgggcacgcacaactacctcaacgacctggtcgcccgctcgggcgccatcggcgtgtccgtctactaccgcctcgcgccggagcacaagctgcccgcggcgtacgacgacgcgtgggcggcgctacggtgggcggcgacgctcggcggcggcgaggacccgtggctgctggagcacgccgacctgtcccgcgtgttcctggcgggctgcagcgccggcgccaacatcgcgcacaacacggccgtgcgggcctccgccgccggcgcgctccccgacggcgtgaccatccgcgggctcgccgtggtgcacccctacttcacgggcagcgaggccgtgggcggcgagatagccttcggccccgagatccggccgttcatggaccgcacctggcggttcgtggtctccgacacggtggggctggacgacccgcgcgtgaacccgttcgtggacgacgcggcgcgcagggcctccgcggggatcccgtgccagcgcgtgctggtgtgcgtggccgagaacgacttcctgctcaaggagcgcgcgctgtggtaccaccgggagatcaaggccagcgggtacgctggcgaggtcgagctgttcgagtctaagggcgtcggccacgcgttccatttcgacatgctggactcggagcagggcgtccagctccaggagcggatcgtggctttcatcaacaaatgagcaccaccgagatgatgaataagagttttttatgctattttaaatatatcatttggatacttcaattgtaatagtacaccgaaagttgttcgattcccgatcccgaaataatatattcgttctgt

SEQ ID NO: 82128 - DNA, 2827 bp, Zea Mays
ctctcgcttctgttcccctatcgtcggcctccacaagcgccacgtctcgcgccctcgtccgctccccgccgatgagctgccgcgcggcgccgtggagtcgcccgtcgcacattgctggtccgcgtgtgcccaccccggcgcggccgcgcttcgcacttggaagtaggaatctgtggaagaactcatggacaattggtgctggtgtttcaaatatgtttgcgctgccatcaacactgtttaggtgcatggcttcaagtggctctggtgatggtgattttgctcggtctacattgactgacgaagcagcaccatttccattatactcttggccagataagcagagaccacgagtgtgcattttaggtggtgggtttggtggcctgtacaccgctttaagacttgaatctcttgtgtggcccaatgataagaggcctcaggttcttctggttgatcaatctgataaatttgtatttaaacccatgttgtacgagctattgtcaggagaagtggatatctgggagatagctccatcttttacagagttgctgaaaaacactagtgttcaatttgtgagagacagtgtaaagcttctgcgcccttctgatcacttaagaagaaaacctggagaaccatgcactggtggagttgttcatctggaaagtggcactgtcattgaatatgattggctcgttctagctttaggggctgaagctaaaattgatgttgttcccggttctgctgaatatgcgcttcctttcacgacattagaggatgccttgagggttgaaagcaagttgaaaatgctagagaggaaaaggtttggtaagagttcccctactattgaggtggcaattgtgggattgggctattccggtgttgaattagctgcgactatatctgagagattaaaaaacactgggactgtaaaggcaataaatgttcaaacaaccgtatgtcccactgctccacaaggaaatcgtgacgctgctctgaaggttcttgagtctcggaatattcagcttttcttgggatattttgtgagctgcatcaaagaggctcctacatctgatgagtcaagtagcacagttacatactctgaagttgacggtgatcataggaaactaattttggaccttcaacctgctgaaagaggcctcaaagggcagaccctcgatgccgatttggtgctgtggacagtgggttcaacatctcagattccacggttacagcctcctgatgctccctatgttattcctctgaatggtcgaggacaggtggagacagaggaaacccttcaagtaaaaggccatccccggacatttgcgattggcgattcagcagctctaagggatccatcaggcaaactcctcccggccactgcacaggttgccttccaacaagcagattttgctggatggaatctctgggcggcaataaatgaccggcctctcctgccgttcaggttccagaacctcggcgagatgatgacgctcggtagaaatgatgccgcggtaacagcaagtttcattgaagggctgaccttggaaggacctctcggacatgccgctcggaagctcgtgtactgcctcagaatgcccacggatgagcaccgggtgaaggttgggatcagctggttcacaaaggctgcgatcgattcgcttgcctccgtgcaaaacgcggtaaccagctcgtttcctcccccaacccaaatgggcgactccaccgccaccaacccctcctcgccgaccgcagccatggatcccgactccgaggtcgtcttcgacttcccgccctacctctgccagtacaagagcggccgcatccaccgccccggcggcgcccccaccgtcccagctggcacggacccagccaccggcgtcgtgtccaaggacatccgcgccggccccgcctccgcgcgagtctacctccctcccggcgcagccggcaagatcccggtggtcgtctacttccacggcggcgggttcgtggtcggctcgccggcgcggccgggcacgcacaactacctcaacgacctggtcgcccgctcgggcgccatcggcgtgtccgtctactaccgcctcgcgccggagcacaagctgcccgcggcgtacgacgacgcgtgggcggcgctacggtgggcggcgacgctcggcggcggcgaggacccgtggctgctggagcacgccgacctgtcccgcgtgttcctggcgggctgcagcgccggcgccaacatcgcgcacaacacggccgtgcgggcctccgccgccggcgcgctccccgacggcgtgaccatccgcgggctcgccgtggtgcacccctacttcacgggcagcgaggccgtgggcggcgagatagccttcggccccgagatccggccgttcatggaccgcacctggcggttcgtggtctccgacacggtggggctggacgacccgcgcgtgaacccgttcgtggacgacgcggcgcgcagggcctccgcggggatcccgtgccagcgcgtgctggtgtgcgtggccgagaacgacttcctgctcaaggagcgcgcgctgtggtaccaccgggagatcaaggccagcgggtacgctggcgaggtcgagctgttcgagtctaagggcgtcggccacgcgttccatttcgacatgctggactcggagcagggcgtccagctccaggagcggatcgtggctttcatcaacaaatgagcaccaccgagatgatgaataagagttttttatgctattttaaatatatcatttggatacttcaattgtaatagtacaccgaaagttgttcgattcccgatcccgaaataatatattcgttctgt

SEQ ID NO: 82129 - DNA, 2831 bp, Zea Mays
ctctcgcttctgttcccctatcgtcggcctccacaagcgccacgtctcgcgccctcgtccgctccccgccgatgagctgccgcgcggcgccgtggagtcgcccgtcgcacattgctggtccgcgtgtgcccaccccggcgcggccgcgcttcgcacttggaagtaggaatctgtggaagaactcatggacaattggtgctggtgtttcaaatatgtttgcgctgccatcaacactgtttaggtgcatggcttcaagtggctctggtgatggtgattttgctcggtctacattgactgacgaagcagcaccatttccattatactcttggccagataagcagagaccacgagtgtgcattttaggtggtgggtttggtggcctgtacaccgctttaagacttgaatctcttgtgtggcccaatgataagaggcctcaggttcttctggttgatcaatctgataaatttgtatttaaacccatgttgtacgagctattgtcaggagaagtggatatctgggagatagctccatcttttacagagttgctgaaaaacactagtgttcaatttgtgagagacagtgtaaagcttctgcgcccttctgatcacttaagaagaaaacctggagaaccatgcactggtggagttgttcatctggaaagtggcactgtcattgaatatgattgccaggctcgttctagctttaggggctgaagctaaaattgatgttgttcccggttctgctgaatatgcgcttcctttcacgacattagaggatgccttgagggttgaaagcaagttgaaaatgctagagaggaaaaggtttggtaagagttcccctactattgaggtggcaattgtgggattgggctattccggtgttgaattagctgcgactatatctgagagattaaaaaacactgggactgtaaaggcaataaatgttcaaacaaccgtatgtcccactgctccacaaggaaatcgtgacgctgctctgaaggttcttgagtctcggaatattcagcttttcttgggatattttgtgagctgcatcaaagaggctcctacatctgatgagtcaagtagcacagttacatactctgaagttgacggtgatcataggaaactaattttggaccttcaacctgctgaaagaggcctcaaagggcagaccctcgatgccgatttggtgctgtggacagtgggttcaacatctcagattccacggttacagcctcctgatgctccctatgttattcctctgaatggtcgaggacaggtggagacagaggaaacccttcaagtaaaaggccatccccggacatttgcgattggcgattcagcagctctaagggatccatcaggcaaactcctcccggccactgcacaggttgccttccaacaagcagattttgctggatggaatctctgggcggcaataaatgaccggcctctcctgccgttcaggttccagaacctcggcgagatgatgacgctcggtagaaatgatgccgcggtaacagcaagtttcattgaagggctgaccttggaaggacctctcggacatgccgctcggaagctcgtgtactgcctcagaatgcccacggatgagcaccgggtgaaggttgggatcagctggttcacaaaggctgcgatcgattcgcttgcctccgtgcaaaacgcggtagccagctcgtttcctcccccaacccaaatgggcgactccaccgccaccaacccctcctcgccgaccgcagccatggatcccgactccgaggtcgtcttcgacttcccgccctacctctgccagtacaagagcggccgcatccaccgccccggcggcgcccccaccgtcccagctggcacggacccagccaccggcgtcgtgtccaaggacatccgcgccggccccgcctccgcgcgagtctacctccctcccggcgcagccggcaagatcccggtggtcgtctacttccacggcggcgggttcgtggtcggctcgccggcgcggccgggcacgcacaactacctcaacgacctggtcgcccgctcgggcgccatcggcgtgtccgtctactaccgcctcgcgccggagcacaagctgcccgcggcgtacgacgacgcgtgggcggcgctacggtgggcggcgacgctcggcggcggcgaggacccgtggctgctggagcacgccgacctgtcccgcgtgttcctggcgggctgcagcgccggcgccaacatcgcgcacaacacggccgtgcgggcctccgccgccggcgcgctccccgacggcgtgaccatccgcgggctcgccgtggtgcacccctacttcacgggcagcgaggccgtgggcggcgagatagccttcggccccgagatccggccgttcatggaccgcacctggcggttcgtggtctccgacacggtggggctggacgacccgcgcgtgaacccgttcgtggacgacgcggcgcgcagggcctccgcggggatcccgtgccagcgcgtgctggtgtgcgtggccgagaacgacttcctgctcaaggagcgcgcgctgtggtaccaccgggagatcaaggccagcgggtacgctggcgaggtcgagctgttcgagtctaagggcgtcggccacgcgttccatttcgacatgctggactcggagcagggcgtccagctccaggagcggatcgtggctttcatcaacaaatgagcaccaccgagatgatgaataagagttttttatgctattttaaatatatcatttggatacttcaattgtaatagtacaccgaaagttgttcgattcccgatcccgaaataatatattcgttctgt

SEQ ID NO: 82130 - DNA, 2913 bp, Zea Mays
gtcctctcgcttctgttcccctatcgtcggcctccacaagcgccacgtctcgcgccctcgtccgctccccgccgatgagctgccgcgcggcgccgtggagtcgcccgtcgcacattgctggtccgcgtgtgcccaccccggcgcggccgcgcttcgcacttggaagtaggaatctgtggaagaactcatggacaattggtgctggtgtttcaaatatgtttgcgctgccatcaacactgtttaggtgcatggcttcaagtggctctggtgatggtgattttgctcggtctacattgactgacgaagcagcaccatttccattatactcttggccagataagcagagaccacgagtgtgcattttaggtggtgggtttggtggcctgtacaccgctttaagacttgaatctcttgtgtggcccaatgataagaggcctcaggttcttctggttgatcaatctgataaatttgtatttaaacccatgttgtacgagctattgtcaggagaagtggatatctgggagatagctccatcttttacagagttgctgaaaaacactagtgttcaatttgtgagagacagtgtaaagcttctgcgcccttctgatcacttaagaagaaaacctggagaaccatgcactggtggagttgttcatctggaaagtggcactgtcattgaatatgattgccaggctcgttctagctttaggggctgaagctaaaattgatgttgttcccggttctgctgaatatgcgcttcctttcacgacattagaggatgccttgagggttgaaagcaagttgaaaatgctagagaggaaaaggtttggtaagagttcccctactattgaggtggcaattgtgggattgggctattccggtgttgaattagctgcgactatatctgagagattaaaaaacactgggactgtaaaggcaataaatgttcaaacaaccgtatgtcccactgctccacaaggaaatcgtgacgctgctctgaaggttcttgagtctcggaatattcagcttttcttgggatattttgtgagctgcatcaaagaggctcctacatctgatgagtcaagtagcacagttacatactctgaagttgacggtgatcataggaaactaattttggaccttcaacctgctgaaagaggcctcaaagggcagaccctcgatgccgatttggtgctgtggacagtgggttcaacatctcagattccacggttacagcctcctgatgctccctatgttattcctctgaatggtcgaggacaggtggagacagaggaaacccttcaagtaaaaggccatccccggacatttgcgattggcgattcagcagctctaagggatccatcaggcaaactcctcccggccactgcacaggttgccttccaacaagcagattttgctggatggaatctctgggcggcaataaatgaccggcctctcctgccgttcaggttccagaacctcggcgagatgatgacgctcggtagaaatgatgccgcggtaacagcaagtttcattgaagggctgaccttggaaggacctctcggacatgccgctcggaagctcgtgtactgcctcagaatgcccacggatgagcaccgggtgaaggttgggatcagctggttcacaaaggctgcgatcgattcgcttgcctccgtgcaaaacgcggctgcagcagcgattttcatatatcttcatgaagcccctccggctgaaattcgatcgcctcgctgtgttgcactgctaggtagccagctcgtttcctcccccaacccaaatgggcgactccaccgccaccaacccctcctcgccgaccgcagccatggatcccgactccgaggtcgtcttcgacttcccgccctacctctgccagtacaagagcggccgcatccaccgccccggcggcgcccccaccgtcccagctggcacggacccagccaccggcgtcgtgtccaaggacatccgcgccggccccgcctccgcgcgagtctacctccctcccggcgcagccggcaagatcccggtggtcgtctacttccacggcggcgggttcgtggtcggctcgccggcgcggccgggcacgcacaactacctcaacgacctggtcgcccgctcgggcgccatcggcgtgtccgtctactaccgcctcgcgccggagcacaagctgcccgcggcgtacgacgacgcgtgggcggcgctacggtgggcggcgacgctcggcggcggcgaggacccgtggctgctggagcacgccgacctgtcccgcgtgttcctggcgggctgcagcgccggcgccaacatcgcgcacaacacggccgtgcgggcctccgccgccggcgcgctccccgacggcgtgaccatccgcgggctcgccgtggtgcacccctacttcacgggcagcgaggccgtgggcggcgagatagccttcggccccgagatccggccgttcatggaccgcacctggcggttcgtggtctccgacacggtggggctggacgacccgcgcgtgaacccgttcgtggacgacgcggcgcgcagggcctccgcggggatcccgtgccagcgcgtgctggtgtgcgtggccgagaacgacttcctgctcaaggagcgcgcgctgtggtaccaccgggagatcaaggccagcgggtacgctggcgaggtcgagctgttcgagtctaagggcgtcggccacgcgttccatttcgacatgctggactcggagcagggcgtccagctccaggagcggatcgtggctttcatcaacaaatgagcaccaccgagatgatgaataagagttttttatgctattttaaatatatcatttggatacttcaattgtaatagtacaccgaaagttgttcgattcccgatcccgaaataatatattcgttctgt

SEQ ID NO: 82131 - DNA, 2126 bp, Zea Mays
ctctcgcttctgttcccctatcgtcggcctccacaagcgccacgtctcgcgccctcgtccgctccccgccgatgagctgccgcgcggcgccgtggagtcgcccgtcgcacattgctggtccgcgtgtgcccaccccggcgcggccgcgcttcgcacttggaagtaggaatctgtggaagaactcatggacaattggtgctggtgtttcaaatatgtttgcgctgccatcaacactgtttaggtgcatggcttcaagtggctctggtgatggtgattttgctcggtctacattgactgacgaagcagcaccatttccattatactcttggccagataagcagagaccacgagtgtgcattttaggtggtgggtttggtggcctgtacaccgctttaagacttgaatctcttgtgtggcccaatgataagaggcctcaggttcttctggttgatcaatctgataaatttgtatttaaacccatgttgtacgagctattgtcaggagaagtggatatctgggagatagctccatcttttacagagttgctgaaaaacactagtgttcaatttgtgagagacagtgtaaagcttctgcgcccttctgatcacttaagaagaaaacctggagaaccatgcactggtggagttgttcatctggaaagtggcactgtcattgaatatgattgccaggctcgttctagctttaggggctgaagctaaaattgatgttgttcccggttctgctgaatatgcgcttcctttcacgacattagaggatgccttgagggttgaaagcaagttgaaaatgctagagaggaaaaggtttggtaagagttcccctactattgaggtggcaattgtgggattgggctattccggtgttgaattagctgcgactatatctgagagattaaaaaacactgggactgtaaaggcaataaatgttcaaacaaccgtatgtcccactgctccacaaggaaatcgtgacgctgctctgaaggttcttgagtctcggaatattcagcttttcttgggatattttgtgagctgcatcaaagaggctcctacatctgatgagtcaagtagcacagttacatactctgaagttgacggtgatcataggaaactaattttggaccttcaacctgctgaaagaggcctcaaagggcagaccctcgatgccgatttggtgctgtggacagtgggttcaacatctcagattccacggttacagcctcctgatgctccctatgttattcctctgaatggtcgaggacaggtggagacagaggaaacccttcaagtaaaaggccatccccggacatttgcgattggcgattcagcagctctaagggatccatcaggcaaactcctcccggccactgcacaggttgccttccaacaagcagattttgctggatggaatctctgggcggcaataaatgaccggcctctcctgccgttcaggttccagaacctcggcgagatgatgacgctcggtagaaatgatgccgcggtaacagcaagtttcattgaagggctgaccttggaaggacctctcggacatgccgctcggaagctcgtgtactgcctcagaatgcccacggatgagcaccgggtgaaggttgggatcagctggttcacaaaggctgcgatcgattcgcttgcctccgtgcaaaacgcggtaagtaacacgctcacaggctcatcatgactgtacgggttcttaggtgtatattgcctgcctgaacggaatgaaatggaggacaaatcgatgtccatcttatgtacgtaatcgaggttcttctcgactagtgtgtaccatactttttaatcatgctgctatgttcctacggtacaagagcagtgatgatttatgtaaaaacacgtgtggctatgctgatgactggcgtgaagggcttctagttgggttggttacgtgttttaagtccgggttcagtccgggttcggctttccgtgggatcaaattctatgtcgtggtaaaaaaatctctcatttattctatgccaaagcacaagtttaaagtccgatcgtggtcctgggttacggtgtgctatggtgtcgttgtgtatgaatgaaacaatgatttaggggttttcttggttt

SEQ ID NO: 82132 - DNA, 1572 bp, Zea Mays
ctaagtctaatcctccatccgatcatctacgtatttttctaaactttaaaattgtgtgtgttttttctaaacttcgatttattcgattggaactaaaactaaaccaaaagaacataaactaaaaaaatagtttcgtctatcctgaatacatattgcggttctagtttcatggaaactagaaatttcaaaaaaaaaaactgagaaagctaaccaagccgaatgccaggcggtattcgactattcgcggtgccaaaattttgaaaccgctgccagtgtcagtatttcaaaaatgtccatcccgtacggtcagccgacttgcccctttggcctctgtgttcgtacttcgctcggcagaaacctcttgctccagggggcgaacgcgccgccgcctccgacagccccctccagccgcgtcaaatcagcgccctcctctgctgcgccggcggtctcccgccgcaaagacgaagccccgcactcccttatcgcagatccgtgcccgccgccatgacggagtattgggtgagccaaggaaacaaatggtgcgacttctgtaagatttatatagcaaacaattccttcagcatcaggacacatgaacttggtaagcgccacaaggacaatgtcaccaaacgactgtcaacaatgcaaaaagagagtgagacaaaggaaaaggaacagcagcaagctgcacgagccctacagcagatagaagcaaaagctaaaaagagttatcaaaaagatttagagaataaccagaggaatgttgatggagacacttctgcagcacctggagatggatgggtgcttgactcggcgtcaggatattaccatgacaaatctactggactttactacgattcaaactctggcttctattattctgacagtttaggcaagtgggttacccaagaagaggcgtacaagtctgtgcaagcttcgaaatcagacgctggccaatcctcagcttcacaaacaaaagctcctgctgccgcagaaacagctgtccccgcgattaaaggaggtgcagctccaggccgggtggtaacgaaaccgttgaacccaatgagaccgattaagggcactcctgctccgtctgctgttgctgttaacaagaggaagagggatgacggcaagcccaaggcggtctccaaggaggaggaagcggccctcaaagcgcgggaagcagcaaggaagagagtggaggatagagagaagccgctgatgggattatacaagacaaggaatgccggtaatggtgtggcactggatttcagagcttttctgcatcagcaatgtgtgtccacacggtgtaatacctcatcagtggttcttgagtgaatcaagttccaatttgaatcttgtacaaggatatgttcattgttttttttacgcggatggagtgtcgtactcgtaccatatcatatactgcgaaatgaggatgtggtgaccgttctcgagatgttcaatagtgtgtttctgtcctcgacaacggagacagtattgaccagtatctgactgaacaaaagcgcttccggaaaattaattaagaaaagaataaccgtgtccgggctc

SEQ ID NO: 82133 - DNA, 1556 bp, Zea Mays
gtcccaacagccagaaggcgccgtcgcctgcggcgacacgcgcacgcaggcatccctctcgtgagcgcgcactgctaccgtgccgcagtgtggttacagctcgtcgctcgaggcgaactccggcgtgcggaaccctagcgcaggcgtggagctcaccggcctcggcgccggcgccggtactaggatggctccacccgttacgccatggtgagggccttgcggctcggtggccgcgcggccgccgcagcgaggtggtgcacctgccggcgcgccgccgtcgccctctgcgtggccaacctcgtcgccgcgctgctcgtggcccgcgcgctctacgctcccggctccttcgcatttgcacccaaacttcgtgcctgtggctttaggcggggagctgaagtattccagggagcagatgaggtgggtggaggagtcgatccggattcgccgcgcagctgagcccgtcgagctcattgaggcggtgaagaagctgcgcaaggcattcacgagggaagagaagacacgaaaagggctgccgctggagctgaagcagaaagtttcgcttgagattctgcagagactgcacgatttgggcgaaggttctaataccacggaacaacaagaagctgtagaagcatggcgtgttgggaagctcaaggacatgagaagtgcatcttctaagaatttatcaaattttggcctctccagtgaagattcaaggatgttaaagcgagccttggagtttaactggcaaaggatattggaggacattggtctttggatacctcccactatatatcatatcgaacatgatgacaaacctgagaatgaaccagaagatgaagagataatacccggtccacctttgccccctgaatgcaatactgaactgcatactgattatggtggcacggctgttagatggggcttaacacatcacaaagaaagtgccgcagattgctgtcaagcctgtatagatcaggctaagagggccagaccaggagccttaaagtgtaatatttgggtttactgtccgtctgagtatggatgctactcgccagacaaatatgaacacaaacatcaagaatgctggttgaagcaggctgaccaccctagattaaacttcaaagaccggtaccctgagccatacagagattctcatccgactgcccctgttgttgtgccatggatgtcgggtgtcattactgcatgagctgcttgcccacaggagcgcaatgccaatgtgcagcttccagactgaactctacatttttgttttgcaaactcagaaaaccatttttcattttcattctttagtacttaggctttaggttagtctacttggtagctgaagtttaggctgcgctggggcctttgtcaaactgtgccctagggcgtggcaaacaaactgatagggcatgttttggcagagatgtgctgtaatgtatgtacatcaaccaatcatgctcgcagctatatattgtacttcaaactgaaaactaactaacacagaagcaatcatgcccatggctatattctacctcaagctcgagagatac

SEQ ID NO: 82134 - DNA, 2378 bp, Zea Mays
cctgcagcagctctgcttccgctcggaccccacttggagtaagtaggttcagcgagtggcgtcaccgtctcaccgatacagctccctggtcaagttaccgtccaagccgcttcccaagcggccaagccccccacccctcgtcccaacagccagaaggcgccgtcgcctgcggcgacacgcgcacgcaggcatccctctcgtgagcgcgcactgctaccgtgccgcagtgtggttacagctcgtcgctcgaggcgaactccggcgtgcggaaccctagcgcaggcgtggagctcaccggcctcggcgccggcgccggtactaggatggctccacccgttacgccatggtgagggccttgcggctcggtggccgcgcggccgccgcagcgaggtggtgcacctgccggcgcgccgccgtcgccctctgcgtggccaacctcgtcgccgcgctgctcgtggcccgcgcgctctacgctcccggctccttcgcatttgcacccaaacgcggggagctgaagtattccagggagcagatgaggtgggtggaggagtcgatccggattcgccgcgcagctgagcccgtcgagctcattgaggcggtgaagaagctgcgcaaggcattcacgagggaagagaagacacgaaaagggctgccgctggagctgaagcagaaagtttcgcttgagattctgcagagactgcacgatttgggcgaaggttctaataccacggaacaacaagaagctgtagaagcatggcgtgttgggaagctcaaggacatgagaagtgcatcttctaagaatttatcaaattttggcctctccagtgaagattcaaggatgttaaagcgagccttggagtttaactggcaaaggatattggaggacattggtctttggatacctcccactatatatcatatcgaacatgatgacaaacctgagaatgaaccagaagatgaagagataatacccggtccacctttgccccctgaatgcaatactgaactgcatactgattatggtggcacggctgttagatggggcttaacacatcacaaagaaagtgccgcagattgctgtcaagcctgtatagatcaggctaagagggccagaccaggagccttaaagtgtaatatttgggtttactgtccgtctgagtatggatgctactcgccagacaaatatgaacacaaacatcaagaatgctggttgaagcaggtattttctgtcgtcgtctatgtgtatatttaagtacttaactaatctaagagactatacttaagtccagctctcatgcacagttggtgacgttagttcattattaccaaatttgccttgtttcctgggatagtgacttccaaattgtgttattttgctgcatatatgatacaagtattggtttattaacaatgataggacatatgaggtgtagcagtagctactgggcctctaacttggttatcatggttttgggccgtgggtagagcaggaaatgcaagtgcagtcggcacaatcctggtagtttggcattgagttatgttttcttttttatttgataaacagtctcgttccatcacttagttaatagctcaatatgtccaccatattgtacatgatggtctgaaactataaaaatgctattttagttttcttgaatttattctttcatgacttagcattcatatttttttatttccaagttttgaccatgtggggaaatctaaaatattcaggttctttctttctttaagaaattccttttagatacttaatggtgagatgctgttcttggactcttccttccaaacgaaacttcattttttcccatcaaatttctggtattccattcatgtatacattaccagaatggatcttgttccacctgagaagtaattttggctgtattggtttgcatttcaggctgaccaccctagattaaacttcaaagaccggtaccctgagccatacagagattctcatccgactgcccctgttgttgtgccatggatgtcgggtgtcattactgcatgagctgcttgcccacaggagcgcaatgccaatgtgcagcttccagactgaactctacatttttgttttgcaaactcagaaaaccatttttcattttcattctttagtacttaggctttaggttagtctacttggtagctgaagtttaggctgcgctggggcctttgtcaaactgtgccctagggcgtggcaaacaaactgatagggcatgttttggcagagatgtgctgtaatgtatgtacatcaaccaatcatgctcgcagctatatattgtacttcaaactgaaaactaactaacacagaagcaatcatgcccatggctatattctacctcaagctcgagagatac

SEQ ID NO: 82135 - DNA, 1398 bp, Zea Mays
atgggtgttgtccggctcttagttggtgtaacaaacatcgacaagatcccagaatctgttgacatagtggtcggggaaggcctgtatgaaattttcttcaaaattgataaggtttgcaaagatggagtttggtcagaatattattacccttctgataagaaagattatgattttgaatccaaggatgaggtttttgatgggctcgatgatatccagcctaagtttgatgatacaaccaaggacactgtgatgaaagatgtgtccggtagcaaagttgataattcttctaacgtccaacatgctactcagcagaattgtgatattcgtcaaaccgatgcgctagaaaaatgcttagttgctgttaataggtcttcaatttttaaggagaatgttgcagcaccaaccgctgttgcgcatggggtcgtttatgataataactggacagaggctgagggcacaattattctgaacgccaagcaaactgcacaacagagaggtgaattttctaggaccggtgggccttcttcttacttggcttctatggttcaacttaatgaagtgagcaggactgttggtagagaggggcctgtggatgccgatgcatttaacctgaacaccatatgccatgactctaggaaaaaggcagttgtaccttttgttgtagtgtgcacagctgatgcgagtgaggggtctgttgatgccaattcaatctgcctgaattctattcctagtgttcctgcgagtgcaacagctgtttatccaatttcattggcagacatcaacacagacctcaacagtgtggcgattgatttttcgcctgcaacaaatatacatgcagctattccaaatgtatcagttgagcagatacatgagcatgtccggggagctgagcactcggtggctcagctcacctctcccgttggtgcagatgggagtggggctcttgttgaaaatttctcactccaagaaaatatttctaggcatagagactttaatatggtgcctacatgcatggaccatggtggtggtaccttcaatatgataacttctttgttagaggcgctcaatcagttggcccagtcaaatgaccagatcttgatttctcttcaagattattttaaatcaaaatctctttctcaaagaccaatggcccgagatgatcttactcaggtcttgggcaagcgggtggtttctgaggaggacactttaagcaaggctaagcgtcttgcggcaaagcgcaatttagaaatcagttcttttcagggcaacatactggctcagattctggagattgttgcagaaagaacaacctcaacacgagatccttgcggtatgtcgatccttagaggtggtggctatggagatctttgcaagccatggatggaggtccaacgctag

SEQ ID NO: 82136 - DNA, 598 bp, Zea Mays
atgggccgtggcgtggcgtgcttgcagctgcagtcctgcacgtcttgccgctttgattgccttctccttcccgcaactactcatcctttccatcaaaactgagcaaacccctcatcctattctcgcgcccggcgtctcccttctccaacctccgtttctaatccgcgctgctaatcccactcccagtcccagctcgtccgctgagatggacagtagcagcctcaaatccgcgcagctcctggagctgatgcgccagcacctggccaccgatgccggcaaggaggtcaccaagaaggtcggcctcgtctaccagctcaacatcgcccccaagaagatcggcgttgatgaggagatcttcgtggtcgacctcaagaagggcgaggtcaccaaagggccgtaccagggaaagccggatgccactttctccttcacggacaacgatttccttggaatcgccaccggcaagacgaatccgcagattgcattcattcgaggggcgattaaaatcaaggggagcatcagtgcggcgcagaagttcacccctgacatcttccccaagcctgctaagctgtagaagacatgttggacctagtttggg

SEQ ID NO: 82137 - DNA, 663 bp, Zea Mays
ccagatccagatccagcaaccagcatgggccgtggcgtggcgtgcttgcagctgcagtcctgcacgtcttgccgctttgattgccttctccttcccgcaactactcatcctttccatcaaaactgagcaaacccctcatcctattctcgcgcccggcgtctcccttctccaacctccgtttctaatccgcgctgctaatcccactcccagtcccagctcgtccgctgagatggacagtagcagcctcaaatccgcgcagctcctggagctgatgcgccagcacctggccaccgatgccggcaaggaggtcaccaagaaggtcggcctcgtctaccagctcaacatcgcccccaagaagatcggcgttgatgaggagatcttcgtggtcgacctcaagaagggcgaggtcaccaaagggccgtaccagggaaagccggatgccactttctccttcacggacaacgatttccttggaatcgccaccggcaagacgaatccgcagattgcattcattcgaggggcgattaaaatcaaggggagcatcagtgcggcgcagaagttcacccctgacatcttccccaagcctgctaagctgtagaaggacacatgtcggatttagtctggcaatacgaagagaaggttggcgtaggttttaagtataag

SEQ ID NO: 82138 - DNA, 623 bp, Zea Mays
caattccaatcataaacgcatggttttgtgttcttttctggcgtacataatggagctggaagctgaggtggcaaaactcaaggaccagaatgaggagttgcagaaaaagcaggttgaaatgctaaagaagcaaaaggatgaggtcctggagcgtatcaacagccaacatggaccaaaggcaaagaagctttgcctgcgccgcaccctgactggcccatggtagcctgctgaagcttgcacaaaattgaccgaagtcaagatcgtcgggctagatgtgcccgtgtgtatatatcagatgaagtcaagagtactgagtaccccgttacccctgtagaccgccgctacttcagagctgccgttcttgttctgtgacgtgggtagtctgcgcctgacagttcgctgtttaggttcggttgcgcgatcctcacatgaacaatgaggcgtgccatctaatttgtttattaactcactcctatctatggtgagataatgcaagtaacctggagtatgtttggttgatttgccgttttgaaaaatatgctgtgagctgtgtggaaaaacagcggtggcccgtgtggaaaatagaagccgtttgattttacagctatgtcttttgaaaaaaa

SEQ ID NO: 82139 - DNA, 578 bp, Zea Mays
tggaactccatggtgactatatttggcgtacataatggagctggaagctgaggtggcaaaactcaaggaccagaatgaggagttgcagaaaaagcaggtcctggagcgtatcaacagccaacatggaccaaaggcaaagaagctttgcctgcgccgcaccctgactggcccatggtagcctgctgaagcttgcacaaaattgaccgaagtcaagatcgtcgggctagatgtgcccgtgtgtatatatcagatgaagtcaagagtactgagtaccccgttacccctgtagaccgccgctacttcagagctgccgttcttgttctgtgacgtgggtagtctgcgcctgacagttcgctgtttaggttcggttgcgcgatcctcacatgaacaatgaggcgtgccatctaatttgtttattaactcactcctatctatggtgagataatgcaagtaacctggagtatgtttggttgatttgccgttttgaaaaatatgctgtgagctgtgtggaaaaacagcggtggcccgtgtggaaaatagaagccgtttgattttacagctatgtcttttgaaaaaaa

SEQ ID NO: 82140 - DNA, 624 bp, Zea Mays
aaaaacttgtcgcaaatggaactccatggtgactatatttggcgtacataatggagctggaagctgaggtggcaaaactcaaggaccagaatgaggagttgcagaaaaagcaggttgaaatgctaaagaagcaaaaggatgaggtcctggagcgtatcaacagccaacatggaccaaaggcaaagaagctttgcctgcgccgcaccctgactggcccatggtagcctgctgaagcttgcacaaaattgaccgaagtcaagatcgtcgggctagatgtgcccgtgtgtatatatcagatgaagtcaagagtactgagtaccccgttacccctgtagaccgccgctacttcagagctgccgttcttgttctgtgacgtgggtagtctgcgcctgacagttcgctgtttaggttcggttgcgcgatcctcacatgaacaatgaggcgtgccatctaatttgtttattaactcactcctatctatggtgagataatgcaagtaacctggagtatgtttggttgatttgccgttttgaaaaatatgctgtgagctgtgtggaaaaacagcggtggcccgtgtggaaaatagaagccgtttgattttacagctatgtcttttgaaaaaaa

SEQ ID NO: 82141 - DNA, 1065 bp, Zea Mays
  misc_feature (1)..(1): n is a, c, g, or t
natgagatgccggcagggagcggggccccagcgctggcgcggcagggctcggtctactcgctcacgttcgacgagttccagaccacgctcggcggcgccagcaaggacttcggctccatgaacatggacgagctgctgcgcaacatctggacagccgaggagtctaacgccatggctgcggccgccccggccacggccacggccacggcggccgcatccgtggacgcgcacgcgcagcagcagcagcagcagcagcacggggcgcccatccagcgccagggctccttcacgctgccccgcacactcagccagaagacggtcgacgaggtctggcgcgagatcgtgagcctcaccagcggcgaggacgcgcagcaggttgcggctcccgctcccgctcccgcgcccgagcccgagcccgcgcccgcgcccgcgccgctgccggcgcaggcgcaggcgcagcagacgctggggtccatgactctggaggagttcctggtacgcgccggcgtggttcgtgaggacatgggggggcaccagaccctcctgctgcagccgcacgcgcaggggcttttctcccaggggaatgcggtcgcgccgcagaccctgcagctgggaaacgggatggtggccggggtcgtcgggcagggcctcggaggaggggtgacggtggcggctccgacgacgccggtcgtgttcaacgggttgggaaaggtggaggcgggtgatctgtcgtcgctgtcgccggtgccgtatccgttcgacactgcgctgaggatgcggaagggacccaccgtcgagaaggtggtggagaggaggcagcgccgcatgatcaagaacagggagtcggccgccaggtcgcgtgcgaggaagcagtaaaaacttgtcgcaaatggaactccatggtgactatatttggcgtacataatggagctggaagctgaggtggcaaaactcaaggaccagaatgaggagttgcagaaaaagcaggttgaaatgctaaagaagcaaaaggatgagcggaagacagtagatctttctggctgccgattttgatgcgctgcatat

SEQ ID NO: 82142 - DNA, 1023 bp, Zea Mays
  misc_feature (1)..(1): n is a, c, g, or t
natgagatgccggcagggagcggggccccagcgctggcgcggcagggctcggtctactcgctcacgttcgacgagttccagaccacgctcggcggcgccagcaaggacttcggctccatgaacatggacgagctgctgcgcaacatctggacagccgaggagtctaacgccatggctgcggccgccccggccacggccacggccacggcggccgcatccgtggacgcgcacgcgcagcagcagcagcagcagcagcacggggcgcccatccagcgccagggctccttcacgctgccccgcacactcagccagaagacggtcgacgaggtctggcgcgagatcgtgagcctcaccagcggcgaggacgcgcagcaggttgcggctcccgctcccgctcccgcgcccgagcccgagcccgcgcccgcgcccgcgccgctgccggcgcaggcgcaggcgcagcagacgctggggtccatgactctggaggagttcctggtacgcgccggcgtggttcgtgaggacatgggggggcaccagaccctcctgctgcagccgcacgcgcaggggcttttctcccaggggaatgcggtcgcgccgcagaccctgcagctgggaaacgggatggtggccggggtcgtcgggcagggcctcggaggaggggtgacggtggcggctccgacgacgccggtcgtgttcaacgggttgggaaaggtggaggcgggtgatctgtcgtcgctgtcgccggtgccgtatccgttcgacactgcgctgaggatgcggaagggacccaccgtcgagaaggtggtggagaggaggcagcgccgcatgatcaagaacagggagtcggccgccaggtcgcgtgcgaggaagcaggcgtacataatggagctggaagctgaggtggcaaaactcaaggaccagaatgaggagttgcagaaaaagcaggttgaaatgctaaagaagcaaaaggatgagcggaagacagtagatctttctggctgccgattttgatgcgctgcatat

SEQ ID NO: 82143 - DNA, 690 bp, Zea Mays
tatctttaggcacctactgattgcatttggtggacttgctggtttggaagaaagcattgaagaagatacaaacttgaagggtaaacgtgcagatgatgtattcacatcttatttcaatacatgccccaaccaagggagcagaacaataagaacagaggaggcacttctcatttcccttcaatacttccaagatcccattaggcgagcggaacagaaattgtagaagggaatacagaaaactgcaaatctagccatggccaacaagttccagttgtaatagtggagttttctcactgagtatcttgacccttcatgtatgcgttggtgtcattggagccaagaggttgtgagccatcgaggacattttgacacaaccatttcagtttagaaaatttgatgcggagctgacttcagtggaagagtgttagcttgccatttcagtgtatccaattgttgtccactgtagtctatatcggtgtttcatacctttgaccctgtactagaacgacacggaggatcactgttaacaccagagcgtcatgcatgctttgataaagtttttcttgtgccttcaataatttgatataggaattggtagtcaatgacgcaatgccattgatttggagtcaatattgcacattttgtctgtttggttatccgccgtcttgtcttaggccattgtgtgttgac

SEQ ID NO: 82144 - DNA, 1515 bp, Zea Mays
acttgtcaggttcgcagcttgtcaaccggcccgccgcaactcgagtactcgccacgcgcgccacgccgcgcgccgccgctcccttcccgagccccgactccgtccggagtgctgcaacctgcgccgctgcccaccggactcctcttccccttccgcctcggcttcccgatccccttcccgtcccgagccctgccgaaattcgaatcgcccgcctcccgagccctcgcccccccgcgccgccgatgccctccaagcggccgtccccgcacgccatggacgaagccgcctccgccaccgccgccgccgccgccgccaccgcgcgcctccgtccctccaccccgcgctccaagaagcgcacctcccgctccaagtcccgcggccgccgccgctccccgaaccctaaccctagctcccgccgcgagggctccgcggaccacgcctccgccgcgccctcccgcaagagcgaccgcaagcccaagccgcgctccttcccggactccgccacgctcgccacggccatggcctcggtctccgccgccgccgccgcggccccgtcgtccggcgcggggcgtggcagcgcgggcgccgtccagaagctctggagcgaggccgacgagatcgcgctgctcacgggcgctgccgccttcaaggaccgcaccggcattgcgccgcgcctcccggacatgggcgagctgttcgactccatcagggactccctcgcaccgcatctcgaccaggccaaggtgtactacaagctcaagcgcctcaagagcaagttccagcactccgtgccgggtgactccagcaccgcgcacgagcaccggctgcgcgacctgggcgcagccctctggggcgccgagctcacgcgccctgaagagaacgctgccgaggaggccgccgatgcagacgacattgacgggaatagggagggggccgtgaagcttcctatggttaaggaggtgcttggagagtactggaggctgaacgggcagaccatgtcaggtgtgtcactggagaaggggttggcgctgcttgggtcgcaggaggctagtgacaccgaggtcaaatggaggcgacagcttgaggcagatatgcgcatgcagatgcgccgccatgatctggaaaaggaggtctatggcctgctcatcgatgccatcaaaggcctagggccttaacttggttgatggagtacatagctggatacataggtgggatgttattttgtaggctgatcaacgcgacctcttggttgctgactgacaaacctaacacggtgtgaggtgatgtaggggggtttgcacgaatcagtggtctcaatttatgtctagttcttgaactattcaatgattgtctaagtcgcttaggtctggagatgttcatttcactaatgtatcagcttggtctgtgatcagacagccttcatactaacgctacattttctgtaaatcattcgccaagtattattgcgatgatgatgatgctgtgtttcagaatggtcaacgaggccgactgttt

SEQ ID NO: 82145 - DNA, 1313 bp, Zea Mays
caacttgcagctcaatctcaactgagtgagaactgctgtgagaacttcgcactcgcgcgcctgcagcatgaaagactgctcgatgtctgagcttctggcctatgcgctcatcttcacgctcttgttcaccgcggcggccaccccgaccgctggcctcaccatgcgtgccgatctaacccacgtcgacaaaggtaggggcttcaccagatgggagcgtctcagccggatggccgttcgttccagagcccgcgcggccagtctttatcagcggggcggccactacggtcagccggtgacggcgactgcggtacccagctccggagagtacctcatccacttcaacatcggcacgccgcggccgcagcgcgtggcgctaacgatggacaccggcagcgaccttgtctggacgcagtgcacgccgtgccccgtctgcttcgaccagccgttcccactgttcgacccttccgtgtccagcaccttcagggccgtcgcctgccccgaccccatctgccggccgagctccggcttgagcgtttccgcgtgtgccctgaaaactttccggtgcttctacctctgctcttacggcgacaagtccataacggcgggttacatcttcaaggacactttcaccttcatgtcgcccaacggcgagggcgcgccgccggtcgccgtgtcggggctcgccttcggctgcggcgactacaacaccggcgtgtttgcttcgaacgagtccggcatcgctggcttcggccgcgggcccctgtcgttgccgtcgcagctcagggtcggcaggttctcgtactgcctcacatcgcacgacgagaccgagagcaacaagaccagcgcggtgttcctgggcacgccgccgaatggtctccgagcgcacagctcggggccgttccgatccactccgatcatacacagcccttcgttccctaccttctactacctctctctcgagggcatcaccgtcggcaagacgcggctcgcggacatggatttgccccgggagaactacatcccggaggacacggacagcggggtgatgtgcctgatgatcaacggcgcggaggtcgacatggtgctcataggcaacttccagcagcagaacatgcacatcgtctacgacgtggagaacagcaagctgctcttcgcatctgcgcagtgcgacaagatgtgacgaactcatcacttgctagcttgtgcgtacgtacgcgctgcacgtgtgcgtgtgtatgactgtatgcatgcttctacggctctacatatgttgttagtgctaaataaaaaaatgttactgtccatcgaatacg

SEQ ID NO: 82146 - DNA, 1422 bp, Zea Mays
caacttgcagctcaatctcaactgagtgagaactgctgtgagaacttcgcactcgcgcgcctgcagcatgaaagactgctcgatgtctgagcttctggcctatgcgctcatcttcacgctcttgttcaccgcggcggccaccccgaccgctggcctcaccatgcgtgccgatctaacccacctccggagagtacctcatccacttcaacatcggcacgccgcggccgcagcgcgtggcgctaacgatggacaccggcagcgaccttgtctggacgcagtgcacgccgtgccccgtctgcttcgaccagccgttcccactgttcgacccttccgtgtccagcaccttcagggccgtcgcctgccccgaccccatctgccggccgagctccggcttgagcgtttccgcgtgtgccctgaaaactttccggtgcttctacctctgctcttacggcgacaagtccataacggcgggttacatcttcaaggacactttcaccttcatgtcgcccaacggcgagggcgcgccgccggtcgccgtgtcggggctcgccttcggctgcggcgactacaacaccggcgtgtttgcttcgaacgagtccggcatcgctggcttcggccgcgggcccctgtcgttgccgtcgcagctcagggtcggcaggttctcgtactgcctcacatcgcacgacgagaccgagagcaacaagaccagcgcggtgttcctgggcacgccgccgaatggtctccgagcgcacagctcggggccgttccgatccactccgatcatacacagcccttcgttccctaccttctactacctctctctcgagggcatcaccgtcggcaagacgcggctgccggtcgactcgtcggtgttcgcgctcaagaaggacgggtcgggtgggacggtgatcgactccggcacgggcgtcaccacctttccggcggccgtgtttgagcaactcaagaacgagttcgtggcgcagcttccgctgccccgctacgacaacacctcagaggtcggcaacttgttgtgcttccagcggccgaaaggtgggaagcaggtgcccgtgccgaagctgatcttccacctggcgagcgcggacatggatttgccccgggagaactacatcccggaggacacggacagcggggtgatgtgcctgatgatcaacggcgcggaggtcgacatggtgctcataggcaacttccagcagcagaacatgcacatcgtctacgacgtggagaacagcaagctgctcttcgcatctgcgcagtgcgacaagatgtgacgaactcatcacttgctagcttgtgcgtacgtacgcgctgcacgtgtgcgtgtgtatgactgtatgcatgcttctacggctctacatatgttgttagtgctaaataaaaaaatgttactgtccatcgaatacg

SEQ ID NO: 82147 - DNA, 852 bp, Zea Mays
agaaaattgactgcttttggcagtgacagggaaggaaaccttcatactgttttaactgcagaaccatttgtcaacatacccgacgacaaaataagggaggcgctcaaagttgtcttagacccaagaaaccaacctctgcttatccattgcaagagaggcaagcaccgaactggctgtgtggtcggatgcttgaggaagctgcaggaatggtgcttgtcttcagtcttggacgagtaccatcgctttgccgctgcgaaagcgaggatcactgaccagaggttcatggagctgttcgacgtttcaagcttgaagcacctgacaccctcacactgttaaccaaggcgtgtgatcgattggtcccccaactctagtacatctcaaagcctatcttccgtcagctactgaaccgattcagttgtgaataattttggaatccgctagagtccgtgaggtagtgatgaaaccattgcaaaacgtttgtgcttgaatggtttattttcctcctgcatagcgcactgcagagcctgagaaccagattgctgtagtcgatttgcgaggggttctcttttttttttggggtacctttcgcgaggaactcgccattgtttttgggtactgaagcatgtactcgagcagctttgctaaggagaaatgaactattctcaaagtgcaaaaaggcttgtctcttcttgcatgagtgtagttagggatcctgcatattaagaagaggcctaaacagcatgttaattgcctagataggcttcagttatcccaaaacattggagaatattaattgcatgtctcggattgaagttcataaactgaaaatgacgtaaaatttccgtatattac

SEQ ID NO: 82148 - DNA, 1335 bp, Zea Mays
aacctgattgcacacgatattttctaggcaaaaacctctcatgctaccttttgtttttcgccttcttccctataaataacggccaaattgcccacaaagaaaccacccacccgcgcgccgtgcctcggttttagggcccttccctcaccgccccgcggccatgaagctggaggtcatgcccaagcccaaacagcgggtgctggaggcgcagcagagggaggaggccatggagatgagcggcctggacctgtggaagcacgagaagccgccaaggatctgccccttgcccccgtcgctcccgccgccgccgccagcgttcgacgaggcggcgctcgtgccgccgctcaacttcgccgtggtcgacgacggcatcttccgctccggattcccagggaccgccaacttccggttcctcaagtccctcaacctccgctccatcgtcgcgccaggtacctgtgcccggagccgtacccggggacgaacacggagttcctagaaaagaatgggatcaggctccaccagttcggaatcgaggggcgcaaggaaccatttgtcaacatacccgacgacaaaataagggaggcgctcaaagttgtcttagacccaagaaaccaacctctgcttatccattgcaagagaggcaagcaccgaactggctgtgtggtcggatgcttgaggaagctgcaggaatggtgcttgtcttcagtcttggacgagtaccatcgctttgccgctgcgaaagcgaggatcactgaccagaggttcatggagctgttcgacgtttcaagcttgaagcacctgacaccctcacactgttaaccaaggcgtgtgatcgattggtcccccaactctagtacatctcaaagcctatcttccgtcagctactgaaccgattcagttgtgaataattttggaatccgctagagtccgtgaggtagtgatgaaaccattgcaaaacgtttgtgcttgaatggtttattttcctcctgcatagcgcactgcagagcctgagaaccagattgctgtagtcgatttgcgaggggttctcttttttttttggggtacctttcgcgaggaactcgccattgtttttgggtactgaagcatgtactcgagcagctttgctaaggagaaatgaactattctcaaagtgcaaaaaggcttgtctcttcttgcatgagtgtagttagggatcctgcatattaagaagaggcctaaacagcatgttaattgcctagataggcttcagttatcccaaaacattggagaatattaattgcatgtctcggattgaagttcataaactgaaaatgacgtaaaatttccgtatattac

SEQ ID NO: 82149 - DNA, 962 bp, Zea Mays
ctcctcgctctctgctgcaagtgcaagcatattagcggattagccacgccgcgcgcatagcagggtctccactccagtccactccaccaagtgtccactccatccgatggtcgtccccggcgccgcgcgtgaagaacggaccaacaagagggcgttcgtgcggaagcgcgggcaggtgctcaagcgggtgctgcggagcatcctcgcctggctcccgcgctgccgcctgcagctgtccgcccgcaagaatcgcggccgccgcggcaaccgcgtccctgcccaccgaggccacgtcgagccggagcccgacgtcgccgacgacgacgacgctcctccgcacacccactagtagggtgaatacttcagtactctagctcctccgggtcctcgtcaaccaagtgctcggccacgccgtggtgacgacgacggcggcgacggtagcggcggaggcggcagagtcaacgtgtcaacttaattatacatggatcagaaccggagagcacatcagacgcgccggccgggttcctctctggcccctgtgcacaagtcaacttactattgtttcgttttttttcattgcttgattgtatactacgggatgtttaccagatggattgctgcatgcatgtgtatgtagtgtaataagcgggtcggtcatcggtcgctgtcgtcgtcgttgctattcctctaccgttgtatataaaaacggcgtgccatgtatgtgtgtgtttggctcgactgattatattagacgatcattcatccgtgtctgatctaccgtacgtattattctttattcagtctgtatggtgaactggtgcgatggtcgatcgaatgttagctagctagctgctgattttttttcgataaggaagattttcattgcatttaaaagtttcatacaaatcatctcccggcctctacaaccataagatgcacacagcctagaaaagaaagaaaaa

SEQ ID NO: 82150 - DNA, 2092 bp, Zea Mays
ctccatctccactccacccttacccggctgcctgcccctcccctctctcctctctctctctctctcccatccaggcctcctctcccctctctgcctgtcgcccatgaggatcaggcggcggccgcagcccgccgcctcagatctggccgcatccaccgcgccgcagatcccgccgccgaatgccgcgaggaaccgcgggtggctgctggcaggcgagggcgagggcgaggacgaggatcgcgaggccaggatgctgcgtgcgagcgcggatctcgcgcacgaatctggagccagcaggcgcatggcattgccgcaggacgacaatgcggcggccgtgctggtggtggatcgcggcggcaggagcttgggcgcaccgcgtggcgctgctgatggccgcatgaggtacgcggattatatataagcagctgcacacggaaagaagagagaatggtagcaactttgctaattctgacggcacgataggttctcctgcttttgatctccttcctcagtacctgctcagctgtactgttccatagtgtgcgatgcgatgccatgccatgccagcttgacccatgaggtagggagggagggagtccatgggtcgatccagttttattttagtgcaccacctgtcctccccactgcagtcagccagtgtcagacaaaacacccctgtagctgtagtgtagtgtagtgtagtgtgggcacgtcctcccatggccatgaccatgaccatgatccatccggcgcatgacatgattcctgctctgctcccctagcccatgcccatgcccccatgccgacggccggccgacccctcttggctttggtcgctgctcgacactttgggggtgctgcctacttgttgtcgatcacagcgaagcctattagcagcgcctagcggtcttggttgcacttgcattgcacccacgcgtgatctcgcccgcgcggcacacgttaccaccaccaccaccagaactgaactattcattcatatcaataacattacttacctacgtcttgtctacgtggctcgcattggaatcaccactcccgtacgggcggacatgtgtttgcgctctgcagaatcagtgcggtgaacggctacgatccggcggcggcggcggtgaaggcggaggcggaggcacgacgggagacgagcaacggctccgtgcatcccgccgcgccggcgccggcgccgcccgtggccgtggcggcggcctccaaggacgaggggaggaagcagcagcaggccgccggcaagaagcggcgcggccccgcggtgctgctggaggggtcgcggtgcagccgcgtgaacgggcgcgggtggcggtgcagccagccgacgctggtcggctactcgctctgcgagcaccacctcggcaagggccgcacgcggaccgcggcgggtgccgccttggcccgtggcgccgccgccggcggcgtgggccggctcgggcgcaccgagcacggggccgccgccgccatcgccacggcgccgccgctgcccaaggccgagggccccagcctgccgggctgctagcaggctagctaggcgggtcgggactgcggaactctttcgtatcgtccgatcggtgtgggtggcggtggtggtcgtcgctcgtcgggcgatgtgaaccctcgcccgccgcgtttcgtgggagtttggatgtcggcggtggcatggcatggacgcacagtgaagcgacccggcgttcgtggcgtggtgggtctctcgctctctgtctctgctgccgaccgacgccgtgccagaattattgcggctatatatatatacaatacacatatgcgagttagttccgcgcaacttgtatcattcatcggtgcaacttggggggtgtaaaaaattgctggaggcggcgagcatgaaaaaatgtagagaaacggagaactgcaagctgggattcatgcaatcaatcaatcaataacgctacgggcgggcacaccttttcgaattccccccacatgttccctcttttgtttttttgtttcctcatcaaaactactgtattttgctaacccggtacagtggcagcagcagtactgtagtgttggttgtcggtcctgg

SEQ ID NO: 82151 - DNA, 783 bp, Zea Mays
ctatcgattgcgtacaagcctgctagcttgcacaaagaaaacgggtacctatcttttccctctccctcgctctcgctctatatagaccgtacgtcgtccgacgtccccctccatcatcatccactaagctagctcgcacacagtacgtacagtcgtcgtcgcagagagcatcgtacaccgcctccgtcgtcgcgcagcagcgagcgagcaatgggcaacgtggaggcgacgacgacgtcgtccatcgtggcaccggagcttctgcttggcgacgcgctgctcaaggtggccgtgttcgcggtggtgcaggcgctggtctacctgatcctgcgcaagtcgtccggcgtgttcgccccggcggcggggatgacggccaggtcgttcagcttccgcccgatgcggagcatgagcgtccgccgcgtgctggccgccttctccgacgtccccgtcggcgtcccggagtcggaggaccgcgcgccgtcgccttcgccgatggatcccggtgctgaacctgctagcgagtagcgagcgagggcggagcgcctccgatccctggccaatgggcagcgaacacctgaacgacgagcgctctgtactgagtgttgactgtctgctgccatgtgcccgtgattctcctctattatgagtaattgttttcggatgtctgattctctttccctatctaccacagttccactaaattgttttaaatgttactaccctaaagtgcaaaaaattaaataatgagtagtacatcgttatatttgtaaagtggtccgggac

SEQ ID NO: 82152 - DNA, 848 bp, Zea Mays
cctggtttcttctctgatcgatcgatcgaacacaaacacgtgtctgaaatcccagcacacactatcgattgcgtacaagcctgctagcttgcacaaagaaaacgggtacctatcttttccctctccctcgctctcgctctatatagaccgtacgtcgtccgacgtccccctccatcatcatccactaagctagctcgcacacagtacgtacagtcgtcgtcgcagagagcatcgtacaccgcctccgtcgtcgcgcagcagcgagcgagcaatgggcaacgtggaggcgacgacgacgtcgtccatcgtggcaccggagcttctgcttggcgacgcgctgctcaaggtggccgtgttcgcggtggtgcaggcgctggtctacctgatcctgcgcaagtcgtccggcgtgttcgccccggcggcggggatgacggccaggtcgttcagcttccgcccgatgcggagcatgagcgtccgccgcgtgctggccgccttctccgacgtccccgtcggcgtcccggagtcggaggaccgcgcgccgtcgccttcgccgatggatcccggtgctgaacctgctagcgagtagcgagtgagcgagggcggagcgcctccgatccctggccaatgggcagcgaacacctgaacgacgagcgctctgtactgagtgttgactgtctgctgccatgtgcccgtgattctcctctattatgagtaattgttttcggatgtctgattctctttccctatctaccacagttccactaaattgttttaaatgttactaccctaaagtgcaaaaaattaaataatgagtagtacatcgttatatttgtaaagtggtccgggac

SEQ ID NO: 82153 - DNA, 1288 bp, Zea Mays
acgtaggtgactactgattacagaagtatagattcaatgagcctcatcacgaatcagcaccagttgatgggacatcagcggatgaagagagtgatagcaacatatttccttaccttcttgtaaatattggatcaggtgtcagcatgatagaggtaattggtaagggaaagtttgaaagaattataggatcccatctaggcggcggtactatccttggtcttgctaggcttttgactggttgttcaaggtattatccaattagtggtataagacttccttatggctagacaattaatattttttcctttcagttacgaagaattcctggagttgagccagaggggcaataatctgtctgtcgatttgactgtgggggacatatatggggaagaaggttatccgaagattggccttccagcatccactactgcggctagctttggaaaagtgaactcaagcaaactttctgagtataaagtagaggatcttgctgcagccttactgaattctttcacatacaacattggacagatagcctactttgtggctaatctttcaggcctgaagagaattttcttccgaggtgcttatgtctgtggtcatgagaagactatggacaagatttctcgttccctaaaatattggtccaaaggtgaagttcagacgacatttctatgccatgaagggttcttgggaacactaggtgcattttggagttatgagaacatggggatcgacagtttggcggcacatgaagtcatcagggaagtcttgcttggtgcaccatacacagggcaattcccatctttacctgtcactcaacaacaggagaatggagaacatggtactctcgaaggggaagtagaaagcttacgacatgacaatgccttgctgaaggctgaggttgagcgattacaaaaggagaatgcgttgctaagagctaagttggtaagatcaggcgagacttcaacattgtgatttgtaacacaataaaaagggcgagccgcagcttgttgtaaattttatctgtttagaaaatggctcaaaatgtaactcatataggaaaactgaattctggaaaagaaatgccaattagcattgttcatctagtgagccttgttgtataattatttatatattctttatacaagagcctatgtatttgctccgttcatgtaatcttgttcctgtaaatgttgtataaatagttaccaaaatccagtaagtatccggctttgtaattttgtcgaaatagtagtgtatgtttccaagttccctttggaaaaaa

SEQ ID NO: 82154 - DNA, 1225 bp, Zea Mays
gtgccttgctgttgctaaaggattaacacatttagaagtggtcggctggtcgctaggagcctcatcacgaatcagcaccagttgatgggacatcagcggatgaagagagtgatagcaacatatttccttaccttcttgtaaatattggatcaggtaattggtaagggaaagtttgaaagaattataggatcccatctaggcggcggtactatccttggtcttgctaggcttttgactggttgttcaagttacgaagaattcctggagttgagccagaggggcaataatctgtctgtcgatttgactgtgggggacatatatggggaagaaggttatccgaagattggccttccagcatccactactgcggctagctttggaaaagtgaactcaagcaaactttctgagtataaagtagaggatcttgctgcagccttactgaattctttcacatacaacattggacagatagcctactttgtggctaatctttcaggcctgaagagaattttcttccgaggtgcttatgtctgtggtcatgagaagactatggacaagatttctcgttccctaaaatattggtccaaaggtgaagttcagacgacatttctatgccatgaagggttcttgggaacactaggtgcattttggagttatgagaacatggggatcgacagtttggcggcacatgaagtcatcagggaagtcttgcttggtgcaccatacacagggcaattcccatctttacctgtcactcaacaacaggagaatggagaacatggtactctcgaaggggaagtagaaagcttacgacatgacaatgccttgctgaaggctgaggttgagcgattacaaaaggagaatgcgttgctaagagctaagttggtaagatcaggcgagacttcaacattgtgatttgtaacacaataaaaagggcgagccgcagcttgttgtaaattttatctgtttagaaaatggctcaaaatgtaactcatataggaaaactgaattctggaaaagaaatgccaattagcattgttcatctagtgagccttgttgtataattatttatatattctttatacaagagcctatgtatttgctccgttcatgtaatcttgttcctgtaaatgttgtataaatagttaccaaaatccagtaagtatccggctttgtaattttgtcgaaatagtagtgtatgtttccaagttccctttggaaaaaa

SEQ ID NO: 82155 - DNA, 1445 bp, Zea Mays
ggccccaacaagataggagcactattgctttccttgttgcatcacttttgggcctccgaagggttttcttcggtggatcatatatacgtggtcacaaaagcacgatggaaaatatttcttatgcaattgatttctggtcacagagccaaatgcaagcagtatttttgcgacatgaagggtatttgggagcacttggtgccctgatgagttatggggatccaagtggtgaaaatcttaccctcgaggagaaggagcctcatcacgaatcagcaccagttgatgggacatcagcggatgaagagagtgatagcaacatatttccttaccttcttgtaaatattggatcaggtgtcagcatgatagaggttctccagtaattggtaagggaaagtttgaaagaattataggatcccatctaggcggcggtactatccttggtcttgctaggcttttgactggttgttcaagttacgaagaattcctggagttgagccagaggggcaataatctgtctgtcgatttgactgtgggggacatatatggggaagaaggttatccgaagattggccttccagcatccactactgcggctagctttggaaaagtgaactcaagcaaactttctgagtataaagtagaggatcttgctgcagccttactgaattctttcacatacaacattggacagatagcctactttgtggctaatctttcaggcctgaagagaattttcttccgaggtgcttatgtctgtggtcatgagaagactatggacaagatttctcgttccctaaaatattggtccaaaggtgaagttcagacgacatttctatgccatgaagggttcttgggaacactaggtgcattttggagttatgagaacatggggatcgacagtttggcggcacatgaagtcatcagggaagtcttgcttggtgcaccatacacagggcaattcccatctttacctgtcactcaacaacaggagaatggagaacatggtactctcgaaggggaagtagaaagcttacgacatgacaatgccttgctgaaggctgaggttgagcgattacaaaaggagaatgcgttgctaagagctaagttggtaagatcaggcgagacttcaacattgtgatttgtaacacaataaaaagggcgagccgcagcttgttgtaaattttatctgtttagaaaatggctcaaaatgtaactcatataggaaaactgaattctggaaaagaaatgccaattagcattgttcatctagtgagccttgttgtataattatttatatattctttatacaagagcctatgtatttgctccgttcatgtaatcttgttcctgtaaatgttgtataaatagttaccaaaatccagtaagtatccggctttgtaattttgtcgaaatagtagtgtatgtttccaagttccctttggaaaaaa

SEQ ID NO: 82156 - DNA, 2486 bp, Zea Mays
ccacacaccaagccaaccccgcttctattccgcgtggacatatcgacaagacagccagcggcgagaagtcgacgccggcagtctggtgcaacacagcgatccagtaggtaggtcaaaccgaggcggcgacgaagtacgaacagagggcaggacgcagtcagcgcggcgcgcccaggccccgaggccgagcgatctggtgacggcacggcagcatggccgaggcgacgggccacggcggccgcgtcgtcgacctctcgggggccgagatccgcggggacctcgaggatcgcaacccgcccatcttcctccctcgccagcccgccgcgtccccgctcctcgccctcgacatcggagggactctgatcaagctggtgtacacggcgagccgcggcggaggggccgacgggacggacctgcgcttcgccaagttcgagaggcgacgcctacaggagtgcttcaacttcatccgggcggaggggctcctcgccagcaatgctggcggagaaggcgtgaccctgaaggtggtggagcatataaatttgctgacgatttcctggagaaactaggtgtttgtcttgacaagcttgatgaaatggatagtgtcgtttctggagcaaactttttgttgcagagtattcctggcgcagccttcacacacatgaatggactgaggaatccagtagatgtttccccaaataatttgtttccttaccttcttgtcaatattggctcaggagttagtatactgaaggttactggaaacagaaagtttgaaagggtaactgggacgcacattggtggtggtaccatgtttggtttagcaaaacttttaacaggctgtaagagctatgatgaattcttgcaattaagccagaaaggggacaactttgttcttgatttaattgtcaaggatatatgtggagagcttgtctgccagaagcaagggctttcaacatcaactcttgcttctagctttgggaaagttattacttctaagaagaagctgacagactacaagcctgaagaccttgcatccacattgttgagcgcctttacctataacattgcacaaattgctttccttgttgcatcacttttgggcctccgaagggttttcttcggtggatcatatatacgtggtcacaaaagcacgatggaaaatatttcttatgcaattgatttctggtcacagagccaaatgcaagcagtatttttgcgacatgaagggtatttgggagcacttggtgccctgatgagttatggggatccaagtggtgaaaatcttaccctcgaggagaaggagcctcatcacgaatcagcaccagttgatgggacatcagcggatgaagagagtgatagcaacatatttccttaccttcttgtaaatattggatcaggtgtcagcatgatagaggtaattggtaagggaaagtttgaaagaattataggatcccatctaggcggcggtactatccttggtcttgctaggcttttgactggttgttcaagttacgaagaattcctggagttgagccagaggggcaataatctgtctgtcgatttgactgtgggggacatatatggggaagaaggttatccgaagattggccttccagcatccactactgcggctagctttggaaaagtgaactcaagcaaactttctgagtataaagtagaggatcttgctgcagccttactgaattctttcacatacaacattggacagatagcctactttgtggctaatctttcaggcctgaagagaattttcttccgaggtgcttatgtctgtggtcatgagaagactatggacaagatttctcgttccctaaaatattggtccaaaggtgaagttcagacgacatttctatgccatgaagggttcttgggaacactaggtgcattttggagttatgagaacatggggatcgacagtttggcggcacatgaagtcatcagggaagtcttgcttggtgcaccatacacagggcaattcccatctttacctgtcactcaacaacaggagaatggagaacatggtactctcgaaggggaagtagaaagcttacgacatgacaatgccttgctgaaggctgaggttgagcgattacaaaaggagaatgcgttgctaagagctaagttggtaagatcaggcgagacttcaacattgtgatttgtaacacaataaaaagggcgagccgcagcttgttgtaaattttatctgtttagaaaatggctcaaaatgtaactcatataggaaaactgaattctggaaaagaaatgccaattagcattgttcatctagtgagccttgttgtataattatttatatattctttatacaagagcctatgtatttgctccgttcatgtaatcttgttcctgtaaatgttgtataaatagttaccaaaatccagtaagtatccggctttgtaattttgtcgaaatagtagtgtatgtttccaagttccctttggaaaaaa

SEQ ID NO: 82157 - DNA, 2899 bp, Zea Mays
ttttattgcgcttctattctggtctccaagccggtgacggtgaaccgatcaccacacaccaagccaaccccgcttctattccgcgtggacatatcgacaagacagccagcggcgagaagtcgacgccggcagtctggtgcaacacagcgatccagtaggtaggtcaaaccgaggcggcgacgaagtacgaacagagggcaggacgcagtcagcgcggcgcgcccaggccccgaggccgagcgatctggtgacggcacggcagcatggccgaggcgacgggccacggcggccgcgtcgtcgacctctcgggggccgagatccgcggggacctcgaggatcgcaacccgcccatcttcctccctcgccagcccgccgcgtccccgctcctcgccctcgacatcggagggactctgatcaagctggtgtacacggcgagccgcggcggaggggccgacgggacggacctgcgcttcgccaagttcgagaggcgacgcctacaggagtgcttcaacttcatccgggcggaggggctcctcgccagcaatgctggcggagaaggcgtgaccctgaaggctacaggtggtggagcatataaatttgctgacgatttcctggagaaactaggtgtttgtcttgacaagcttgatgaaatggatagtgtcgtttctggagcaaactttttgttgcagagtattcctggcgcagccttcacacacatgaatggactgaggaatccagtagatgtttccccaaataatttgtttccttaccttcttgtcaatattggctcaggagttagtatactgaagtataatgtaggttactggaaacagaaagtttgaaagggtaactgggacgcacattggtggtggtaccatgtttggtttagcaaaacttttaacaggctgtaagagctatgatgaattcttgcaattaagccagaaaggggacaactttgttcttgatttaattgtcaaggatatatgtggagagcttgtctgccagaagcaagggctttcaacatcaactcttgcttctagctttgggaaagttattacttctaagaagaagctgacagactacaagcctgaagaccttgcatccacattgttgagcgcctttacctataacattgcacaaattgctttccttgttgcatcacttttgggcctccgaagggttttcttcggtggatcatatatacgtggtcacaaaagcacgatggaaaatatttcttatgcaattgatttctggtcacagagccaaatgcaagcagtatttttgcgacatgaagggtatttgggagcacttggtgccctgatgagttatggggatccaagtggtgaaaatcttaccctcgaggagaaggagcctcatcacgaatcagcaccagttgatgggacatcagcggatgaagagagtgatagcaacatatttccttaccttcttgtaaatattggatcaggtgtcagcatgatagaggttctccagtaattggtaagggaaagtttgaaagaattataggatcccatctaggcggcggtactatccttggtcttgctaggcttttgactggttgttcaagttacgaagaattcctggagttgagccagaggggcaataatctgtctgtcgatttgactgtgggggacatatatggggaagaaggttatccgaaggtacttatccactctttgaaaagttgaccttcagtgtggattttttcctggtagtatgcagcagttctaacaaaatcaaatgtttattagtatcacactgcttatactggttgatcacctgagaggtaatctattctgaagaaggaaaataaattaagacaaatatgtatcaaattgcacctgcgtttgagcatcatgggataaattataccccctctgtttttttatttgtcgcattttagtacaaaaatgaactagcaggcgacaaatattcgagaatggaggtagtaataattagctatcattatttctatcagttctttttcctctgtgtcagattggccttccagcatccactactgcggctagctttggaaaagtgaactcaagcaaactttctgagtataaagtagaggatcttgctgcagccttactgaattctttcacatacaacattggacagatagcctactttgtggctaatctttcaggcctgaagagaattttcttccgaggtgcttatgtctgtggtcatgagaagactatggacaagatttctcgttccctaaaatattggtccaaaggtgaagttcagacgacatttctatgccatgaagggttcttgggaacactaggtgcattttggagttatgagaacatggggatcgacagtttggcggcacatgaagtcatcagggaagtcttgcttggtgcaccatacacagggcaattcccatctttacctgtcactcaacaacaggagaatggagaacatggtactctcgaaggggaagtagaaagcttacgacatgacaatgccttgctgaaggctgaggttgagcgattacaaaaggagaatgcgttgctaagagctaagttggtaagatcaggcgagacttcaacattgtgatttgtaacacaataaaaagggcgagccgcagcttgttgtaaattttatctgtttagaaaatggctcaaaatgtaactcatataggaaaactgaattctggaaaagaaatgccaattagcattgttcatctagtgagccttgttgtataattatttatatattctttatacaagagcctatgtatttgctccgttcatgtaatcttgttcctgtaaatgttgtataaatagttaccaaaatccagtaagtatccggctttgtaattttgtcgaaatagtagtgtatgtttccaagttccctttggaaaaaa

SEQ ID NO: 82158 - DNA, 3108 bp, Zea Mays
aacaaggccggcaggccccgtcgccagcggatcctacggtcccatcccaatcgtaaatcgcgcgccgtcccgatcatcctgactcttctgtctctgcctcgtgcgctgtccgtgcccggtttttattgcgcttctattctggtctccaagccggtgacggtgaaccgatcaccacacaccaagccaaccccgcttctattccgcgtggacatatcgacaagacagccagcggcgagaagtcgacgccggcagtctggtgcaacacagcgatccagtaggtaggtcaaaccgaggcggcgacgaagtacgaacagagggcaggacgcagtcagcgcggcgcgcccaggccccgaggccgagcgatctggtgacggcacggcagcatggccgaggcgacgggccacggcggccgcgtcgtcgacctctcgggggccgagatccgcggggacctcgaggatcgcaacccgcccatcttcctccctcgccagcccgccgcgtccccgctcctcgccctcgacatcggagggactctgatcaagctggtgtacacggcgagccgcggcggaggggccgacgggacggacctgcgcttcgccaagttcgagaggcgacgcctacaggagtgcttcaacttcatccgggcggaggggctcctcgccagcaatgctggcggagaaggcgtgaccctgaaggctacaggtggtggagcatataaatttgctgacgatttcctggagaaactaggtgtttgtcttgacaagcttgatgaaatggatagtgtcgtttctggagcaaactttttgttgcagagtattcctggcgcagccttcacacacatgaatggactgaggaatccagtagatgtttccccaaataatttgtttccttaccttcttgtcaatattggctcaggagttagtatactgaaggttactggaaacagaaagtttgaaagggtaactgggacgcacattggtggtggtaccatgtttggtttagcaaaacttttaacaggctgtaagagctatgatgaattcttgcaattaagccagaaaggggacaactttgttcttgatttaattgtcaaggatatatgtggagagcttgtctgccagaagcaagggctttcaacatcaactcttgcttctagctttgggaaagttattacttctaagaagaagctgacagactacaagcctgaagaccttgcatccacattgttgagcgcctttacctataacattgcacaagtgagtttctttttttctgcctgtctgcttgttataaatatagacttcttaccttagaataaggataccgtgcgtgtgcgcgcgccgtcggcgggggaaagtggagggagaacaataaattatgttagctatttgcatcttatgacacccagtattctttattgaaataataaataatctaaatctggatatatttacttggtgtttatggtagggggagggagaacaataaattagctacttgcatcttatggcaccaagtatcctttattgaaagaaataatctaaatctggatatatttacttgttgtttaacccctcttgctaaactttagtgtcgagaatggaagtatgctgacttatttttattgtgttagatggttcggtagaaagattcacatatgaactagttttgtgaatgggccccaacaagataggagcactattgctttccttgttgcatcacttttgggcctccgaagggttttcttcggtggatcatatatacgtggtcacaaaagcacgatggaaaatatttcttatgcaattgatttctggtcacagagccaaatgcaagcagtatttttgcgacatgaagggtatttgggagcacttggtgccctgatgagttatggggatccaagtggtgaaaatcttaccctcgaggagaaggagcctcatcacgaatcagcaccagttgatgggacatcagcggatgaagagagtgatagcaacatatttccttaccttcttgtaaatattggatcaggtgtcagcatgatagaggtaattggtaagggaaagtttgaaagaattataggatcccatctaggcggcggtactatccttggtcttgctaggcttttgactggttgttcaagttacgaagaattcctggagttgagccagaggggcaataatctgtctgtcgatttgactgtgggggacatatatggggaagaaggttatccgaagattggccttccagcatccactactgcggctagctttggaaaagtgaactcaagcaaactttctgagtataaagtagaggatcttgctgcagccttactgaattctttcacatacaacattggacagatagcctactttgtggctaatctttcaggcctgaagagaattttcttccgaggtgcttatgtctgtggtcatgagaagactatggacaagatttctcgttccctaaaatattggtccaaaggtgaagttcagacgacatttctatgccatgaagggttcttgggaacactaggtgcattttggagttatgagaacatggggatcgacagtttggcggcacatgaagtcatcagggaagtcttgcttggtgcaccatacacagggcaattcccatctttacctgtcactcaacaacaggagaatggagaacatggtactctcgaaggggaagtagaaagcttacgacatgacaatgccttgctgaaggctgaggttgagcgattacaaaaggagaatgcgttgctaagagctaagttggtaagatcaggcgagacttcaacattgtgatttgtaacacaataaaaagggcgagccgcagcttgttgtaaattttatctgtttagaaaatggctcaaaatgtaactcatataggaaaactgaattctggaaaagaaatgccaattagcattgttcatctagtgagccttgttgtataattatttatatattctttatacaagagcctatgtatttgctccgttcatgtaatcttgttcctgtaaatgttgtataaatagttaccaaaatccagtaagtatccggctttgtaattttgtcgaaatagtagtgtatgtttccaagttccctttggaaaaaa

SEQ ID NO: 82159 - DNA, 2693 bp, Zea Mays
gccaaaacaaggccggcaggccccgtcgccagcggatcctacggtcccatcccaatcgtaaatcgcgcgccgtcccgatcatcctgactcttctgtctctgcctcgtgcgctgtccgtgcccggtttttattgcgcttctattctggtctccaagccggtgacggtgaaccgatcaccacacaccaagccaaccccgcttctattccgcgtggacatatcgacaagacagccagcggcgagaagtcgacgccggcagtctggtgcaacacagcgatccagtaggtaggtcaaaccgaggcggcgacgaagtacgaacagagggcaggacgcagtcagcgcggcgcgcccaggccccgaggccgagcgatctggtgacggcacggcagcatggccgaggcgacgggccacggcggccgcgtcgtcgacctctcgggggccgagatccgcggggacctcgaggatcgcaacccgcccatcttcctccctcgccagcccgccgcgtccccgctcctcgccctcgacatcggagggactctgatcaagctggtgtacacggcgagccgcggcggaggggccgacgggacggacctgcgcttcgccaagttcgagaggcgacgcctacaggagtgcttcaacttcatccgggcggaggggctcctcgccagcaatgctggcggagaaggcgtgaccctgaaggctacaggtggtggagcatataaatttgctgacgatttcctggagaaactaggtgtttgtcttgacaagcttgatgaaatggatagtgtcgtttctggagcaaactttttgttgcagagtattcctggcgcagccttcacacacatgaatggactgaggaatccagtagatgtttccccaaataatttgtttccttaccttcttgtcaatattggctcaggagttagtatactgaaggttactggaaacagaaagtttgaaagggtaactgggacgcacattggtggtggtaccatgtttggtttagcaaaacttttaacaggctgtaagagctatgatgaattcttgcaattaagccagaaaggggacaactttgttcttgatttaattgtcaaggatatatgtggagagcttgtctgccagaagcaagggctttcaacatcaactcttgcttctagctttgggaaagttattacttctaagaagaagctgacagactacaagcctgaagaccttgcatccacattgttgagcgcctttacctataacattgcacaaatggttcggtagaaagattcacatatgaactagttttgtgaatgggccccaacaagataggagcactattgctttccttgttgcatcacttttgggcctccgaagggttttcttcggtggatcatatatacgtggtcacaaaagcacgatggaaaatatttcttatgcaattgatttctggtcacagagccaaatgcaagcagtatttttgcgacatgaagggtatttgggagcacttggtgccctgatgagttatggggatccaagtggtgaaaatcttaccctcgaggagaaggagcctcatcacgaatcagcaccagttgatgggacatcagcggatgaagagagtgatagcaacatatttccttaccttcttgtaaatattggatcaggtgtcagcatgatagaggtaattggtaagggaaagtttgaaagaattataggatcccatctaggcggcgttacgaagaattcctggagttgagccagaggggcaataatctgtctgtcgatttgactgtgggggacatatatggggaagaaggttatccgaagattggccttccagcatccactactgcggctagctttggaaaagtgaactcaagcaaactttctgagtataaagtagaggatcttgctgcagccttactgaattctttcacatacaacattggacagatagcctactttgtggctaatctttcaggcctgaagagaattttcttccgaggtgcttatgtctgtggtcatgagaagactatggacaagatttctcgttccctaaaatattggtccaaaggtgaagttcagacgacatttctatgccatgaagggttcttgggaacactaggtgcattttggagttatgagaacatggggatcgacagtttggcggcacatgaagtcatcagggaagtcttgcttggtgcaccatacacagggcaattcccatctttacctgtcactcaacaacaggagaatggagaacatggtactctcgaaggggaagtagaaagcttacgacatgacaatgccttgctgaaggctgaggttgagcgattacaaaaggagaatgcgttgctaagagctaagttggtaagatcaggcgagacttcaacattgtgatttgtaacacaataaaaagggcgagccgcagcttgttgtaaattttatctgtttagaaaatggctcaaaatgtaactcatataggaaaactgaattctggaaaagaaatgccaattagcattgttcatctagtgagccttgttgtataattatttatatattctttatacaagagcctatgtatttgctccgttcatgtaatcttgttcctgtaaatgttgtataaatagttaccaaaatccagtaagtatccggctttgtaattttgtcgaaatagtagtgtatgtttccaagttccctttggaaaaaa

SEQ ID NO: 82160 - DNA, 2878 bp, Zea Mays
cggcgggaggccaaaacaaggccggcaggccccgtcgccagcggatcctacggtcccatcccaatcgtaaatcgcgcgccgtcccgatcatcctgactcttctgtctctgcctcgtgcgctgtccgtgcccggtttttattgcgcttctattctggtctccaagccggtgacggtgaaccgatcaccacacaccaagccaaccccgcttctattccgcgtggacatatcgacaagacagccagcggcgagaagtcgacgccggcagtctggtgcaacacagcgatccagtaggtaggtcaaaccgaggcggcgacgaagtacgaacagagggcaggacgcagtcagcgcggcgcgcccaggccccgaggccgagcgatctggtgacggcacggcagcatggccgaggcgacgggccacggcggccgcgtcgtcgacctctcgggggccgagatccgcggggacctcgaggatcgcaacccgcccatcttcctccctcgccagcccgccgcgtccccgctcctcgccctcgacatcggagggactctgatcaagctggtgtacacggcgagccgcggcggaggggccgacgggacggacctgcgcttcgccaagttcgagaggcgacgcctacaggagtgcttcaacttcatccgggcggaggggctcctcgccagcaatgctggcggagaaggcgtgaccctgaaggctacaggtggtggagcatataaatttgctgacgatttcctggagaaactaggtgtttgtcttgacaagcttgatgaaatggatagtgtcgtttctggagcaaactttttgttgcagagtattcctggcgcagccttcacacacatgaatggactgaggaatccagtagatgtttccccaaataatttgtttccttaccttcttgtcaatattggctcaggagttagtatactgaaggttactggaaacagaaagtttgaaagggtaactgggacgcacattggtggtggtaccatgtttggtttagcaaaacttttaacaggctgtaagagctatgatgaattcttgcaattaagccagaaaggggacaactttgttcttgatttaattgtcaaggatatatgtggagagcttgtctgccagaagcaagggctttcaacatcaactcttgcttctagctttgggaaagttattacttctaagaagaagctgacagactacaagcctgaagaccttgcatccacattgttgagcgcctttacctataacattgcacaaagccaaatgcaagcagtatttttgcgacatgaagggtatttgggagcacttggtgccctgatgagttatggggatccaagtggtgaaaatcttaccctcgaggagaaggagcctcatcacgaatcagcaccagttgatgggacatcagcggatgaagagagtgatagcaacatatttccttaccttcttgtaaatattggatcaggtaattggtaagggaaagtttgaaagaattataggatcccatctaggcggcggtactatccttggtcttgctaggcttttgactggttgttcaagttacgaagaattcctggagttgagccagaggggcaataatctgtctgtcgatttgactgtgggggacatatatggggaagaaggttatccgaaggtacttatccactctttgaaaagttgaccttcagtgtggattttttcctggtagtatgcagcagttctaacaaaatcaaatgtttattagtatcacactgcttatactggttgatcacctgagaggtaatctattctgaagaaggaaaataaattaagacaaatatgtatcaaattgcacctgcgtttgagcatcatgggataaattataccccctctgtttttttatttgtcgcattttagtacaaaaatgaactagcaggcgacaaatattcgagaatggaggtagtaataattagctatcattatttctatcagttctttttcctctgtgtcagattggccttccagcatccactactgcggctagctttggaaaagtgaactcaagcaaactttctgagtataaagtagaggatcttgctgcagccttactgaattctttcacatacaacattggacagatagcctactttgtggctaatctttcaggcctgaagagaattttcttccgaggtgcttatgtctgtggtcatgagaagactatggacaagatttctcgttccctaaaatattggtccaaaggtgaagttcagacgacatttctatgccatgaagggttcttgggaacactaggtgcattttggagttatgagaacatggggatcgacagtttggcggcacatgaagtcatcagggaagtcttgcttggtgcaccatacacagggcaattcccatctttacctgtcactcaacaacaggagaatggagaacatggtactctcgaaggggaagtagaaagcttacgacatgacaatgccttgctgaaggctgaggttgagcgattacaaaaggagaatgcgttgctaagagctaagttggtaagatcaggcgagacttcaacattgtgatttgtaacacaataaaaagggcgagccgcagcttgttgtaaattttatctgtttagaaaatggctcaaaatgtaactcatataggaaaactgaattctggaaaagaaatgccaattagcattgttcatctagtgagccttgttgtataattatttatatattctttatacaagagcctatgtatttgctccgttcatgtaatcttgttcctgtaaatgttgtataaatagttaccaaaatccagtaagtatccggctttgtaattttgtcgaaatagtagtgtatgtttccaagttccctttggaaaaaa

SEQ ID NO: 82161 - DNA, 2695 bp, Zea Mays
cggcgaccggcgggaggccaaaacaaggccggcaggccccgtcgccagcggatcctacggtcccatcccaatcgtaaatcgcgcgccgtcccgatcatcctgactcttctgtctctgcctcgtgcgctgtccgtgcccggtttttattgcgcttctattctggtctccaagccggtgacggtgaaccgatcaccacacaccaagccaaccccgcttctattccgcgtggacatatcgacaagacagccagcggcgagaagtcgacgccggcagtctggtgcaacacagcgatccagtaggtaggtcaaaccgaggcggcgacgaagtacgaacagagggcaggacgcagtcagcgcggcgcgcccaggccccgaggccgagcgatctggtgacggcacggcagcatggccgaggcgacgggccacggcggccgcgtcgtcgacctctcgggggccgagatccgcggggacctcgaggatcgcaacccgcccatcttcctccctcgccagcccgccgcgtccccgctcctcgccctcgacatcggagggactctgatcaagctggtgtacacggcgagccgcggcggaggggccgacgggacggacctgcgcttcgccaagttcgagaggcgacgcctacaggagtgcttcaacttcatccgggcggaggggctcctcgccagcaatgctggcggagaaggcgtgaccctgaaggctacaggtggtggagcatataaatttgctgacgatttcctggagaaactaggtgtttgtcttgacaagcttgatgaaatggatagtgtcgtttctggagcaaactttttgttgcagagtattcctggcgcagccttcacacacatgaatggactgaggaatccagtagatgtttccccaaataatttgtttccttaccttcttgtcaatattggctcaggagttagtatactgaagtataatgtaggttactggaaacagaaagtttgaaagggtaactgggacgcacattggtggtggtaccatgtttggtttagcaaaacttttaacaggctgtaagagctatgatgaattcttgcaattaagccagaaaggggacaactttgttcttgatttaattgtcaaggatatatgtggagagcttgtctgccagaagcaagggctttcaacatcaactcttgcttctagctttgggaaagttattacttctaagaagaagctgacagactacaagcctgaagaccttgcatccacattgttgagcgcctttacctataacattgcacaaattgctttccttgttgcatcacttttgggcctccgaagggttttcttcggtggatcatatatacgtggtcacaaaagcacgatggaaaatatttcttatgcaattgatttctggtcacagagccaaatgcaagcagtatttttgcgacatgaagggtatttgggagcacttggtgccctgatgagttatggggatccaagtggtgaaaatcttaccctcgaggagaaggagcctcatcacgaatcagcaccagttgatgggacatcagcggatgaagagagtgatagcaacatatttccttaccttcttgtaaatattggatcaggtgtcagcatgatagaggtaattggtaagggaaagtttgaaagaattataggatcccatctaggcggcggtactatccttggtcttgctaggcttttgactggttgttcaagttacgaagaattcctggagttgagccagaggggcaataatctgtctgtcgatttgactgtgggggacatatatggggaagaaggttatccgaagattggccttccagcatccactactgcggctagctttggaaaagtgaactcaagcaaactttctgagtataaagtagaggatcttgctgcagccttactgaattctttcacatacaacattggacagatagcctactttgtggctaatctttcaggcctgaagagaattttcttccgaggtgcttatgtctgtggtcatgagaagactatggacaagatttctcgttccctaaaatattggtccaaaggtgaagttcagacgacatttctatgccatgaagggttcttgggaacactaggtgcattttggagttatgagaacatggggatcgacagtttggcggcacatgaagtcatcagggaagtcttgcttggtgcaccatacacagggcaattcccatctttacctgtcactcaacaacaggagaatggagaacatggtactctcgaaggggaagtagaaagcttacgacatgacaatgccttgctgaaggctgaggttgagcgattacaaaaggagaatgcgttgctaagagctaagttggtaagatcaggcgagacttcaacattgtgatttgtaacacaataaaaagggcgagccgcagcttgttgtaaattttatctgtttagaaaatggctcaaaatgtaactcatataggaaaactgaattctggaaaagaaatgccaattagcattgttcatctagtgagccttgttgtataattatttatatattctttatacaagagcctatgtatttgctccgttcatgtaatcttgttcctgtaaatgttgtataaatagttaccaaaatccagtaagtatccggctttgtaattttgtcgaaatagtagtgtatgtttccaagttccctttggaaaaaa

SEQ ID NO: 82162 - DNA, 1655 bp, Zea Mays
ccccaaccactccgaccaaaccaaaacccagacccactctcccccgaaacccagggcctcgtgtcgtttgatgcgattccggcggcgatcgcgagcgcctccaccaccacccgctcccccgtcctagcgcgcgtttgggcgatctcccctctcgcggcgggcatggctggcggcggcggcggggcacgcggctccgacagggcgggggcggcgcgctctcccacaaccaccacggcgatacagtcgaccatccaatcgatcaaggaggtcgtcgtcggccactccgacgccgacatcttggacaccctccgcgaatccaacatggaccccaacgagacggcgcagaagctgctcaaccaagatccatttcatgaagtaaaaagaaaaagggacaagaagaaggagagtgctggccagaagagctttgctgatagcactgcacaagttgagcaaaactcacaatggatgaagccacatacacaaaagatggaaaatgatcaaagaactcccaagcagggtcagatgtcaggccctactcgtgaatttcgggttgtgagggacaacagatttcaacatggtgtggtggagaacagaccagaattaggacacaaaggttcagcaaatatgcccagtggaggttcacatttaactgcaggaagcgtgaagtatggagtttcacagtttaaaccactcccatctggtaacccttctggctatggaaattacactcatccagctggttttacaatgggttctcctggtgttattggagccacagttggtgttgatgatgtcaataggatgaagtacaaggacaacatttatgcctcaactccacaggtcgagacatctgacatctggattcagcaagctagagagatgccacctatgcaggttccttcatattacaacataccagttcccaggcttgtaccatcctcagcaacctccctctattgtaagtccgcaccccatggtgcatcaacaggtgccatcggccattggtcccaatgttggggttggggtggcagctccaggcccgcaagttggagcttatcagcaaccacagcttggccatatgaattggagacccagcttttgaagaaggtttcttaattatctgtaattagggggggtcacaagagcctttatgtaacaacagtaggctccttttaacaggaagcacctttgtttttagtgcagctctttctgatctatttaagctataacgaggtttttgttagcctttccatcccccaagtgaattcagtatcccatctgaactggtatgatgtagattatgagttaaaacattgggcaaaatctcgcacgagcccaaggttgagtgccttccattttgttatattgttttgtttcctaatcaaatttgtaggttgagtgccttccattttgttctgatgttcgtttcattatctgatttatgtacgcataatgttgtgaattttagggttttagtgtgttatgcaatctaatgcaatgtgataacctggtcagggttctttgtaactgggtacatttggatgattctttggaacaagagtctacaacctaattgcatgtggaaatatatttgttcattgtcactgtagtcttcattgataagtacacatcagaaagtttctgtggtacctgag

SEQ ID NO: 82163 - DNA, 3017 bp, Zea Mays
ccccaaccactccgaccaaaccaaaacccagacccactctcccccgaaacccagggcctcgtgtcgtttgatgcgattccggcggcgatcgcgagcgcctccaccaccacccgctcccccgtcctagcgcgcgtttgggcgatctcccctctcgcggcgggcatggctggcggcggcggcggggcacgcggctccgacagggcgggggcggcgcgctctcccacaaccaccacggcgatacagtcgaccatccaatcgatcaaggaggtcgtcgtcggccactccgacgccgacatcttggacaccctccgcgaatccaacatggaccccaacgagacggcgcagaagctgctcaaccaagatccatttcatgaagtaaaaagaaaaagggacaagaagaaggagagtgctggccagaagagctttgctgatagcactgcacaagttgagcaaaactcacaatggatgaagccacatacacaaaagatggaaaatgatcaaagaactcccaagcagggtcagatgtcaggccctactcgtgaatttcgggttgtgagggacaacagatttcaacatggtgtggtggagaacagaccagaattaggacacaaaggttcagcaaatgtacaaatgtctgataggagtactcttgttcagtctggtcgaaaccgctcacctgctacaacctcaggtgaccagatcacacatcaaaatgctatgcagaactccaactctgacacaacccaagggaagagggatgctcaaggtactacagagaagcatgtgaagccatatttgaagaaccctcagaatgagcagcactttccaggttctgacccagctcatgggtcagccaatgttagaattgccggtggaactgttggacctgctcaacgtcatgttggagttgttaattctactaggcaatttgctgcccgttcgggttctcagatgcatgcaccaagtggttcttatgcaaatattcagagggggagttttacctcagtaggggcatctgggcgttactcagctttcatgtctagaaacattcaacaaaaccagagacctgatacaatgtttcgtggaaggcccactgttagatcttttgttgcacaaaacaccaacagatatcaccagggttctactagcaaccaaaaagcagtacaccctattaaggagtggaagccaaaatcgacaaagaagtcaccgaccattgatgcagataacagtatagctgatgctacatctccttcagctagcaactgtgaaagtgccaacacactgaatgtaaacgaattgcctgaaaaaatttcacaaactaacttgcatgaggtggagcatgttattattccggaacatcttcgtgtgccagaatatgagcagaccaagttaaggtttggcagtttcacatctggtttggattcggaacaagtatctgcctcgaccccacaagacactgagcaaccagaacatgtacaagagtcagttcaacaggcaagtgaatatgatagtttggatgctggacctgatgacatggatgagcaagctagatcttcacaacacctgtccacatcaacggctgagatttccttgcccccatctgaggatagtgatcgaatgagtggtcaagtagagaatgatgatggcctgggcttagttcagagcgacactccaattggagcagcagacggtgacaatacccaaatcacctcgactttgactgctttttcggcttatagtcatgaagatcctaatatgcatacaaacaatgaggcccagttatacggactggtggagcctaatgtacatccgcaagtattagcttcctcttctcaggctttaaatccacagattgtgagcaacagccctgtttcgatctcgtcacagcagcagcagcatatctcccagcaacaagccgcagcacagatgtaccctcaaatgcatgtgcagcattttccaaatttcatgccatatcgacaactctattctccagtttaccccatgcctatgccaaactattcgccaaatgtcccttatccatcaaatggaaataattatcttcagatgcccagtggaggttcacatttaactgcaggaagcgtgaagtatggagtttcacagtttaaaccactcccatctgttggtgttgatgatgtcaataggatgaagtacaaggacaacatttatgcctcaactccacaggtcgagacatctgacatctggattcagcaagctagagagatgccacctatgcaggttccttcatattacaacataccagttcccaggcttgtaccatcctcagcaacctccctctattgtaagtccgcaccccatggtgcatcaacaggtgccatcggccattggtcccaatgttggggttggggtggcagctccaggcccgcaagttggagcttatcagcaaccacagcttggccatatgaattggagacccagcttttgaagaaggtttcttaattatctgtaattagggggggtcacaagagcctttatgtaacaacagtaggctccttttaacaggaagcacctttgtttttagtgcagctctttctgatctatttaagctataacgaggtttttgttagcctttccatcccccaagtgaattcagtatcccatctgaactggtatgatgtagattatgagttaaaacattgggcaaaatctcgcacgagcccaaggttgagtgccttccattttgttatattgttttgtttcctaatcaaatttgtaggttgagtgccttccattttgttctgatgttcgtttcattatctgatttatgtacgcataatgttgtgaattttagggttttagtgtgttatgcaatctaatgcaatgtgataacctggtcagggttctttgtaactgggtacatttggatgattctttggaacaagagtctacaacctaattgcatgtggaaatatatttgttcattgtcactgtagtcttcattgataagtacacatcagaaagtttctgtggtacctgag

SEQ ID NO: 82164 - DNA, 3116 bp, Zea Mays
ccccaaccactccgaccaaaccaaaacccagacccactctcccccgaaacccagggcctcgtgtcgtttgatgcgattccggcggcgatcgcgagcgcctccaccaccacccgctcccccgtcctagcgcgcgtttgggcgatctcccctctcgcggcgggcatggctggcggcggcggcggggcacgcggctccgacagggcgggggcggcgcgctctcccacaaccaccacggcgatacagtcgaccatccaatcgatcaaggaggtcgtcgtcggccactccgacgccgacatcttggacaccctccgcgaatccaacatggaccccaacgagacggcgcagaagctgctcaaccaagatccatttcatgaagtaaaaagaaaaagggacaagaagaaggagagtgctggccagaagagctttgctgatagcactgcacaagttgagcaaaactcacaatggatgaagccacatacacaaaagatggaaaatgatcaaagaactcccaagcagggtcagatgtcaggccctactcgtgaatttcgggttgtgagggacaacagatttcaacatggtgtggtggagaacagaccagaattaggacacaaaggttcagcaaatgtacaaatgtctgataggagtactcttgttcagtctggtcgaaaccgctcacctgctacaacctcaggtgaccagatcacacatcaaaatgctatgcagaactccaactctgacacaacccaagggaagagggatgctcaaggtactacagagaagcatgtgaagccatatttgaagaaccctcagaatgagcagcactttccaggttctgacccagctcatgggtcagccaatgttagaattgccggtggaactgttggacctgctcaacgtcatgttggagttgttaattctactaggcaatttgctgcccgttcgggttctcagatgcatgcaccaagtggttcttatgcaaatattcagagggggagttttacctcagtaggggcatctgggcgttactcagctttcatgtctagaaacattcaacaaaaccagagacctgatacaatgtttcgtggaaggcccactgttagatcttttgttgcacaaaacaccaacagatatcaccagggttctactagcaaccaaaaagcagtacaccctattaaggagtggaagccaaaatcgacaaagaagtcaccgaccattgatgcagataacagtatagctgatgctacatctccttcagctagcaactgtgaaagtgccaacacactgaatgtaaacgaattgcctgaaaaaatttcacaaactaacttgcatgaggtggagcatgttattattccggaacatcttcgtgtgccagaatatgagcagaccaagttaaggtttggcagtttcacatctggtttggattcggaacaagtatctgcctcgaccccacaagacactgagcaaccagaacatgtacaagagtcagttcaacaggcaagtgaatatgatagtttggatgctggacctgatgacatggatgagcaagctagatcttcacaacacctgtccacatcaacggctgagatttccttgcccccatctgaggatagtgatcgaatgagtggtcaagtagagaatgatgatggcctgggcttagttcagagcgacactccaattggagcagcagacggtgacaatacccaaatcacctcgactttgactgctttttcggcttatagtcatgaagatcctaatatgcatacaaacaatgaggcccagttatacggactggtggagcctaatgtacatccgcaagtattagcttcctcttctcaggggtacccttcagaaaacccggaagcagataatgctgtgcaagtcttcaggatgccagaatctaatgttcactcacaagttctcccttccacatctgaggctttaaatccacagattgtgagcaacagccctgtttcgatctcgtcacagcagcagcagcatatctcccagcaacaagccgcagcacagatgtaccctcaaatgcatgtgcagcattttccaaatttcatgccatatcgacaactctattctccagtttaccccatgcctatgccaaactattcgccaaatgtcccttatccatcaaatggaaataattatcttcagatgcccagtggaggttcacatttaactgcaggaagcgtgaagtatggagtttcacagtttaaaccactcccatctgttggtgttgatgatgtcaataggatgaagtacaaggacaacatttatgcctcaactccacaggtcgagacatctgacatctggattcagcaagctagagagatgccacctatgcaggttccttcatattacaacataccagttcccaggcttgtaccatcctcagcaacctccctctattgtaagtccgcaccccatggtgcatcaacaggtgccatcggccattggtcccaatgttggggttggggtggcagctccaggcccgcaagttggagcttatcagcaaccacagcttggccatatgaattggagacccagcttttgaagaaggtttcttaattatctgtaattagggggggtcacaagagcctttatgtaacaacagtaggctccttttaacaggaagcacctttgtttttagtgcagctctttctgatctatttaagctataacgaggtttttgttagcctttccatcccccaagtgaattcagtatcccatctgaactggtatgatgtagattatgagttaaaacattgggcaaaatctcgcacgagcccaaggttgagtgccttccattttgttatattgttttgtttcctaatcaaatttgtaggttgagtgccttccattttgttctgatgttcgtttcattatctgatttatgtacgcataatgttgtgaattttagggttttagtgtgttatgcaatctaatgcaatgtgataacctggtcagggttctttgtaactgggtacatttggatgattctttggaacaagagtctacaacctaattgcatgtggaaatatatttgttcattgtcactgtagtcttcattgataagtacacatcagaaagtttctgtggtacctgag

SEQ ID NO: 82165 - DNA, 3038 bp, Zea Mays
ccccaaccactccgaccaaaccaaaacccagacccactctcccccgaaacccagggcctcgtgtcgtttgatgcgattccggcggcgatcgcgagcgcctccaccaccacccgctcccccgtcctagcgcgcgtttgggcgatctcccctctcgcggcgggcatggctggcggcggcggcggggcacgcggctccgacagggcgggggcggcgcgctctcccacaaccaccacggcgatacagtcgaccatccaatcgatcaaggaggtcgtcgtcggccactccgacgccgacatcttggacaccctccgcgaatccaacatggaccccaacgagacggcgcagaagctgctcaaccaagatccatttcatgaagtaaaaagaaaaagggacaagaagaaggagagtgctggccagaagagctttgctgatagcactgcacaagttgagcaaaactcacaatggatgaagccacatacacaaaagatggaaaatgatcaaagaactcccaagcagggtcagatgtcaggccctactcgtgaatttcgggttgtgagggacaacagatttcaacatggtgtggtggagaacagaccagaattaggacacaaaggttcagcaaatgtacaaatgtctgataggagtactcttgttcagtctggtcgaaaccgctcacctgctacaacctcaggtgaccagatcacacatcaaaatgctatgcagaactccaactctgacacaacccaagggaagagggatgctcaaggtactacagagaagcatgtgaagccatatttgaagaaccctcagaatgagcagcactttccaggttctgacccagctcatgggtcagccaatgttagaattgccggtggaactgttggacctgctcaacgtcatgttggagttgttaattctactaggcaatttgctgcccgttcgggttctcagatgcatgcaccaagtggttcttatgcaaatattcagagggggagttttacctcagtaggggcatctgggcgttactcagctttcatgtctagaaacattcaacaaaaccagagacctgatacaatgtttcgtggaaggcccactgttagatcttttgttgcacaaaacaccaacagatatcaccagggttctactagcaaccaaaaagcagtacaccctattaaggagtggaagccaaaatcgacaaagaagtcaccgaccattgatgcagataacagtatagctgatgctacatctccttcagctagcaactgtgaaagtgccaacacactgaatgtaaacgaattgcctgaaaaaatttcacaaactaacttgcatgaggtggagcatgttattattccggaacatcttcgtgtgccagaatatgagcagaccaagttaagtgtacaagagtcagttcaacaggcaagtgaatatgatagtttggatgctggacctgatgacatggatgagcaagctagatcttcacaacacctgtccacatcaacggctgagatttccttgcccccatctgaggatagtgatcgaatgagtggtcaagtagagaatgatgatggcctgggcttagttcagagcgacactccaattggagcagcagacggtgacaatacccaaatcacctcgactttgactgctttttcggcttatagtcatgaagatcctaatatgcatacaaacaatgaggcccagttatacggactggtggagcctaatgtacatccgcaagtattagcttcctcttctcaggggtacccttcagaaaacccggaagcagataatgctgtgcaagtcttcaggatgccagaatctaatgttcactcacaagttctcccttccacatctgaggctttaaatccacagattgtgagcaacagccctgtttcgatctcgtcacagcagcagcagcatatctcccagcaacaagccgcagcacagatgtaccctcaaatgcatgtgcagcattttccaaatttcatgccatatcgacaactctattctccagtttaccccatgcctatgccaaactattcgccaaatgtcccttatccatcaaatggaaataattatcttcagatgcccagtggaggttcacatttaactgcaggaagcgtgaagtatggagtttcacagtttaaaccactcccatctgttggtgttgatgatgtcaataggatgaagtacaaggacaacatttatgcctcaactccacaggtcgagacatctgacatctggattcagcaagctagagagatgccacctatgcaggttccttcatattacaacataccagttcccaggcttgtaccatcctcagcaacctccctctattgtaagtccgcaccccatggtgcatcaacaggtgccatcggccattggtcccaatgttggggttggggtggcagctccaggcccgcaagttggagcttatcagcaaccacagcttggccatatgaattggagacccagcttttgaagaaggtttcttaattatctgtaattagggggggtcacaagagcctttatgtaacaacagtaggctccttttaacaggaagcacctttgtttttagtgcagctctttctgatctatttaagctataacgaggtttttgttagcctttccatcccccaagtgaattcagtatcccatctgaactggtatgatgtagattatgagttaaaacattgggcaaaatctcgcacgagcccaaggttgagtgccttccattttgttatattgttttgtttcctaatcaaatttgtaggttgagtgccttccattttgttctgatgttcgtttcattatctgatttatgtacgcataatgttgtgaattttagggttttagtgtgttatgcaatctaatgcaatgtgataacctggtcagggttctttgtaactgggtacatttggatgattctttggaacaagagtctacaacctaattgcatgtggaaatatatttgttcattgtcactgtagtcttcattgataagtacacatcagaaagtttctgtggtacctgag

SEQ ID NO: 82166 - DNA, 2836 bp, Zea Mays
gagcccggccgcccccaaccactccgaccaaaccaaaacccagacccactctcccccgaaacccagggcctcgtgtcgtttgatgcgattccggcggcgatcgcgagcgcctccaccaccacccgctcccccgtcctagcgcgcgtttgggcgatctcccctctcgcggcgggcatggctggcggcggcggcggggcacgcggctccgacagggcgggggcggcgcgctctcccacaaccaccacggcgatacagtcgaccatccaatcgatcaaggaggtcgtcgtcggccactccgacgccgacatcttggacaccctccgcgaatccaacatggaccccaacgagacggcgcagaagctgctcaaccaagatccatttcatgaagtaaaaagaaaaagggacaagaagaaggagagtgctggccagaagagctttgctgatagcactgcacaagttgagcaaaactcacaatggatgaagccacatacacaaaagatggaaaatgatcaaagaactcccaagcagggtcagatgtcaggccctactcgtgaatttcgggttgtgagggacaacagatttcaacatggtgtggtggagaacagaccagaattaggacacaaaggttcagcaaatgtacaaatgtctgataggaggtttgatgtttctttgttccgtgcctatggtacacgaacaaatcctatgaaattgcagggtacatttgttgagtctggtcgaaaccgctcacctgctacaacctcaggtgaccagatcacacatcaaaatgctatgcagaactccaactctgacacaacccaagggaagagggatgctcaaggtactacagagaagcatgtgaagccatatttgaagaaccctcagaatgagcagcactttccaggttctgacccagctcatgggtcagccaatgttagaattgccggtggaactgttggacctgctcaacgtcatgttggagttgttaattctactaggcaatttgctgcccgttcgggttctcagatgcatgcaccaagtggttcttatgcaaatattcagagggggagttttacctcagtaggggcatctgggcgttactcagctttcatgtctagaaacattcaacaaaaccagagacctgatacaatgtttcgtggaaggcccactgttagatcttttgttgcacaaaacaccaacagatatcaccagggttctactagcaaccaaaaagcagtacaccctattaaggagtggaagccaaaatcgacaaagaagtcaccgaccattgatgcagataacagtatagctgatgctacatctccttcagctagcaactgtgaaagtgccaacacactgaatgtaaacgaattgcctgaaaaaatttcacaaactaacttgcatgaggtggagcatgttattattccggaacatcttcgtgtgccagaatatgagcagaccaagttaaggtttggcagtttcacatctggtttggattcggaacaagtatctgcctcgaccccacaagacactgagcaaccagaacatgtacaagagtcagttcaacaggcaagtgaatatgatagtttggatgctggacctgatgacatggatgagcaagctagatcttcacaacacctgtccacatcaacggctgagatttccttgcccccatctgaggatagtgatcgaatgagtggtcaagtagagaatgatgatggcctgggcttagttcagagcgacactccaattggagcagcagacggtgacaatacccaaatcacctcgactttgactgctttttcggcttatagtcatgaagatcctaatatgcatacaaacaatgaggcccagttatacggactggtggagcctaatgtacatccgcaagtattagcttcctcttctcaggggtacccttcagaaaacccggaagcagataatgctgtgcaagtcttcaggatgccagaatctaatgttcactcacaagttctcccttccacatctgaggctttaaatccacagattgtgagcaacagccctgtttcgatctcgtcacagcagcagcagcatatctcccagcaacaagccgcagcacagatgtaccctcaaatgcatgtgcagcattttccaaatttcatgccatatcgacaactctattctccagtttaccccatgcctatgccaaactattcgccaaatgtcccttatccatcaaatggaaataattatcttcagatgcccagtggaggttcacatttaactgcaggaagcgtgaagtatggagtttcacagtttaaaccactcccatctggtaacccttctggctatggaaattacactcatccagctggttttacaatgggttctcctggtgttattggagccacagttggtgttgatgatgtcaataggatgaagtacaaggacaacatttatgcctcaactccacaggtcgagacatctgacatctggattcagcaagctagagagatgccacctatgcaggttccttcatattacaacataccaggtcaagcaacaccaggtgcttttgtgccaaatccagcaaatgcatctttcaatgctacagctcaatcctctcatgtgcagttcccaggcttgtaccatcctcagcaacctccctctattggttttagtgtgttatgcaatctaatgcaatgtgataacctggtcagggttctttgtaactgggtacatttggatgattctttggaacaagagtctacaacctaattgcatgtggaaatatatttgttcattgtcactgtagtcttcattgataagtacacatcagaaagtttctgtggtacctgag

SEQ ID NO: 82167 - DNA, 2853 bp, Zea Mays
caaagctcacgagtgtgacacctgactcaaagagcaagctcaattttccccttcccttggaaaaccacgcacccaccgagcccggccgcccccaaccactccgaccaaaccaaaacccagacccactctcccccgaaacccagggcctcgtgtcgtttgatgcgattccggcggcgatcgcgagcgcctccaccaccacccgctcccccgtcctagcgcgcgtttgggcgatctcccctctcgcggcgggcatggctggcggcggcggcggggcacgcggctccgacagggcgggggcggcgcgctctcccacaaccaccacggcgatacagtcgaccatccaatcgatcaaggaggtcgtcgtcggccactccgacgccgacatcttggacaccctccgcgaatccaacatggaccccaacgagacggcgcagaagctgctcaaccaagatccatttcatgaagtaaaaagaaaaagggacaagaagaaggagagtgctggccagaagagctttgctgatagcactgcacaagttgagcaaaactcacaatggatgaagccacatacacaaaagatggaaaatgatcaaagaactcccaagcagggtcagatgtcaggccctactcgtgaatttcgggttgtgagggacaacagatttcaacatggtgtggtggagaacagaccagaattaggacacaaaggttcagcaaatgtacaaatgtctgataggagtactcttgttcagtctggtcgaaaccgctcacctgctacaacctcaggtgaccagatcacacatcaaaatgctatgcagaactccaactctgacacaacccaagggaagagggatgctcaaggtactacagagaagcatgtgaagccatatttgaagaaccctcagaatgagcagcactttccaggttctgacccagctcatgggtcagccaatgttagaattgccggtggaactgttggacctgctcaacgtcatgttggagttgttaattctactaggcaatttgctgcccgttcgggttctcagatgcatgcaccaagtggttcttatgcaaatattcagagggggagttttacctcagtaggggcatctgggcgttactcagctttcatgtctagaaacattcaacaaaaccagagacctgatacaatgtttcgtggaaggcccactgttagatcttttgttgcacaaaacaccaacagatatcaccagggttctactagcaaccaaaaagcagtacaccctattaaggagtggaagccaaaatcgacaaagaagtcaccgaccattgatgcagataacagtatagctgatgctacatctccttcagctagcaactgtgaaagtgccaacacactgaatgtaaacgaattgcctgaaaaaatttcacaaactaacttgcatgaggtggagcatgttattattccggaacatcttcgtgtgccagaatatgagcagaccaagttaaggtttggcagtttcacatctggtttggattcggaacaagtatctgcctcgaccccacaagacactgagcaaccagaacatgtacaagagtcagttcaacaggcaagtgaatatgatagtttggatgctggacctgatgacatggatgagcaagctagatcttcacaacacctgtccacatcaacggctgagatttccttgcccccatctgaggatagtgatcgaatgagtggtcaagtagagaatgatgatggcctgggcttagttcagagcgacactccaattggagcagcagacggtgacaatacccaaatcacctcgactttgactgctttttcggcttatagtcatgaagatcctaatatgcatacaaacaatgaggcccagttatacggactggtggagcctaatgtacatccgcaagtattagcttcctcttctcaggggtacccttcagaaaacccggaagcagataatgctgtgcaagtcttcaggatgccagaatctaatgttcactcacaagttctcccttccacatctgaggctttaaatccacagattgtgagcaacagccctgtttcgatctcgtcacagcagcagcagcatatctcccagcaacaagccgcagcacagatgtaccctcaaatgcatgtgcagcattttccaaatttcatgccatatcgacaactctattctccagtttaccccatgcctatgccaaactattcgccaaatgtcccttatccatcaaatggaaataattatcttcagatgcccagtggaggttcacatttaactgcaggaagcgtgaagtatggagtttcacagtttaaaccactcccatctggtaacccttctggctatggaaattacactcatccagctggttttacaatgggttctcctggtgttattggagccacagttggtgttgatgatgtcaataggatgaagtacaaggacaacatttatgcctcaactccacaggtcgagacatctgacatctggattcagcaagctagagagatgccacctatgcaggttccttcatattacaacataccaggtcaagcaacaccaggtgcttttgtgccaaatccagcaaatgcatctttcaatgctacagctcaatcctctcatgtgcagttcccaggcttgtaccatcctcagcaacctccctctattggttttagtgtgttatgcaatctaatgcaatgtgataacctggtcagggttctttgtaactgggtacatttggatgattctttggaacaagagtctacaacctaattgcatgtggaaatatatttgttcattgtcactgtagtcttcattgataagtacacatcagaaagtttctgtggtacctgag

SEQ ID NO: 82168 - DNA, 1577 bp, Zea Mays
gcaaacgtcggagcacgagcacgcgttcttcgcctctcaccccacgggagggacgggaggcgagggcgcggcgagccggcgggcgcaatcggatttggggaggcaaaaggaaaattccggagagcagttcctttccgcctccccatttcctccggatagatttgggtttggcctgcgtcgattagtccggcgctcgaacccgcaccaatccattcgccgagggatcgagcaagcgaggcgtggatcgcaggcggtattccctgcctgcctcttcttctcctccgcctgttcttgccgcggtctccccctccggccgatctggactcgacagttcagctttccaatgagggaagagcaagcagtacaactaattttagcgaggcttgcaagtgcaacgattgggcgactgttaaatgagcagcaacgtgcatgcaatcttcttactctagctggcgctgttgctattgtacctccacttgaaaatatatcatcaatgatgcttgccgagtcaatcacatcacgaaatattgacagtgatatcagaagactggtggatcagccttatgtagaaggaaagtgcctaagttgtgcttgcccttctgtgcctagtactatatttcaagaagatccaattgaaccaaaaactggaataaaatttccaacatttctggaagacgactccagtccatctgcagcggtccttgttgggataggtttcaaaggcatgagagtgatgagggtcaaaaatctgaacctctacgcttttggtttatatatgcaaccgacttctatccgtgagaagctgggtcctaagtatgcttcatttccaactgacaagctgatggagaaccctgatttctatagtgatcttctcagggtcaggttggtggttaactacaatggccttagcgttggtgcagtgcgagatgtgtttgagaagtcccttggcctgcggctgcagaagatgaatcctaacacagactttcactgcttgaagacctttggttctcacttcacagaagatatcgctataccttcgggtacgaagattgacttctgtcaaacatcagatgggaagcttataacagaaattgatgggaaacaaattggtgctgttcggagcaaagatctttgcaaggctttcttcgacatgtatattggtgattcaccggtttcactggaggccaaaaaagtcgttgcccagaacgtggctgggctcattggaagacgctgaggatagcgagaggatggttatttcattcttctgtacagttagagaggattcatatgagcgggaaaataggccaagtatgtagagtgatctgtcttgtatagaaagcaggcaaaaaggtccaatgtatatgtggaaggtagcatcttcagttgtgctaggcctccattcttttttttttcttgtttggatgggccttttgcctcttcgtagctgctgtatcatgtatgctcccattgagccaggagttgtaaaatattaaattgaaggtgcttcttccataaaatgatgcatacctgtaaatctttgttgcatattgggatgttcctggtttggcgtttcaatg

SEQ ID NO: 82169 - DNA, 1723 bp, Zea Mays
ggccctatttcaccttccgtacgtctcaccccacggtgaggaggaggaagcaaacgtcggagcacgagcacgcgttcttcgcctctcaccccacgggagggacgggaggcgagggcgcggcgagccggcgggcgcaatcggatttggggaggcaaaaggaaaattccggagagcagttcctttccgcctccccatttcctccggatagatttgggtttggcctgcgtcgattagtccggcgctcgaacccgcaccaatccattcgccgagggatcgagcaagcgaggcgtggatcgcaggcggtattccctgcctgcctcttcttctcctccgcctgttcttgccgcggtctccccctccggccgatctggactcgacagatcattaattttttgttggcatacattcccaaccttgatgtaaagacctccttcattcagaaccctgtgttttggaaggttcagctttccaatgagggaagagcaagcagtacaactaattttagcgaggcttgcaagtgcaacgattgggcgactgttaaatgagcagcaacgtgcatgcaatcttcttactctagctggcgctgttgctattgtacctccacttgaaaatatatcatcaatgatgcttgccgagtcaatcacatcacgaaatattgacagtgatatcagaagactggtggatcagccttatgtagaaggaaagtgcctaagttgtgcttgcccttctgtgcctagtactatatttcaagaagatccaattgaaccaaaaactggaataaaatttccaacatttctggaagacgactccagtccatctgcagcggtccttgttgggataggtttcaaaggcatgagagtgatgagggtcaaaaatctgaacctctacgcttttggtttatatatgcaaccgacttctatccgtgagaagctgggtcctaagtatgcttcatttccaactgacaagctgatggagaaccctgatttctatagtgatcttctcagggaaaaccttgatataagggtcaggttggtggttaactacaatggccttagcgttggtgcagtgcgagatgtgtttgagaagtcccttggcctgcggctgcagaagatgaatcctaacacagactttcactgcttgaagacctttggttctcacttcacagaagatatcgctataccttcgggtacgaagattgacttctgtcaaacatcagatgggaagcttataacagaaattgatgggaaacaaattggtgctgttcggagcaaagatctttgcaaggctttcttcgacatgtatattggtgattcaccggtttcactggaggccaaaaaagtcgttgcccagaacgtggctgggctcattggaagacgctgaggatagcgagaggatggttatttcattcttctgtacagttagagaggattcatatgagcgggaaaataggccaagtatgtagagtgatctgtcttgtatagaaagcaggcaaaaaggtccaatgtatatgtggaaggtagcatcttcagttgtgctaggcctccattcttttttttttcttgtttggatgggccttttgcctcttcgtagctgctgtatcatgtatgctcccattgagccaggagttgtaaaatattaaattgaaggtgcttcttccataaaatgatgcatacctgtaaatctttgttgcatattgggatgttcctggtttggcgtttcaatg

SEQ ID NO: 82170 - DNA, 2103 bp, Zea Mays
gggaaagttacaggagggaagctaccggccctatttcaccttccgtacgtctcaccccacggtgaggaggaggaagcaaacgtcggagcacgagcacgcgttcttcgcctctcaccccacgggagggacgggaggcgagggcgcggcgagccggcgggcgcaatcggatttggggaggcaaaaggaaaattccggagagcagttcctttccgcctccccatttcctccggatagatttgggtttggcctgcgtcgattagtccggcgctcgaacccgcaccaatccattcgccgagggatcgagcaagcgaggcgtggatcgcaggcggtattccctgcctgcctcttcttctcctccgcctgttcttgccgcggtctccccctccggccgatctggactcgacagatcattaattttttgttggcatacattcccaaccttgatgtaaagacctccttcattcagaaccctgtgttttggaagggtatttcacaatgaagcccaatcagttgattacatcccatgttgatatacatagggtatacccatacgagttccaaccagagttttcaatgtctcatgatcttggattgaatttgttttcacaagccggtacagtgctgggtacttctttaagacatcataggaagatctcttcttctggaaatgcaatggtccatggagctttcaatcgcctcaacaagctttcccgagctctctatttctggctctctagaccatctgatcctaagattttgcgttgggtggcatctgtagcagcgaccagttctagatcttgtcagttgcgtttcaaccaaatgggctctcacatgcaaaatctgactaaactgcagttcagctttccaatgagggaagagcaagcagtacaactaattttagcgaggcttgcaagtgcaacgattgggcgactgttaaatgagcagcaacgtgcatgcaatcttcttactctagctggcgctgttgctattgtacctccacttgaaaatatatcatcaatgatgcttgccgagtcaatcacatcacgaaatattgacagtgatatcagaagactggtggatcagccttatgtagaaggaaagtgcctaagttgtgcttgcccttctgtgcctagtactatatttcaagaagatccaattgaaccaaaaactggaataaaatttccaacatttctggaagacgactccagtccatctgcagcggtttcaaaggcatgagagtgatgagggtcaaaaatctgaacctctacgcttttggtttatatatgcaaccgacttctatccgtgagaagctgggtcctaagtatgcttcatttccaactgacaagctgatggagaaccctgatttctatagtgatcttctcagggaaaaccttgatataagggtcaggttggtggttaactacaatggccttagcgttggtgcagtgcgagatgtgtttgagaagtcccttggcctgcggctgcagaagatgaatcctaacacagactttcactgcttgaagacctttggttctcacttcacagaagatatcgctataccttcgggtacgaagattgacttctgtcaaacatcagatgggaagcttataacagaaattgatgggaaacaaattggtgctgttcggagcaaagatctttgcaaggctttcttcgacatgtatattggtgattcaccggtttcactggaggccaaaaaagtcgttgcccagaacgtggctgggctcattggaagacgctgaggatagcgagaggatggttatttcattcttctgtacagttagagaggattcatatgagcgggaaaataggccaagtatgtagagtgatctgtcttgtatagaaagcaggcaaaaaggtccaatgtatatgtggaaggtagcatcttcagttgtgctaggcctccattcttttttttttcttgtttggatgggccttttgcctcttcgtagctgctgtatcatgtatgctcccattgagccaggagttgtaaaatattaaattgaaggtgcttcttccataaaatgatgcatacctgtaaatctttgttgcatattgggatgttcctggtttggcgtttcaatg

SEQ ID NO: 82171 - DNA, 607 bp, Zea Mays
catcacccgcgtcgtcacgtgcgtcgcgtccccctgcggcccctccttcgccagcccgaaatccgacagcttcgccgtgtagtcctggaaatgaattcaccaccacatccatatgacaaactcgaggtcagcaacagttgtttgttggttgcgtttcgccaacttgttgctacaaaagcatcacgttccaaaaatccgaactaatcacagcactataattttcaagctaggttgggccggcgtctaggataaaagaagaaaaaaaacagaggtttttgtttgcttgctactactaatttgtcggtaggtgcaaaacaaatcggattttgagcaggagtgtacgtctactattccagaacgggaattctataaagaagcgaggcttcggcacggaacggtagtttgacaacgtgcgagcatgcaattagcacggttgttgggcgtgttggtaagaaacaatttagttatagcgaaaataaaaaatatagagtgtgacaaggactaataaagcatccaatgtggttgatgctggggggtgggtgggggggaagaagagaagagattggacttggtgaggcgggcttctttattaccgagtcgaggagaa

SEQ ID NO: 82172 - DNA, 417 bp, Zea Mays
actcatgccctgctcagggtcggcgggctctctggtctcttcacggcgctggcgtaccggctccgcagtgggctctccgcgtggacggccgacatgacgtgcctcttgccctgcctgccggccgcctccgcgtccgcattgtcgtcgccggcgacaccggcctgcgccggcgcggcctcggcctcggcggcggctccaccgaccgtgaacacgaacgggcccatgggcacgtcgtcgtcgagcgccagcagcggctcgagcgcgtcgacgacgtgtcgcatggtggggcgcgccttgggcacgctctgcaggcactggtgcgccaccccggcggccttctccgcggcgcgcgccgagtactgcatctccagccccgggtccatgaagcggtgcaggcggtcggcgcggcggaggtag

SEQ ID NO: 82173 - DNA, 1259 bp, Zea Mays
ctcaacggcacctacaaacccacggcctggcagcagaagtaccagcagcgccgtccatggaattcttcccggacagggcgcacttgcgcctgcggaaccctgtgaacagcgcgtacctttacgccatggaggacggggtggggatcaccctgcgccggcgcagtgggacacggaacgaggcgtgggcggtgcaccgcgtcgagctcaacggcgccaactacgtcctcctccacagcgccgcctacggccggtacctcgccattgtatgcgaggaagcggctccggcgccgtcttcgggccaaggtgcaggcgccagccacatctgccgcgtcgtccagcgcgcctacgacgccccagggcaggacgacgtgctgtgggaggtccgctgcgtggacgacgggtccggcgaagtccagatgcgcaatcccacgtacggcgccacgggctactacgatggccagaaaaaatggatgcgagtgatggtcgaggccattcccccaagagcggacccgcctgaacatcctctgcctgtgatttcgtggatgagatggcaacagcagttccccatcgttggccggctccgccgccagtgccagggagtccaggggcaaccggtgcttcggcggaggatctactatgtgcgggcggacgatcaagggaacttcaactcggacgcctggaggatgctatggttccttgaccggtccgtgtggcacctgaggagagatttagcagcccaggtgggtgtgggtgaagccaacgccctagacatcacgctgtgcgtgcgggccggctccaacggccggttgactcctcttgtcatcgacctgccttccgatgagcaggccatgcacgtcgtcgtcctcaacactgattcaccagatgttggtgcaccgtagaggaatattagaccaagacttctgacagcaacatcgcagttcatctcttcagaaatgagcagttccctgcttcggattcagtgagatgacaactgatatttgttctgatagcttcagaagactcagtcagtccatttgggatttatgtgttccgccaatcggaagcgttttgaactggccttcaagtttcaaaacttcaaaactgctggaggcgttctgtggaaacattgtttgaactcacttttttcttgatatactagatgaattctccgcgcgttaaagttgatacaaattcttctcaaaaagttgatgaaagctacaataaaagtttaattaatactacctcagttccaaattaaa

SEQ ID NO: 82174 - DNA, 1348 bp, Zea Mays
atatgatctgggtcggtcgatgaagtcttatcaatccaatgaaactttagctatgcattttcaattcaactagtacatttttagtgtactgaattggcaatatctgttagcctctactgaactctttctttattacttgaaattgggtttactctgtagcattacaacaacttcagattatagcatttttcactttcatatttgtcgtattcttgtcctccatgttgtcagcactgtgtggtctattcatttctttgtttctataggaaacttggcttgttttaattgtgttctattgatgtagttgtttaaataacttggttttaaactcattgttaaaggctgaaacgttcctatgatatagaagtaaatagtgatctgttagaacaacgataaagtgatttttcccttgaataccaatatatattgtttgtttgtatgtcatgcgaattgaattatatgtgcttttctctgtccttctttgtagcatacgtttgaagtatattcaatggaatgtttattagtactttgatttgagaatttgttaatgtaaccacacaaagcctcgtcagtagatgttgttgtagaatgtttctactgttttttattaatattgttcaacttgctgcttcttaaatctataagggctagttttgaaattcaaatcctctctaggattattttcccctcaatcccttccaatcccggaggggatttgagttataaactagctctaagggctgatttggtgaccagggatcacagggttggaggggattgggggagaaattagttcattagctctaagggctgatttggtgacccgtgatccccttgtcaccaaatcaatcctaattgtaattttatccacctgttttctttgatcactgaaatttatgtgtagtgatgctgtattttggacaccttctagattttttttgtgaatctcggcctcattagtttcacaaggcatacatgtgaaataacctgctgccttcatttctgttggccagcagatgttgaatatgacaatggggggcctgcctgttctggactgatggaaaactatcgcccatttttatatcaacaagcctcataattcattttatccagcaagaattgaaaagaggtgctcctctgggcaggtttggtaggtgagacctgtctcactggcttcaggttggaactagactctcgctgggaacggttgccttagtttttagactccagtactccactcggtgtggtagcattcgggtcctctggattcttagttcaatctgttccaccgtttattatttgggtacagtgtaggtgttcatatatatatatatatatatatatatat

SEQ ID NO: 82175 - DNA, 910 bp, Zea Mays
agatccacaacaaatagcgaaaccctagcccaaactcgaccgcctctgctataagtagctccactctctctcctccaagcctaccccagccgccgccgccgccaccgccacctgccccagcgcgccgccgccgcagccaccatgggtcgcgtccgcaccaagaccgtgaagaagacctccaggcaggtgatcgagaagtactactcccgcatgaccctcgacttccacaccaacaagaaggtgctcgaggaggtctcgattctgccctcgaagcgcctccgcaacaaggtggctggcttcagtacccacctgatgcgccgcatccagcgcggcccagtccgcggcatctcgctcaagctgcaggaggaggagcgcgagcgccgcatggacttcgtgccggagaagtccgcgctcgaggtcgaagagatccgcgtcgacaaggagaccatggagatgctcgctgccctcggcatggccgacctgcccggcgttgagcgccaggctgaggtctccaacgcccccgcctacggccgcccgcagtacggtggtccccgccgtgaccgcgtttagacttcgcgatgttgaatatgacaatggggggcctgcctgttctggactgatggaaaactatcgcccatttttatatcaacaagcctcataattcattttatccagcaagaattgaaaagaggtgctcctctgggcaggtttggtaggtgagacctgtctcactggcttcaggttggaactagactctcgctgggaacggttgccttagtttttagactccagtactccactcggtgtggtagcattcgggtcctctggattcttagttcaatctgttccaccgtttattatttgggtacagtgtaggtgttcatatatatatatatatatatatatatat

SEQ ID NO: 82176 - DNA, 2213 bp, Zea Mays
agtctgtggggggatcctagtgtgtgatgtacttcttctttttggatccagtctgtaaactccgctgcgacggatgttcagactgcgggggggtgttagattatatgtggttaggcccatggttagccctaatgatatacaattatttacctctaacactttttcttttatataaacatgacagctatccctttaaaattttctatatttatttcattaattttttaatctcagtatgcatcaacatttttgggattttctgcagatatcaatatatgatttacgcatgtcttctcctctgagagttaaggatcacatgtatggtagcccaatattaaatatcaaatggcaccagacacttaattctactgaacctaaactgatcactgctgataagcacatagtgagaatctgggatcctaatacaggaaataacatgactagcattgaaccagatggtggtgctatcaatgatgtctgtgtcttccggaatagtggtttagtgctattagccctggacaatagccagatacctgcccacttcattcctgcgctcggcccagctccaaagtggtgttcacatcttgataacttaactgaggagatggaagagaaaccagatacaacactgtttgatgagtacaagttcttgactaaagaagagatggagcgactgaaccttactcaatacattggcagcagtgctgtaagagcatatttacatggatttattgtacgttatgaactatacaagaagcaacgggcagcagttgctcctgttgaatacgagacaattaaagatgagataaagaaaaagaaattagaagctcagagaaaatctcgtataacgcaagtcgtcaaaataccgaaggttaacaggcagattatggacagtataagggaagatgaaatagatcttgatatggagaatgttgataaatcaagtattaagaagaagaaaagaaaactagaactgaataaggccattttggatgatgatcggttcaaagaaatgtttgagaataaggattttgaaattgatgaagaatcaaaagaatacctcgcacttcatcctcaggcagccacaaaggagcctcgcctgattgaagaacattttgatagtgttagcgaggacgaccaacaatctgatggtaacacatctgacactctagcggaatctgacagtgatgatgtcatgcataattcaaagcgtataaggttatacgaggtcaaggatgaacaccatgcggaagcatttttgaacagcgtctctttatcaaacgaggatgctgctccccttgaggataggatagctgccctggaaaggaaacagaactccaaagcacttgatgcggtcaagtacgggcctggtggctcacgagagatttcgtttttctctaaaagccggagaaggcacaaggaagagtcgtctagcgacgacgaacccaagggtgtcaaaaagagagctgtgcagccgctgggcttgaagcagggaaaagctgagttctatatgtttggcggaaatcgtggcagaggtagaggcggtagtggcagaggtagaagcggccgaggaagaggtggaggtggaggtggaggaggaagaggtggaggaagaggtggaggaggaagaggtggaggtaggggcaggggcagaggatgaatggggcctgtaacattgaccccgttcctgcctttgcaggggttttggtaagcttgaaatggatggatcctgcacatgcagtgggtagaaagtgtgttccttcacaacataggcaagagctagagtaactgaggattgctgcttcagaatttttgggaagagaactttgttagaagacaatattacatatcttttggtctaccttgtaacggattgttgcattctggtcgcagctggaaggcttctgaattgcgactaaaatcttgggatgatcttcagaagatgtggtatgttcttctaaaggaaaagaacatgctaatgacacagcgtcagatgctgcaatcagatgggttcccaaatccagaacgaatttccaaggtaaagaaatcaatgtgccggataaagcatgtcttgactgagagggctatagctgagcccgatccaaggagatcttcggaaatgaagcggatgataaacgccgttcttttcagggatgacgctgatcatcgtcgcgcaccgccgcgccggcggcgagggtggtggcggtggtgcc

SEQ ID NO: 82177 - DNA, 2078 bp, Zea Mays
agtctgtggggggatcctagtgtgtgatgtacttcttctttttggatccagtctgtaaactccgctgcgacggatgttcagactgcgggggggtgttagattatatgtggttaggcccatggttagccctaatgatatacaattatttacctctaacactttttcttttatataaacatgacagctatccctttaaaattttctatatttatttcattaattttttaatctcagtatgcatcaacatttttgggattttctgcagatatcaatatatgatttacgcatgtcttctcctctgagagttaaggatcacatgtatggtagcccaatattaaatatcaaatggcaccagacacttaattctactgaacctaaactgatcactgctgataagcacatagtgagaatctgggatcctaatacaggaaataacatgactagcattgaaccagatggtggtgctatcaatgatgtctgtgtcttccggaatagtggtttagtgctattagccctggacaatagccagatacctgcccacttcattcctgcgctcggcccagctccaaagtggtgttcacatcttgataacttaactgaggagatggaagagaaaccagatacaacactgtttgatgagtacaagttcttgactaaagaagagatggagcgactgaaccttactcaatacattggcagcagtgctgtaagagcatatttacatggatttattgtacgttatgaactatacaagaagcaacgggcagcagttgctcctgttgaatacgagacaattaaagatgagataaagaaaaagaaattagaagctcagagaaaatctcgtataacgcaagtcgtcaaaataccgaaggttaacaggcagattatggacagtataagggaagatgaaatagatcttgatatggagaatgttgataaatcaagtattaagaagaagaaaagaaaactagaactgaataaggccattttggatgatgatcggttcaaagaaatgtttgagaataaggattttgaaattgatgaagaatcaaaagaatacctcgcacttcatcctcaggcagccacaaaggagcctcgcctgattgaagaacattttgatagtgttagcgaggacgaccaacaatctgatggtaacacatctgacactctagcggaatctgacagtgatgatgtcatgcataattcaaagcgtataaggttatacgaggtcaaggatgaacaccatgcggaagcatttttgaacagcgtctctttatcaaacgaggatgctgctccccttgaggataggatagctgccctggaaaggaaacagaactccaaagcacttgatgcggtcaagtacgggcctggtggctcacgagagatttcgtttttctctaaaagccggagaaggcacaaggaagagtcgtctagcgacgacgaacccaagggtgtcaaaaagagagctgtgcagccgctgggcttgaagcagggaaaagctgagttctatatgtttggcggaaatcgtggcagaggtagaggcggtagtggcagaggtagaagcggccgaggaagaggtggaggtggaggtggaggaggaagaggtggaggaagaggtggaggaggaagaggtggaggtaggggcaggggcagaggatgaatggggcctgtaacattgaccccgttcctgcctttgcaggggttttggtaagcttgaaatggatggatcctgcacatgcagtgggtagaaagtcgcagctggaaggcttctgaattgcgactaaaatcttgggatgatcttcagaagatgtggtatgttcttctaaaggaaaagaacatgctaatgacacagcgtcagatgctgcaatcagatgggttcccaaatccagaacgaatttccaaggtaaagaaatcaatgtgccggataaagcatgtcttgactgagagggctatagctgagcccgatccaaggagatcttcggaaatgaagcggatgataaacgccgttcttttcagggatgacgctgatcatcgtcgcgcaccgccgcgccggcggcgagggtggtggcggtggtgcc

SEQ ID NO: 82178 - DNA, 2807 bp, Zea Mays
catcgatcgatccagaacccaaccccaatccaacggctgcgagagctctcgtcgcgccgccgccgccacctgacagtctcctctcccctgcgcgcgcacgacgagcgccgggccgggacagccgccaactccatccaacttccttaaaccctagcgccagcagcaggcaaccagcgccgacgaggaggagcgcggagtagaggggctccggcgaccgcgtcggagatggcggcgagccacggcgcggggtcgctcaagtccacctccatcaacggggtcaagctctactcgctcaccggcggccgctatgtcgccccctgggtcgtcgcgaagaagaagcgcgccctccgcaaggacaaagagtatcagcggaggctggatttgatccacgacctgaggttcgagaccgccaccaccaagatcaagctgacgcccgatgaccagtacctgatcgcctcaggtatttaccccccgcaagttaaagtctacgagttgaaggaattgtcgatgaagttcgagcggcacatgatctcagaaattgtagatttccagatccttggtgatgactattccaaactcgcgtttttgtgtgctgatcgttctgtaaatttgcacgctaagtatggaagccactatagcttgagaattcccaagcagagtgggaagggacatggcctacgattgctggtcctgcgacttgctatgtgctgcttcatcaccagatctgtacaggataaacctagagcagggacgattccttgcttctctttcctccgaatcaccagcaataaatgcggttacacgaagtaagatccatgggcttgttgcttgcggtggtgaggatggtgcagttgagtgttttgatatgaggaaaaaaacttctgttggcagaattaatattccagctgttagttctgaagattattctcaggaggtcacgtctttgcaatttgatgaagatcaaggatactttatggcagtggggaccagtacaggaaagtatgcatcaacatttttgggattttctgcagatatcaatatatgatttacgcatgtcttctcctctgagagttaaggatcacatgtatggtagcccaatattaaatatcaaatggcaccagacacttaattctactgaacctaaactgatcactgctgataagcacatagtgagaatctgggatcctaatacaggaaataacatgactagcattgaaccagatggtggtgctatcaatgatgtctgtgtcttccggaatagtggtttagtgctattagccctggacaatagccagatacctgcccacttcattcctgcgctcggcccagctccaaagtggtgttcacatcttgataacttaactgaggagatggaagagaaaccagatacaacactgtttgatgagtacaagttcttgactaaagaagagatggagcgactgaaccttactcaatacattggcagcagtgctgtaagagcatatttacatggatttattgtacgttatgaactatacaagaagcaacgggcagcagttgctcctgttgaatacgagacaattaaagatgagataaagaaaaagaaattagaagctcagagaaaatctcgtataacgcaagtcgtcaaaataccgaaggttaacaggcagattatggacagtataagggaagatgaaatagatcttgatatggagaatgttgataaatcaagtattaagaagaagaaaagaaaactagaactgaataaggccattttggatgatgatcggttcaaagaaatgtttgagaataaggattttgaaattgatgaagaatcaaaagaatacctcgcacttcatcctcaggcagccacaaaggagcctcgcctgattgaagaacattttgatagtgttagcgaggacgaccaacaatctgatggtaacacatctgacactctagcggaatctgacagtgatgatgtcatgcataattcaaagcgtataaggttatacgaggtcaaggatgaacaccatgcggaagcatttttgaacagcgtctctttatcaaacgaggatgctgctccccttgaggataggatagctgccctggaaaggaaacagaactccaaagcacttgatgcggtcaagtacgggcctggtggctcacgagagatttcgtttttctctaaaagccggagaaggcacaaggaagagtcgtctagcgacgacgaacccaagggtgtcaaaaagagagctgtgcagccgctgggcttgaagcagggaaaagctgagttctatatgtttggcggaaatcgtggcagaggtagaggcggtagtggcagaggtagaagcggccgaggaagaggtggaggtggaggtggaggaggaagaggtggaggaagaggtggaggaggaagaggtggaggtaggggcaggggcagaggatgaatggggcctgtaacattgaccccgttcctgcctttgcaggggttttggtaagcttgaaatggatggatcctgcacatgcagtgggtagaaagtgtgttccttcacaacataggcaagagctagagtaactgaggattgctgcttcagaatttttgggaagagaactttgttagaagacaatattacatatcttttggtctaccttgtaacggattgttgcattctggtgggtgtctatgggtacggtatagcgttttttttttgtaataggcaacataactgctggcattttcatttttgagtactgaaggctctccaaagccatgattagtagacattcgttcatagaaaacagaaccaatattaatatctaaaaataga

SEQ ID NO: 82179 - DNA, 798 bp, Zea Mays
agtctgtggggggatcctagtgtgtgatgtacttcttctttttggatccagtctgtaaactccgctgcgacggatgttcagactgcgggggggtgttagattatatgtggttaggcccatggttagccctaatgatatacaattatttacctctaacactttttcttttatataaacatgacagctatccctttaaaattttctatatttatttcattaattttttaatctcagtatgcatcaacatttttgggattttctgcagatatcaatatatgatttacgcatgtcttctcctctgagagttaaggatcacatgtatggtagcccaatattaaatatcaaatggcaccagacacttaattctactgaacctaaactgatcactgctgataagcacatagtgagaatctgggatcctaatacaggaaataacatgactagcattgaaccagatggtggtgctatcaatgatgtctgtgtcttccggaatagtggtttagtgctattagccctggacaatagccagatacctgcccacttcattcctgcgctcggcccagctccaaagtggtgttcacatcttgataacttaactgaggagatggaagagaaaccagatacaacactgtttgatgagtacaagttcttgactaaagaagagatggagcgactgaaccttactcaatacattggcagcagtgctgtaagagcatatttacatggatttattgtacgttatgaactatacaagaagatgagttacagaaaagacgcaaaacagtatttaccaggatt

SEQ ID NO: 82180 - DNA, 1053 bp, Zea Mays
gacacgcgggccatcccctccccatcgatcgatccagaacccaaccccaatccaacggctgcgagagctctcgtcgcgccgccgccgccacctgacagtctcctctcccctgcgcgcgcacgacgagcgccgggccgggacagccgccaactccatccaacttccttaaaccctagcgccagcagcaggcaaccagcgccgacgaggaggagcgcggagtagaggggctccggcgaccgcgtcggagatggcggcgagccacggcgcggggtcgctcaagtccacctccatcaacggggtcaagctctactcgctcaccggcggccgctatgtcgccccctgggtcgtcgcgaagaagaagcgcgccctccgcaaggacaaagagtatcagcggaggctggatttgatccacgacctgaggttcgagaccgccaccaccaagatcaagctgacgcccgatgaccagtacctgatcgcctcaggtatttaccccccgcaagttaaagtctacgagttgaaggaattgtcgatgaagttcgagcggcacatgatctcagaaattgtagatttccagatccttggtgatgactattccaaactcgcgtttttgtgtgctgatcgttctgtaaatttgcacgctaagtatggaagccactatagcttgagaattcccaagcagagtgggaagggacatggcctacgattgctggtcctgcgacttgctatgtgctgcttcatcaccagatctgtacaggataaacctagagcagggacgattccttgcttctctttcctccgaatcaccagcaataaatgcggttacacgaagtaagatccatgggcttgttgcttgcggtggtgaggatggtgcagttgagtgttttgatatgaggaaaaaaacttctgttggcagaattaatattccagctgttagttctgaagattattctcaggaggtcacgtctttgcaatttgatgaagatcaaggatactttatggcagtggggaccagtacaggaaaggctattgcatgtttgacctttatgttctttc

SEQ ID NO: 82181 - DNA, 691 bp, Zea Mays
gggcagattactgtacgcggtgggccgttctttcctttggatctggtaggcggagcgatatattgcactggcggacttaggagtggaggacttgcaaaaatgtaagtcagcgtgcgttggctcatatgagcagagcttgcttccgcatctcgctactctccgtgccttgctcgccggtctgctagctgcagtacccacgggagccggaggtcatcaaggcggcgtcggtaaaccatgtccatggccacaggccacagctgagcttcctccgctgcccgccactcgtgccatggcaacgacagatattgaaagcatgcaagtagagttgctggccggttattacaaatcgaggttcagcgtgggatataaataatggattttcctgtgtgtattagggttgttgtggcggctgcttcattcgtttattcttgtgacttgttgctagcgattggagtgagctgcttttgtgtgtgtgtgtgtgtcaccatttcgtgctatcagacgtacgacatggaaatgtggttgactactatatatggtacacatacatataataataatcatctgtgttggtgaacgtgcctctgatgattaattactggtgttttatcaatttgatttgcgattcttgtgtgtggttgctgcacgtactctggcacatgcaaacgtgtgcgatataaatggatgtggg

SEQ ID NO: 82182 - DNA, 1646 bp, Zea Mays
gaaagaataccttttttatgatgttgcattcatagtcataagagtggatgcttcactccagggttcaccagaatctcccaaatctgttgtactggtcacaggggagggggaatataacatggtatccctgcgtaaaaccatcagagcctaccttttggaaatgggctccccattcttgccatgtagagctcggtcaggtcgctttgtggtaaaggattactctcttaagatgtggctgaaagattctcctttctgcatggaccttgagttaaaagatgctccagctcatcctaagttaaactcaatgaagctgatcgaaggatatttcatgagagctggttttgtatcagcatttaaagatatacatgagagacttggggaagtatggccaaaaaagttttccaggttagctctgttgtcagaagaatgtagggatgaggttatcaaggctgatatacaaggaaggaaagaaaaactggagagaatgaagaagaagggtattgtcacagcaagaaaatctaaaacaagagcacgacgaggaaaatttgttaggcagcagaaataaaacacgaaagtagtgttggagtagtcgtggcctgttattttttgcttcaacacatgacattttctcaaacagcacctggcatctacatgaaaattttctgataggggtggggatggaggtgtggaaacaaagaatgaattatgattgctgctattttagcattggttacggttggttctgtaaacttcttactggaacaaacgatgtggttcatgttctccaagatttactgagcagcgggcacagctgggtaaccagctcatactgagatgaacaagctttggatattattcggcagtgtgcacctatgcagtgcgccttgggctgcgctgatgctttcatggggagcgcactagtgtggcagtaagatcggtgattgctgcagtgtggccttgccatggaagctgcgagcttctacaaacaaatgttgagggccggtgagaaggaaaatggctctgcttcattaatgtgctcagcatttgatgcccttgtgagtctcgagcatggcaagatggttcattgtcgcagcatgaagtctaggttttgttttgaaatgatgcacttcaagtgtggcaggctggcagctcagttaatactcaaattgtcttctaatgggaaaataggtctagtggagtggtgagagttttctccctaagtcatcaggtcatgagttcgacatagcctcttcgtatttacggctgaatgttgccttggtttatccctttccaagagccaactcatgtgggagccttcagcactaagtctgttctttcacttagcttatctttatgctgctttgaatccgataatttcatttgcggcttatgacaaggaaaaacttattgaacctgcaaaatttcatcctcaatatttgacaactataaatttggtccaactttgttcccaacttaatatgttcatttaatgtagtttgaaaacgcaggagagctacattcattgtattagagagagagaaagcagccatacaacaccagcttctcctatggggacatatatataagaggttgttacagactcaagagactagccttataaaaagaaatgacaagacctgactgag

SEQ ID NO: 82183 - DNA, 1752 bp, Zea Mays
atatggtcctaggctccaggtcaagtcaaagatctatttgtgtgatgctataagagttaagcgtggcacaaaaggactggggcgctgacttccggaagctgtctgctggggctgcacttgttggtcttactttgtggcttgatcacatgcaagatgcttcactccagggttcaccagaatctcccaaatctgttgtactggtcacaggggagggggaatataacatggtatccctgcgtaaaaccatcagagcctaccttttggaaatgggctccccattcttgccatgtagagctcggtcaggtcgctttgtggtaaaggattactctcttaagatgtggctgaaagattctcctttctgcatggaccttgagttaaaagatgctccagctcatcctaagttaaactcaatgaagctgatcgaaggatatttcatgagagctggttttgtatcagcatttaaagatatacatgagagacttggggaagtatggccaaaaaagttttccaggttagctctgttgtcagaagaatgtagggatgaggttatcaaggctgatatacaaggaaggaaagaaaaactggagagaatgaagaagaagggtattgtcacagcaagaaaatctaaaacaagagcacgacgaggaaaatttgttaggcagcagaaataaaacacgaaagtagtgttggagtagtcgtggcctgttattttttgcttcaacacatgacattttctcaaacagcacctggcatctacatgaaaattttctgataggggtggggatggaggtgtggaaacaaagaatgaattatgattgctgctattttagcattggttacggttggttctgtaaacttcttactggaacaaacgatgtggttcatgttctccaagatttactgagcagcgggcacagctgggtaaccagctcatactgagatgaacaagctttggatattattcggcagtgtgcacctatgcagtgcgccttgggctgcgctgatgctttcatggggagcgcactagtgtggcagtaagatcggtgattgctgcagtgtggccttgccatggaagctgcgagcttctacaaacaaatgttgagggccggtgagaaggaaaatggctctgcttcattaatgtgctcagcatttgatgcccttgtgagtctcgagcatggcaagatggttcattgtcgcagcatgaagtctaggttttgttttgaaatgatgcacttcaagtgtggcaggctggcagctcagttaatactcaaattgtcttctaatgggaaaataggtctagtggagtggtgagagttttctccctaagtcatcaggtcatgagttcgacatagcctcttcgtatttacggctgaatgttgccttggtttatccctttccaagagccaactcatgtgggagccttcagcactaagtctgttctttcacttagcttatctttatgctgctttgaatccgataatttcatttgcggcttatgacaaggaaaaacttattgaacctgcaaaatttcatcctcaatatttgacaactataaatttggtccaactttgttcccaacttaatatgttcatttaatgtagtttgaaaacgcaggagagctacattcattgtattagagagagagaaagcagccatacaacaccagcttctcctatggggacatatatataagaggttgttacagactcaagagactagccttataaaaagaaatgacaagacctgactgag

SEQ ID NO: 82184 - DNA, 1715 bp, Zea Mays
ctataccgcaaaatttcatttgaacgtggcacaaaaggactggggcgctgacttccggaagctgtctgctggggctgcacttgttggtcttactttgtggcttgatcacatgcaagatgcttcactccagggttcaccagaatctcccaaatctgttgtactggtcacaggggagggggaatataacatggtatccctgcgtaaaaccatcagagcctaccttttggaaatgggctccccattcttgccatgtagagctcggtcaggtcgctttgtggtaaaggattactctcttaagatgtggctgaaagattctcctttctgcatggaccttgagttaaaagatgctccagctcatcctaagttaaactcaatgaagctgatcgaaggatatttcatgagagctggttttgtatcagcatttaaagatatacatgagagacttggggaagtatggccaaaaaagttttccaggttagctctgttgtcagaagaatgtagggatgaggttatcaaggctgatatacaaggaaggaaagaaaaactggagagaatgaagaagaagggtattgtcacagcaagaaaatctaaaacaagagcacgacgaggaaaatttgttaggcagcagaaataaaacacgaaagtagtgttggagtagtcgtggcctgttattttttgcttcaacacatgacattttctcaaacagcacctggcatctacatgaaaattttctgataggggtggggatggaggtgtggaaacaaagaatgaattatgattgctgctattttagcattggttacggttggttctgtaaacttcttactggaacaaacgatgtggttcatgttctccaagatttactgagcagcgggcacagctgggtaaccagctcatactgagatgaacaagctttggatattattcggcagtgtgcacctatgcagtgcgccttgggctgcgctgatgctttcatggggagcgcactagtgtggcagtaagatcggtgattgctgcagtgtggccttgccatggaagctgcgagcttctacaaacaaatgttgagggccggtgagaaggaaaatggctctgcttcattaatgtgctcagcatttgatgcccttgtgagtctcgagcatggcaagatggttcattgtcgcagcatgaagtctaggttttgttttgaaatgatgcacttcaagtgtggcaggctggcagctcagttaatactcaaattgtcttctaatgggaaaataggtctagtggagtggtgagagttttctccctaagtcatcaggtcatgagttcgacatagcctcttcgtatttacggctgaatgttgccttggtttatccctttccaagagccaactcatgtgggagccttcagcactaagtctgttctttcacttagcttatctttatgctgctttgaatccgataatttcatttgcggcttatgacaaggaaaaacttattgaacctgcaaaatttcatcctcaatatttgacaactataaatttggtccaactttgttcccaacttaatatgttcatttaatgtagtttgaaaacgcaggagagctacattcattgtattagagagagagaaagcagccatacaacaccagcttctcctatggggacatatatataagaggttgttacagactcaagagactagccttataaaaagaaatgacaagacctgactgag

SEQ ID NO: 82185 - DNA, 452 bp, Zea Mays
aaaatataagaactataaatcagtcactagaaccaatcaccgctcaagctcacggcctcacctcacccacccgcccgcctcgcctccatccacagcgccacagcggccacgccatctccgtctctctgctcacctccacttcttccgttcttcttcaccgtctccgtccttgacacgggcgcacccgtccccctccgacttccccgtggcctcgtcccgatccgtagtcaactcgaccttgttcaagagggtgagcccgaaccacggcgcgcgggagggctctttttattttgacccaccggaggacagccgccccatgggctggtcgcctgagcgcgctatgtatcagctcatcgaccggcggaaaggatggctcatgtgagagagagacaggcaggaccgcagcacggcggtgccggggagcgcgcagcatgccctgcgttaggaagttg

SEQ ID NO: 82186 - DNA, 427 bp, Zea Mays
aaaatataagaactataaatcagtcactagaaccaatcaccgctcaagctcacggcctcacctcacccacccgcccgcctcgcctccatccacagcgccacagcggccacgccatctccgtctctctgctcacctccacttcttccgttcttcttcaccgtctccgtccttgacacgggcgcacccgtccccctccgacttccccgtggcctcgtcccgatccgtagtcaactcgaccttgttcaagagggtgagcccgaaccacggcgcgcgggagggctctttttattttgacccaccggaggacagccgccccatgggctggtcgcctgagcgcgctatgtatcagctcatcgaccggcggaaagattccaaatacagttgaatttgctgactgaattggtcgaacaaagcagaagaaaattcg

SEQ ID NO: 82187 - DNA, 1404 bp, Zea Mays
aaaatataagaactataaatcagtcactagaaccaatcaccgctcaagctcacggcctcacctcacccacccgcccgcctcgcctccatccacagcgccacagcggccacgccatctccgtctctctgctcacctccacttcttccgttcttcttcaccgtctccgtccttgacacgggcgcacccgtccccctccgacttccccgtggcctcgtcccgatccgtagtcaactcgaccttgttcaagagggtgagcccgaaccacggcgcgcgggagggctctttttattttgacccaccggaggacagccgccccatgggctggtcgcctgagcgcgctatgtatcagctcatcgaccggcggaaagtggaaagcatgagcttctgaagttatcctctaccagagtaatcagcattacagagtatttcaaagaagtgtctttactggacagggcacctaggaaccgtctcgttgaagatattgacgataacctcccgtttttaatccatgataggcaattcgtgaagctcttcaaggctcttgtgggtaagtatcctgaaagggatgcaatcttcaagctacctaagtcacttgatctgcattttaaattccttgagttgcttattgtaaaggactatcgtgtgatatatggtccagtcctcttccccaagcttttgatctctataatctattctggtgctcatggtgagagggcaaagaagcacattgtgggcagtgaagatggaagtgatgagacgctgatatatgaagttagtgatgacactaaagatctcaaagcgtcgaatgtcccactgaaagttagaaattttatgggcaacaaagagctcagtgatgagaccaaaagtactaccgcagaaggaaacgttgagattgttccaggagatgagctgacaactactcttttggacgctgtgaatactattcagcgcactactggatatggcttcttaagctgctacaagagaaagatatgcacattccaaactctcgccctcgatctcgctcctctccgctctcgcatcatgacgctgcgactccgctcccgtcctcgtgctcactgctacggagtcagatccagttggggtcatcaaggccgccggaccctccgtcgcggttacaggagggtgatgggaagggctcgtgcttccacttcctctgctccatccggcaccgatggcggcaggtcagggcttcctgctggtggcgttggcgatcctgacagtgcaggggcgttcatgagcctgaggtcggggcctaggatcaggtggtgttggaggccagatgcgtgcgcggtgcgcgccagccatcggcgccggtcggtgcgccgcgacgtgtggacgcgtgatctcggaagacctcacgcatgggacacacacatctga

SEQ ID NO: 82188 - DNA, 2386 bp, Zea Mays
aaaatataagaactataaatcagtcactagaaccaatcaccgctcaagctcacggcctcacctcacccacccgcccgcctcgcctccatccacagcgccacagcggccacgccatctccgtctctctgctcacctccacttcttccgttcttcttcaccgtctccgtccttgacacgggcgcacccgtccccctccgacttccccgtggcctcgtcccgatccgtagtcaactcgaccttgttcaagagggtgagcccgaaccacggcgcgcgggagggctctttttattttgacccaccggaggacagccgccccatgggctggtcgcctgagcgcgctatgtatcagctcatcgaccggcggaaagggttgattttgcgtccacattatagctgagcaactcatgttagaaattttctcatttccatgatccaatttctagcaagaaagatttcatgtatcaattgactagaatagagaaagaagctaattgagtaattctaaccggcctggtggctaaaccaactgataacaagggcctatgatgtaatcaagtagctaaaaatttatactaactacacttacgaagtcacacgaattttcttctgctttgttcgaccaattcaatcagtaaattcaattgtatttggaacctgcgaagaaacaattagggttagacacttcaactccccagtaaatttgaacaagagaaataacatagagttctcaaactttagttatagcaagaaaaagaaatttcaatttttgcaattcaaatggtaatttggtaatttttgtattaaattattatattaaccctagctcatatatagatggccaattttcagttatactgtttccatgcagtagtattcaattttcaattgaatacaagcatctgaatttttaatgaataacatcagcgaacatatcattttactgcataataattagttaaaataacttcaacagctacaaatgcacttcctagcaaaatttacctaagattagagttatgcatcccaacgccgtttaaaaaagcatatagatctattggctggaccgtttaaattagtatctgatcctaatgttaaactattgttagttctttacgccattgatcctatgttacttacagtacgcccgagatccgaaaacttcctagcgccggtcctcgccgctcgctcggctgagatggcggctttaggtcgcctttcacgtttgcttagttctaccgtccaccgctctggaggccttgtgcgcgccttctccatgttggccgaggtcgtcgatgttgccgatgtctccgatctgtacctcccacgtgacgctcattgctactacatctttggaaagcatgagcttctgaagttatcctctaccagagtaatcagcattacagagtatttcaaagaagtgtctttactggacagggcacctaggaaccgtctcgttgaagatattgacgataacctcccgtttttaatccatgataggcaattcgtgaagctcttcaaggctcttgtgggtaagtatcctgaaagggatgcaatcttcaagctacctaagtcacttgatctgcattttaaattccttgagttgcttattgtaaaggactatcgtgtgatatatggtccagtcctcttccccaagcttttgatctctataatctattctggtgctcatggtgagagggcaaagaagcacattgtgggcagtgaagatggaagtgatgagacgctgatatatgaagttagtgatgacactaaagatctcaaagcgtcgaatgtcccactgaaagttagaaattttatgggcaacaaagagctcagtgatgagaccaaaagtactaccgcagaaggaaacgttgagattgttccaggagatgagctgacaactactcttttggacgctgtgaatactattcagcgcactactggatatggcttcttaagctgctacaagagaaagatatgcacattccaaactctcgccctcgatctcgctcctctccgctctcgcatcatgacgctgcgactccgctcccgtcctcgtgctcactgctacggagtcagatccagttggggtcatcaaggccgccggaccctccgtcgcggttacaggagggtgatgggaagggctcgtgcttccacttcctctgctccatccggcaccgatggcggcaggtcagggcttcctgctggtggcgttggcgatcctgacagtgcaggggcgttcatgagcctgaggtcggggcctaggatcaggtggtgttggaggccagatgcgtgcgcggtgcgcgccagccatcggcgccggtcggtgcgccgcgacgtgtggacgcgtgatctcggaagacctcacgcatgggacacacacatctga

SEQ ID NO: 82189 - DNA, 1366 bp, Zea Mays
cctggagtggagaccccatggtgtaggagtaggagcaggagatagcgcgggcggggaggggaaggagacaagtgaactcagagaagaactagcgcggcgggcgagcattgcaagccgagctgcaggggcccggagcggagaccggaggagggagacgtcgcttgcgatgtcaccggcagcatccgccgccgaaaccgccgtcgtcgtcgtcgtcgcaagcgtcccgagccagcagcagagcagccaccgcgccgcggcgccgtccgtcccgtcgtcctacgccgtctgggagaaggagcggtaaggcgtctgcagctttacgacgacgtcgtcgtcgtctgccacctacctactgctgctgctgctgcaaggggaagtaaaaaggaacggaaagggggaaggcatggaggtggaggcggccaagtgcgagtgctgcgggttcacggaggagtgcacgccggcgtacatcgcggcggtgcgcgcccagtacctgggccgctgggtctgcggcctctgcgccgaggcggtgggcgacgagatccggcgcgaggggaccatcaccacggccgaggcgctcgaccgccacgtcgcgttcgcgcgcgcgccgcgctcccggagggcgcccgcggaggacgacctcgtggcggccgtggcgcggctgctccgccgctgcctcgactcgccgcccgcgtcgcctgcgccgccgccacagagccggaaggtggccgcagggcccggctgccccgatggagccgacgcttgaagctgcttgcttaattggcggcaatgattggggggtcgccttcccggagaataattcgtgccggtatcatttgacgagagagggggcaaatcacgctccgtgtgtgatcgagcatgaagctattgttaagcatatcactcattggagtacatcaggacaaacactgttccattagttctgcatattcaggttgtaagaatattgtattggagtagtcaagtgctatcttcttgaattcaattcaatcgaagtaatttgatacgattgtgtccatgtatgcaaactaccatgtaacttgctcattgtgtttaggatatttcgtacctttttatcggtgttgggacccgaggggctaaccaaccagtgaaatattgatgtgcgcccctaacccagatgttaatgcaaattaacacaagttttttttatcctggttcgggcaagaagagaccctacttccagcagtgagatgtgatttatattactttcacctaagtgctcgcagtagtgaatacaagctaagccagagagggaaagatccaagtcactggggttgattgaggcaagtgccaataccgtggtggaggagaaaaatgtgaagtgttc

SEQ ID NO: 82190 - DNA, 1286 bp, Zea Mays
cacggatgatctggtcctgcacgtcaatacagacgatatgtttcccccaaatctaaggcgtcgccagccctggcaaagcgcttgccgctgctcccctcttccgtttccagcgccgccgccctccttccggttcctgttctccagcaccgccgttgaacctcctcccctctccctcgtgcttccctctctcatcctctctgccgcttccccgctctccccaaactactctgtgccccgtcagatcgacctggactttggcggcagctacttctagaacgcggcggcacggcagcaagccagcaaggagaacgcggcggcacgggcgtgctgctacttctgcttcctctccgacgcttgctgttgagcggttcaagcagagctgatggctacatcagagccagtacaagagagtttggtggtgcactactcacaacctagtaggccccgggtcctccttgctgcttcaggaagtgtagccgctataaaatttgagagcctttgccgtagcttctctgagtgggcggatgtccgagctgtggccaccacgccatccttgcacttcgttgatagatcatctctaccaagtggcatcgttctttacactgatgacgatgaatggtctacctggaagaagataggagatgaagtcttacacatcgagctgcggaaatgggcagacgttatggtgatcgctccattgtcagcaaataccctggctaagatcgccggtgggttatgcgacaacctcttgacctgcatcgtgagagcgtgggactacagcaaaccgctctttgttgccccagccatgaacacgttaatgtggaacaacccattcacggagcggcatcttcacacaatcaaccaactgggcatagccttgatccccccagttaccaaaaggctggcctgtggcgattacgggaacggcgcaatggccgaaacctcgcagatccatacttccggccgaagacgtgtgtggacaagcgaggtcaggctcaccgaaaccggtggccaacaaaatggtgataacgctgagtcgcgaagccactgccgaatgcagataagcatcagggatatggaggatagcaacaaacagcatcaggtccagactgactttgaaggaagtgcctgcgcaacgtggcattctggttgtctcaagaagaatcaggactgcgaaaattgtattttgctgccgttcctggatggaatcgcggtgcgtagtaattggcgtcatatcatatataatatatatcgccgtttctctttcctgtgtagaaagaaaatga

SEQ ID NO: 82191 - DNA, 3762 bp, Zea Mays
gtagaatttagcaaaaaatatgtagttgtgggggcctagtgcataagagcttaaacgcatccatctaaccagtgcagctgcagttttattgtgttatatgttgatttcttatacttaatatatgtaaactattatttttaaaataaaaaatgtaaccgtgtcgtgcccgtgccagcactacgggtcgagatagtggcccaggcacggcactatactaattgaaccgggtcgtgcctggaccgtgctttttcgtgccgtgtctgggctggcccatcgtgttagtgctaaatggccatctataaccccgccgctactcgcctccaaatcggatgccgccggcgccaacctccgcagacggctagtcacatcctctgatcctatcgccctggtcctccctcctgtgcgacgcggccgttgcctcctactcacctcctcacccagctccctccacccctccgagatccgtcctaaatccgggaggcacgcgtgggctattggggccacgttgtggcggtcggccgacggtgttgtagagcagcagggagcgcgttgcggcggccagtgcctagctcagctgtgcaggaaggcgcgtgtaatcgacatcagagaggacagaggagaaggtctgaatttcggggaacaagcttcaaaatatacgacaggcaacgccccctacgacggcgcaaaggcgtcgtcaagcacccggtccgttccgtgtttcggaagccgccggcgagtcagccccaaagcaagtctgtgctgtccgtagtctccacagataaacaataatctgcggacagcaaatgtatccatgatccttataaaaattatatacttagcgcgagcaatagatagcactggctggtggagtagccatgctgaattcgacactggagcgtgacaagctgttcggctgcaaagatccatgtgctgctcgagcaggctcagcctgtggctcatgcgttgcagcctcgtcgtgccagactcatctgcagcgagcgagatcagtcagtcagtaagtatgctctatactgaacattttagtcattaggccaaggagtgaataaggcagagcagttccagtttataaagcctaccgacgtcagcagtgacggccgcgccggtgttggtgggttcctgcgacttggatggtgaggcgccgcctctcctcctcggatccacttccacggatgatctggtcctgcacgtcaatacagacgatatgtttcccccaaatctaaggcgtcgccagccctggcaaagcgcttgccgctgctcccctcttccgtttccagcgccgccgccctccttccggttcctgttctccagcaccgccgttgaacctcctcccctctccctcgtgcttccctctctcatcctctctgccgcttccccgctctccccaaactactctgtgccccgtcagatcgacctggactttggcggcagctacttctagaacgcggcggcacggcagcaagccagcaaggagaacgcggcggcacgggcgtgctgctacttctgcttcctctccgacgcttgctggtgagagaaacctcccaatctctcttgctcgctctttctctctcactcccgccgttcccccatcgatctccaacttcctcccgctcccggtccgtatagcgcccgccacaagcgattcgacgtgattctgacgccaaagcaacgttttttgtccaacttcctcccgctcccggtccgtatagcgcccgccacaagcgatttgacttgattctgacgccaaagcaacgttttttgtacgtctcattcgcaaggcagtcaggtagacgccatacacatctaaacagagtgaatgcgttttactttttctaatgattgaactcatgcccaccaattttgtccagccctaagattaccaatatgccaaatttattgttttttgaacaaaactacagtaggagatcacttcgtagttcgttgccccatggtatgtagtgagtttatgtaactatgaaatggcattgatcggttatgatcatgttctgacttctgatatcctcacgcctctatcaattgggcagtctcatctttaaggtttggtcttgagggacataaacattaactgtatttcattttgctgatttactatgagcagatgggtgcagtaatattttgtaattctctatatttatataagtataacctgtgttcaaaatccccatcagaagttgaggacgtattggatgtattatgtcaatattcatagcatagacttttgtggaaatattacacttgtggtgctagaaccctggtccttatatttatgtatagcctctggtcgttagataagaggagacaggagacaatatgtgcatgtatttttaatttgcaggagcattcagatttttaagtcccagtggttattaagcgtcgtttaaacgacgtttaaacgctaaaacgtgattaggagttaaagcgtccgtacgttttaaacgtcgaaacgcgcgttctggacgttttactcgttgtacgaacgttttgtgcgtctataagtggttgggccttaatgggcctttcaccagcaagcttgctccagccgccaaactaaactgccagacgcacagccgcggagccgccagagacagacgctgccgccgtcggccgtcctccgccctccagttgagcggttcaagcagagctgatggctacatcagagccagtacaagagagtttggtggtgcactactcacaacctagtaggccccgggtcctccttgctgcttcaggaagtgtagccgctataaaatttgagagcctttgccgtagcttctctgagtgggcggatgtccgagctgtggccaccacgccatccttgcacttcgttgatagatcatctctaccaagtggcatcgttctttacactgatgacgatgaatggtctacctggaagaagataggagatgaagtcttacacatcgagctgcggaaatgggcagacgttatggtgatcgctccattgtcagcaaataccctggctaagatcgccggtgggttatgcgacaacctcttgacctgcatcgtgagagcgtgggactacagcaaaccgctctttgttgccccagccatgaacacgttaatgtggaacaacccattcacggagcggcatcttcacacaatcaaccaactgggcatagccttgatccccccagttaccaaaaggctggcctgtggcgattacgggaacggcgcaatggccgaaacctcgcagatccatacttccgtgaggctcgcgtgcaagacgcaaccgcacgatgcgagcagttcactcgcgggtcctgtcagtaataaccggccatctagctgatgcagcagttggccacttgattgtcaagcttaggaatttgttttatatgcagtgtgcatctggagtgttgtaacagattttttttccaactagtgtttgtgtgtattgaaattgggggggaaaggctgttgtcacaggataacaataacttcctccctgctcagtaattatgagtctattcagtttgtaattgtcggtgggagtacaattatgctacaatattgtttgtttgtgtgtgtgtgggagttggggagtgctgctgccacagagatagcttcctccctgcccagccagtaatgatagtgattattcagtttgtagttgtcagtggaagtgtccagcaaacttttctactaccctttgatattcctggtacaaatgttggaacgactgtcctaaccatttgagtgatttgc

SEQ ID NO: 82192 - DNA, 2433 bp, Zea Mays
ctcgcctccaaatcggatgccgccggcgccaacctccgcagacggctagtcacatcctctgatcctatcgccctggtcctccctcctgtgcgacgcggccgttgcctcctactcacctcctcacccagctccctccacccctccgagatccgtcctaaatccgggaggcacgcgtgggctattggggccacgttgtggcggtcggccgacggtgttgtagagcagcagggagcgcgttgcggcggccagtgcctagctcagctgtgcaggaaggcgcgtgtaatcgacatcagagaggacagaggagaaggtctgaatttcggggaacaagcttcaaaatatacgacaggcaacgccccctacgacggcgcaaaggcgtcgtcaagcacccggtccgttccgtgtttcggaagccgccggcgagtcagccccaaagcaagtctgtgctgtccgtagtctccacagataaacaataatctgcggacagcaaatgtatccatgatccttataaaaattatatacttagcgcgagcaatagatagcactggctggtggagtagccatgctgaattcgacactggagcgtgacaagctgttcggctgcaaagatccatgtgctgctcgagcaggctcagcctgtggctcatgcgttgcagcctcgtcgtgccagactcatctgcagcgagcgagatcagtcagtcagtaagtatgctctatactgaacattttagtcattaggccaaggagtgaataaggcagagcagttccagtttataaagcctaccgacgtcagcagtgacggccgcgccggtgttggtgggttcctgcgacttggatggtgaggcgccgcctctcctcctcggatccacttccacggatgatctggtcctgcacgtcaatacagacgatatgtttcccccaaatctaaggcgtcgccagccctggcaaagcgcttgccgctgctcccctcttccgtttccagcgccgccgccctccttccggttcctgttctccagcaccgccgttgaacctcctcccctctccctcgtgcttccctctctcatcctctctgccgcttccccgctctccccaaactactctgtgccccgtcagatcgacctggactttggcggcagctacttctagaacgcggcggcacggcagcaagccagcaaggagaacgcggcggcacgggcgtgctgctacttctgcttcctctccgacgcttgctggtgagagaaacctcccaatctctcttgctcgctctttctctctcactcccgccgttcccccatcgatctccaacttcctcccgctcccggtccgtatagcgcccgccacaagcgattcgacgtgattctgacgccaaagcaacgttttttgtccaacttcctcccgctcccggtccgtatagcgcccgccacaagcgatttgacttgattctgacgccaaagcaacgttttttgtacgtctcattcgcaaggcagtcaggtagacgccatacacatctaaacagagtgaatgcgttttactttttctaatgattgaactcatgcccaccaattttgtccagccctaagattaccaatatgccaaatttattgttttttgaacaaaactacagtaggagatcacttcgtagttcgttgccccatggtatgtagtgagtttatgtaactatgaaatggcattgatcggttatgatcatgttctgacttctgatatcctcacgcctctatcaattgggcagtctcatctttaaggtttggtcttgagggacataaacattaactgtatttcattttgctgatttactatgagcagatgggtgcagtaatattttgtaattctctatatttatataagtataacctgtgttcaaaatccccatcagaagttgaggacgtattggatgtattatgtcaatattcatagcatagacttttgtggaaatattacacttgtggtgctagaaccctggtccttatatttatgtatagcctctggtcgttagataagaggagacaggagacaatatgtgcatgtatttttaatttgcaggagcattcagatttttaagtcccagtggttattaagcgtcgtttaaacgacgtttaaacgctaaaacgtgattaggagttaaagcgtccgtacgttttaaacgtcgaaacgcgcgttctggacgttttactcgttgtacgaacgttttgtgcgtctataagtggttgggccttaatgggcctttcaccagcaagcttgctccagccgccaaactaaactgccagacgcacagccgcggagccgccagagacagacgctgccgccgtcggccgtcctccgccctccagtagaatcgtccatcctgctcgcttgtctttctgagctgtgcatgcacaacgatttgggcttgagtggtggtgctaaagtctccat

SEQ ID NO: 82193 - DNA, 715 bp, Zea Mays
aagcgcagggaggccagaaagttaccccccggcccccgaccggaccaatctatcaccaccacgccgccctaggtcgtcgccggcaacaatgtccccttctgccatcttcgtcttcctcctcgtctctgcggtgcatatgctggagtgcatcctcgacctcaagaggaggaggggatccatttctgatgatcagctcagactgcgtgtagagatcacgcaacttctcaaggaggccagtgctttgtcaacgccctcgacgtttgcgcaagccgcaaaactgaagcggttggctggtgctaaagagaaggagctggcaaaaagttgtagtctatggtgtgctcgttctgtggttttggagtactccagtaactactgtccctaagcaccttctccagcccttcgggaggatgttttcctggagaggtgtagatgcttctacaggccgtgttgtgatgtccctgcgttctgcaccgaggagatggatcgcgagctcttccagcgaggagtacccattggggtgggcgtcaccaccgctgggcatggccggggcgccgcagctacgggccatgcagccgccccgcggatcctggctgagccgcccccgcggatcctggccgagccaccgctgggcttggtcgcgtcgcctccgcagccgcccccgcggatcctggccgaggcatcgccgccgcagagcttggtcgcggcgcctccgtag

SEQ ID NO: 82194 - DNA, 1365 bp, Zea Mays
aagcgcagggaggccagaaagttaccccccggcccccgaccggaccaatctatcaccaccacgccgccctaggtcgtcgccggcaacaatgtccccttctgccatcttcgtcttcctcctcgtctctgcggtgcatatgctggagtgcatcctcgacctcaagaggaggaggggatccatttctgatgatcagctcagactgcgtgtagagatcacgcaacttctcaaggaggccagtgctttgtcaacgccctcgacgtttgcgcaagccgcaaaactgaagcggttggctggtgctaaagagaaggagctggcaaaaatgcaagatgtggacattagagggaaacagtctttatatgaaaaataccgaaaagttctgctggccgcaaaggttgtagtctatggtgtgctcgttctgtggttttggagtactccagtaactactgtccctaagcaccttctccagcccttcgggaggatgttttcctggagaggtgtagatgcttctacaggccgtgttgtggtaagtactactgaacttttagcttaagggcctccatgtgtttaaatgatcttgcctttatcctctgttgagagtaacgcctattctgattgaaactgagagtcactacacattggtgatgtcttataataactaaaaagttccaaatgatgggtttttttctcaaacatgctggagaattggatgtcgatgggcattaagaaagaaaacaattatgatacagtactcctttatttttagggtctgtttaaaactgcttcaccaactccatcatggtatagcttaaaacaaaaactagtttttttggagttggcctttaacttcagttttcttcaagagcggagtttatgaagttgtttctgtttgactaaagttggaagcggagtcgcaaaagatagaacagtcccaaataggcctttaagcattacattccacctgtgaacaaatttgattaccaacaaagctccacctagtagcgacacattcattgtgagagtcactggtgaagttattttgcagcgtaatgtttcattgtgatggtgcaggttggaattctcccatggctatttctgacctctcgtgtcagcaagctactgagcgagaaactcgcgcccatatttctgcatccttagctcctcctaacaactttagttttgcatctgtttttgttctgcagttttgtgtgatctctcaatccatctacatttatgtggtttccaaagggattggtatttttgtaattgtataaagtaataacgagtggaatttacactaagagaccgtttggatcactcattttagagttattggaatatacttaatagagtggactatttagggcc

SEQ ID NO: 82195 - DNA, 1294 bp, Zea Mays
aagcgcagggaggccagaaagttaccccccggcccccgaccggaccaatctatcaccaccacgccgccctaggtcgtcgccggcaacaatgtccccttctgccatcttcgtcttcctcctcgtctctgcggtgcatatgctggagtgcatcctcgacctcaagaggaggaggggatccatttctgatgatcagctcagactgcgtgtagagatcacgcaacttctcaaggaggccagtgctttgtcaacgccctcgacgtttgcgcaagccgcaaaactgaagcggttggctggtgctaaagagaaggagctggcaaaaagttgtagtctatggtgtgctcgttctgtggttttggagtactccagtaactactgtccctaagcaccttctccagcccttcgggaggatgttttcctggagaggtgtagatgcttctacaggccgtgttgtggtaagtactactgaacttttagcttaagggcctccatgtgtttaaatgatcttgcctttatcctctgttgagagtaacgcctattctgattgaaactgagagtcactacacattggtgatgtcttataataactaaaaagttccaaatgatgggtttttttctcaaacatgctggagaattggatgtcgatgggcattaagaaagaaaacaattatgatacagtactcctttatttttagggtctgtttaaaactgcttcaccaactccatcatggtatagcttaaaacaaaaactagtttttttggagttggcctttaacttcagttttcttcaagagcggagtttatgaagttgtttctgtttgactaaagttggaagcggagtcgcaaaagatagaacagtcccaaataggcctttaagcattacattccacctgtgaacaaatttgattaccaacaaagctccacctagtagcgacacattcattgtgagagtcactggtgaagttattttgcagcgtaatgtttcattgtgatggtgcaggttggaattctcccatggctatttctgacctctcgtgtcagcaagctactgagcgagaaactcgcgcccatatttctgcatccttagctcctcctaacaactttagttttgcatctgtttttgttctgcagttttgtgtgatctctcaatccatctacatttatgtggtttccaaagggattggtatttttgtaattgtataaagtaataacgagtggaatttacactaagagaccgtttggatcactcattttagagttattggaatatacttaatagagtggactatttagggcc

SEQ ID NO: 82196 - DNA, 1664 bp, Zea Mays
ccattacggacacagccattccaccaaccaaccaagccaaacggtttatagccccgctcggttcaagccggtaccgtacacctccagagtagcttaccccaaccaaatccatccaaattcaatcggaattcgcgtgcgcaagcccaaatcggaccacggtaatccaaaggccgcggcgtagcggacgcgcgggcgctggtgataaagcgggggctgggcctcgacgcctctgctctgctctgctctcctcgcatatagggtttatcttctcccctcctctgcccccatctcgcttctcgcacacggcagccggattccgaagcgcaccccctcggccccagccaaaagttagtgtctgtctgaaattgcagcatcgcagtttctaatcgtttggagagcacacaagaatgtcgttcgtgcagctctctggtgctggagtcgctgcagtggccttcacgaacaagagcctagtctctcggcacgcagcgctacgggtctgctcgtcgaggcgctcgatccgtagcctggtcgttaaggctgcaactgtcgtcaccccaaagtacacttcactgaagcctctgggagatagggtgcttgtgaagcttggtgccgcagaggagaagacagttggtggcattttgcttccatctactgcccagactaaaccacaaggaggtgaggttgttgctgttggagcaggaaggaccatcggggacaagaaaatagctgtggatatagagactggagcacaagtagtatactcaaagtatgctgggactgaggttgaattcaatgactcaaagcatcttattctcaaagaagacgatatcattggtattcttgagacagatgatgtgaaggacatgaagcctctcaatgaccgtgttctcatcaaggttgcagaagccgaagacaaaactcctgggggccttatcctcactgaaacaactaaagagaagccgtccataggaacggttgtagctgttggcccgggtcctctggacgaggaaggcaagagacagccactgtcagtgtcggcgggcagcacagtgctgtactccaagtatgcagggagtgagttcaagggcgcggatggcacggcctacattgtgttgagagcgtcggatgtgatggctgtcctgtcttgagcatttcgtttccggctcgttaatgtagtttgcagccaatagttgtcatgtggtatgaaacgatcgctttgtggtggtcatcacaccatgctggtgatcatcacaacatatgctgatactgttccggacaatcggctagaatttgttgtgtggcaggtataaacgtcagcatctgatagtgagagcactcggttacttctacagatggtatttaaggggtgatagtcacgcctctttgctggataatttcattggattctggactcctgttctgttacatccgttgggatttgtttgctgccaaactttaaacattcgtataaccagaaaaggttacatgaagaatataagtctctagttgatttttttaacaggggcggacgtattaagggttttttttggggtaccggcttctgctctggtggttttttccactcggaacaaatcataatgttagggctagtttggaaactttatattttaaaaaatttctatttttctaaagaaaaaaacaaa

SEQ ID NO: 82197 - DNA, 4244 bp, Zea Mays
ggatcggggagaggcgcgcggcggaaggttcggagagtgcctgagcttaggcgctgcggatgaactggggcctcggcacggcgcctggtgtggtgctgcgcggcgaaggttcattggcgctcgccttgctcctccgctgatccgatccgagttttatactccgaattttcgtcgaaaggctgggtgtcagcaggccaccgctacactagtagttcgtaaaaggtggtggtggtaggagaaggtgggggtgaatattcgcgtattcggacgccggatttggttcaggatctcgtcgagatgaaggatcacggatcgggcggcgtcactcccagccccgcagaaggggaaaagaaacccatcaactcggagctgtggcacgcttgtgcggggcccctggtgtcgttgcccccggtgggcagtctcgtcgtatacttcccgcagggccatagtgaacaggttgctgcttcaatgcataaggagctggacaccgtccccagctacccatctctgccttctaagttgatctgcaagctcctaagtctcaccttacatgcagattctgaaactgatgaagtttatgcccagatgatgcttcagcctgtgaacaaatatgatcgagacgcaatgctggcatctgaactgggtctgaaacaaaacaagcaaccaacagaattcttttgcaagacgttgacagcaagcgacacaagtacgcatgggggattctcagtgccacgccgtgcagctgagaagatatttccaccgctagactttacgatgcaaccaccagcccaagaactcattgccaaggatctgcatgatatttcatggaaatttcgacatatctatcgaggtcaaccgaagaggcatcttttgacaactggttggagtgtcttcgtcagtacaaaaaggctgttagccggtgattcagttctctttataagggacgagaaatctcaacttctcttaggtataaggcgtgctagcagaccccaaccagctctgtcatcatcagttttatcaagtgacagcatgcacattggaatccttgcagcagcagcccatgctgccgcaaatagtagcccatttactattttctataacccaagggcaagcccatcagaatttgtcatccctttagcaaaatacaataaggctttgtatacacaagtgtcccttggaatgcgattcagaatgctctttgagacagaggattcaggggtaagaagatacatgggcacgatcacaggcattggcgacttagatccactgcgatggaagaattctcattggcgaaaccttcaggttggttgggatgaatcgactgcatctgagaggcgcacccgtgtttcgatatgggagattgaaccagttgctacaccattttatatatgcccaccaccatttttcaggccaaagcttcctaagcaagcaggaatgccagatgatgaaaacgaggttgagagtgctttcaaaagagcgatgccatggcttgctgatgacttcgctctgaaagatgtccaaaatgcattatttccaggcctgagcctagttcaatggatggctatgcagcaaaatcctcagatgctagcaactgcttcccctgctgtacagtcgcagtacttgacctctaatgcactgggtatgcaggatgggataggcagtgtcagtgaagatccaacaaaaagattgactatgcaggcccaaaatattggcttacctaatttacaggctggttcgaaagtggaccaccctgcaattaccccattagctcaacaccagcaacagcctcaccatgtattgcaacaacagcaggtccaaccactgcagcaaagttctgcgatcctacagcaacagcaagcccagttgttgcagcaaaatgccattcacttgcagcagcagcaagaacaactccaacggcaacaatcacagccgcagcaacagttcaaagctactgcatgtcttcagtcatcggatcagcacaagctgaaagagcaacagccttcaggtggacaagctgcctcacaagtacatttgttaaaccagattttgcaaccatcttcatctcagctacaacagctgggtttacccaagtcacctactcagcgcccagggttaccaagtctaacaacaatgggttctttgcagcagtcacaattacctcagactccacagccgcaacaaacagcagaataccaccaggcactcctacaaagtcaacaaccccaactacaacagctatcacaatcagaactgcagctgcagctgcttcaaaagattcaacaacaaaatctgctatctcaactgaacccacagcatcagtcccagctgatccaacaattgtctcagaaaagccaggaaattctccagcaacaagttcttcaacatcagtttggtggtgctgatgccatgggtcagctcaaacatttacagcaaacacctttgaaccataatacaggatccttgccaccccagcaacttgtaagatcacactcagcactcactgagagcgaagaaccttccagctcaacagttccatctggcagccgtatctccccaataaattcatttagtagagcaaaccaaggaaccagaaatttgcctgagatgccagcaacaccgcacattgagcacttacttcaggaaattcaaagtaagacagataatcgaatcaagaatgatatacaaggtagtaaggaaacggtccatgcacctaatcgtcatctagcttcagatcaacttgatgcgtcatctgctacctccttttgcttagatgagagcccacgagaaggcttttcctttcctccagtttgtttggataacaatgttcaagttgatccaagagagaattttcttattgcggaaaatgtggacacattaatgcctgacgccctgttgtcaagagggatgtcgtctggaaagggtatatgcaatctaccttctggacaaagggatcatagggatgtggaaaacgagctatcctctgctgcattcagctcccagtcatttggtgtgccggacatgtcttttaagcctggatgttcaagtgatgttgctgttgctgatggtggaatggcaagccaaggactgtggaatagtcaaacacagcggatgagaaccttcaccaaggttcaaaagcgtggatccgttgggagatcaattgatataacacggtaccgaggttacgaagatcttcggcatgatcttgcatgcatgttcggtattcaagggcagcttgaagatccctacaggacggactggaagctggtctatgttgaccacgaaaatgacatcctccttgttggcgacgacccatgggaggagtttgtaagctgtgtcaagagcattaaaatattgtcatctgttgaagtacagcaaatgagcttggatggtgaccttggctgcatccctcaaactcaagcctgtagtgcttctgatgacgcaaatgcatggagggcctgacgtaaatactaatatgttccttaccatttttaaacaatactgagagtcaggggtcaaagaagtgaaacacacgtctaacgtaatcacgaggtactgttacttagagccaactcactgacagagtcgatgagaagctcgtggcggaagttgttcagcaagctgccatattttggaggccttgacggctgacgctttgttccactgaaatcgggtaattactcaacacaatcatattagtttccttcttgtgtgtgtaagttgggtgggggtggggggtataatgaatttgagaagctactctgcttattagaacctacattcactgtaatcctcctacaaagttgttcgattatctcagtgtatatatgtgcgctgtagaaccgtgactgtcagttttgcaactcgcaatccccaatgtaattgttcctgtgtgctgctttaacagctgaagtactattataaattgtattatctgtaacagaaaaaagatttggtgtcgggatatagtacagtcttgttgtttttttttttttttgcagtttagtcgggcacacaataacgcttgaaaatgtttactatcgtagtcacctaggcggaaatgcagagttagcgtgcaatcgtgcattctgggatatgtttcgcagtttgtcaggctgatcgagcagctgctgtgtcgggaaacctattacgttacggctgtcggctgagccgttgtgctgcgggcagcgcgggaataggatacagaggagtctgagtctctgagtgctggcagtcctggcacgaat

SEQ ID NO: 82198 - DNA, 4261 bp, Zea Mays
ggatcggggagaggcgcgcggcggaaggttcggagagtgcctgagcttaggcgctgcggatgaactggggcctcggcacggcgcctggtgtggtgctgcgcggcgaaggttcattggcgctcgccttgctcctccgctgatccgatccgagttttatactccgaattttcgtcgaaaggctgggtgtcagcaggccaccgctacactagtagttcgtaaaaggtggtggtggtaggagaaggtgggggtgaatattcgcgtattcggacgccggatttggttcaggatctcgtcgagatgaaggatcacggatcgggcggcgtcactcccagccccgcagaaggggaaaagaaacccatcaactcggagctgtggcacgcttgtgcggggcccctggtgtcgttgcccccggtgggcagtctcgtcgtatacttcccgcagggccatagtgaacaggttgctgcttcaatgcataaggagctggacaccgtccccagctacccatctctgccttctaagttgatctgcaagctcctaagtctcaccttacatgcagattctgaaactgatgaagtttatgcccagatgatgcttcagcctgtgaacaaatatgatcgagacgcaatgctggcatctgaactgggtctgaaacaaaacaagcaaccaacagaattcttttgcaagacgttgacagcaagcgacacaagtacgcatgggggattctcagtgccacgccgtgcagctgagaagatatttccaccgctaggtaacatgttcgataggactttacgatgcaaccaccagcccaagaactcattgccaaggatctgcatgatatttcatggaaatttcgacatatctatcgaggtcaaccgaagaggcatcttttgacaactggttggagtgtcttcgtcagtacaaaaaggctgttagccggtgattcagttctctttataagggacgagaaatctcaacttctcttaggtataaggcgtgctagcagaccccaaccagctctgtcatcatcagttttatcaagtgacagcatgcacattggaatccttgcagcagcagcccatgctgccgcaaatagtagcccatttactattttctataacccaagggcaagcccatcagaatttgtcatccctttagcaaaatacaataaggctttgtatacacaagtgtcccttggaatgcgattcagaatgctctttgagacagaggattcaggggtaagaagatacatgggcacgatcacaggcattggcgacttagatccactgcgatggaagaattctcattggcgaaaccttcaggttggttgggatgaatcgactgcatctgagaggcgcacccgtgtttcgatatgggagattgaaccagttgctacaccattttatatatgcccaccaccatttttcaggccaaagcttcctaagcaagcaggaatgccagatgatgaaaacgaggttgagagtgctttcaaaagagcgatgccatggcttgctgatgacttcgctctgaaagatgtccaaaatgcattatttccaggcctgagcctagttcaatggatggctatgcagcaaaatcctcagatgctagcaactgcttcccctgctgtacagtcgcagtacttgacctctaatgcactgggtatgcaggatgggataggcagtgtcagtgaagatccaacaaaaagattgactatgcaggcccaaaatattggcttacctaatttacaggctggttcgaaagtggaccaccctgcaattaccccattagctcaacaccagcaacagcctcaccatgtattgcaacaacagcaggtccaaccactgcagcaaagttctgcgatcctacagcaacagcaagcccagttgttgcagcaaaatgccattcacttgcagcagcagcaagaacaactccaacggcaacaatcacagccgcagcaacagttcaaagctactgcatgtcttcagtcatcggatcagcacaagctgaaagagcaacagccttcaggtggacaagctgcctcacaagtacatttgttaaaccagattttgcaaccatcttcatctcagctacaacagctgggtttacccaagtcacctactcagcgcccagggttaccaagtctaacaacaatgggttctttgcagcagtcacaattacctcagactccacagccgcaacaaacagcagaataccaccaggcactcctacaaagtcaacaaccccaactacaacagctatcacaatcagaactgcagctgcagctgcttcaaaagattcaacaacaaaatctgctatctcaactgaacccacagcatcagtcccagctgatccaacaattgtctcagaaaagccaggaaattctccagcaacaagttcttcaacatcagtttggtggtgctgatgccatgggtcagctcaaacatttacagcaaacacctttgaaccataatacaggatccttgccaccccagcaacttgtaagatcacactcagcactcactgagagcgaagaaccttccagctcaacagttccatctggcagccgtatctccccaataaattcatttagtagagcaaaccaaggaaccagaaatttgcctgagatgccagcaacaccgcacattgagcacttacttcaggaaattcaaagtaagacagataatcgaatcaagaatgatatacaaggtagtaaggaaacggtccatgcacctaatcgtcatctagcttcagatcaacttgatgcgtcatctgctacctccttttgcttagatgagagcccacgagaaggcttttcctttcctccagtttgtttggataacaatgttcaagttgatccaagagagaattttcttattgcggaaaatgtggacacattaatgcctgacgccctgttgtcaagagggatgtcgtctggaaagggtatatgcaatctaccttctggacaaagggatcatagggatgtggaaaacgagctatcctctgctgcattcagctcccagtcatttggtgtgccggacatgtcttttaagcctggatgttcaagtgatgttgctgttgctgatggtggaatggcaagccaaggactgtggaatagtcaaacacagcggatgagaaccttcaccaaggttcaaaagcgtggatccgttgggagatcaattgatataacacggtaccgaggttacgaagatcttcggcatgatcttgcatgcatgttcggtattcaagggcagcttgaagatccctacaggacggactggaagctggtctatgttgaccacgaaaatgacatcctccttgttggcgacgacccatgggaggagtttgtaagctgtgtcaagagcattaaaatattgtcatctgttgaagtacagcaaatgagcttggatggtgaccttggctgcatccctcaaactcaagcctgtagtgcttctgatgacgcaaatgcatggagggcctgacgtaaatactaatatgttccttaccatttttaaacaatactgagagtcaggggtcaaagaagtgaaacacacgtctaacgtaatcacgaggtactgttacttagagccaactcactgacagagtcgatgagaagctcgtggcggaagttgttcagcaagctgccatattttggaggccttgacggctgacgctttgttccactgaaatcgggtaattactcaacacaatcatattagtttccttcttgtgtgtgtaagttgggtgggggtggggggtataatgaatttgagaagctactctgcttattagaacctacattcactgtaatcctcctacaaagttgttcgattatctcagtgtatatatgtgcgctgtagaaccgtgactgtcagttttgcaactcgcaatccccaatgtaattgttcctgtgtgctgctttaacagctgaagtactattataaattgtattatctgtaacagaaaaaagatttggtgtcgggatatagtacagtcttgttgtttttttttttttttgcagtttagtcgggcacacaataacgcttgaaaatgtttactatcgtagtcacctaggcggaaatgcagagttagcgtgcaatcgtgcattctgggatatgtttcgcagtttgtcaggctgatcgagcagctgctgtgtcgggaaacctattacgttacggctgtcggctgagccgttgtgctgcgggcagcgcgggaataggatacagaggagtctgagtctctgagtgctggcagtcctggcacgaat

SEQ ID NO: 82199 - DNA, 4159 bp, Zea Mays
cgtcgctctcgctgcccctcgcaccggcacgaaccaacaaaaccagccgtcgtggtccgccctcctcggcgcggcacgggcccgacacggccgcacaggcgcccggcaccagcccacacccgtcgccgtcgcggagaaggtgggggtgaatattcgcgtattcggacgccggatttggttcaggatctcgtcgagatgaaggatcacggatcgggcggcgtcactcccagccccgcagaaggggaaaagaaacccatcaactcggagctgtggcacgcttgtgcggggcccctggtgtcgttgcccccggtgggcagtctcgtcgtatacttcccgcagggccatagtgaacaggttgctgcttcaatgcataaggagctggacaccgtccccagctacccatctctgccttctaagttgatctgcaagctcctaagtctcaccttacatgcagattctgaaactgatgaagtttatgcccagatgatgcttcagcctgtgaacaaatatgatcgagacgcaatgctggcatctgaactgggtctgaaacaaaacaagcaaccaacagaattcttttgcaagacgttgacagcaagcgacacaagtacgcatgggggattctcagtgccacgccgtgcagctgagaagatatttccaccgctaggtaacatgttcgataggactttacgatgcaaccaccagcccaagaactcattgccaaggatctgcatgatatttcatggaaatttcgacatatctatcgaggtcaaccgaagaggcatcttttgacaactggttggagtgtcttcgtcagtacaaaaaggctgttagccggtgattcagttctctttataagggacgagaaatctcaacttctcttaggtataaggcgtgctagcagaccccaaccagctctgtcatcatcagttttatcaagtgacagcatgcacattggaatccttgcagcagcagcccatgctgccgcaaatagtagcccatttactattttctataacccaagggcaagcccatcagaatttgtcatccctttagcaaaatacaataaggctttgtatacacaagtgtcccttggaatgcgattcagaatgctctttgagacagaggattcaggggtaagaagatacatgggcacgatcacaggcattggcgacttagatccactgcgatggaagaattctcattggcgaaaccttcaggttggttgggatgaatcgactgcatctgagaggcgcacccgtgtttcgatatgggagattgaaccagttgctacaccattttatatatgcccaccaccatttttcaggccaaagcttcctaagcaagcaggaatgccagatgatgaaaacgaggttgagagtgctttcaaaagagcgatgccatggcttgctgatgacttcgctctgaaagatgtccaaaatgcattatttccaggcctgagcctagttcaatggatggctatgcagcaaaatcctcagatgctagcaactgcttcccctgctgtacagtcgcagtacttgacctctaatgcactgggtatgcaggatgggataggcagtgtcagtgaagatccaacaaaaagattgactatgcaggcccaaaatattggcttacctaatttacaggctggttcgaaagtggaccaccctgcaattaccccattagctcaacaccagcaacagcctcaccatgtattgcaacaacagcaggtccaaccactgcagcaaagttctgcgatcctacagcaacagcaagcccagttgttgcagcaaaatgccattcacttgcagcagcagcaagaacaactccaacggcaacaatcacagccgcagcaacagttcaaagctactgcatgtcttcagtcatcggatcagcacaagctgaaagagcaacagccttcaggtggacaagctgcctcacaagtacatttgttaaaccagattttgcaaccatcttcatctcagctacaacagctgggtttacccaagtcacctactcagcgcccagggttaccaagtctaacaacaatgggttctttgcagcagtcacaattacctcagactccacagccgcaacaaacagcagaataccaccaggcactcctacaaagtcaacaaccccaactacaacagctatcacaatcagaactgcagctgcagctgcttcaaaagattcaacaacaaaatctgctatctcaactgaacccacagcatcagtcccagctgatccaacaattgtctcagaaaagccaggaaattctccagcaacaagttcttcaacatcagtttggtggtgctgatgccatgggtcagctcaaacatttacagcaaacacctttgaaccataatacaggatccttgccaccccagcaacttgtaagatcacactcagcactcactgagagcgaagaaccttccagctcaacagttccatctggcagccgtatctccccaataaattcatttagtagagcaaaccaaggaaccagaaatttgcctgagatgccagcaacaccgcacattgagcacttacttcaggaaattcaaagtaagacagataatcgaatcaagaatgatatacaaggtagtaaggaaacggtccatgcacctaatcgtcatctagcttcagatcaacttgatgcgtcatctgctacctccttttgcttagatgagagcccacgagaaggcttttcctttcctccagtttgtttggataacaatgttcaagttgatccaagagagaattttcttattgcggaaaatgtggacacattaatgcctgacgccctgttgtcaagagggatgtcgtctggaaagggtatatgcaatctaccttctggacaaagggatcatagggatgtggaaaacgagctatcctctgctgcattcagctcccagtcatttggtgtgccggacatgtcttttaagcctggatgttcaagtgatgttgctgttgctgatggtggaatggcaagccaaggactgtggaatagtcaaacacagcggatgagaaccttcaccaaggttcaaaagcgtggatccgttgggagatcaattgatataacacggtaccgaggttacgaagatcttcggcatgatcttgcatgcatgttcggtattcaagggcagcttgaagatccctacaggacggactggaagctggtctatgttgaccacgaaaatgacatcctccttgttggcgacgacccatgggaggagtttgtaagctgtgtcaagagcattaaaatattgtcatctgttgaagtacagcaaatgagcttggatggtgaccttggctgcatccctcaaactcaagcctgtagtgcttctgatgacgcaaatgcatggagggcctgacgtaaatactaatatgttccttaccatttttaaacaatactgagagtcaggggtcaaagaagtgaaacacacgtctaacgtaatcacgaggtactgttacttagagccaactcactgacagagtcgatgagaagctcgtggcggaagttgttcagcaagctgccatattttggaggccttgacggctgacgctttgttccactgaaatcgggtaattactcaacacaatcatattagtttccttcttgtgtgtgtaagttgggtgggggtggggggtataatgaatttgagaagctactctgcttattagaacctacattcactgtaatcctcctacaaagttgttcgattatctcagtgtatatatgtgcgctgtagaaccgtgactgtcagttttgcaactcgcaatccccaatgtaattgttcctgtgtgctgctttaacagctgaagtactattataaattgtattatctgtaacagaaaaaagatttggtgtcgggatatagtacagtcttgttgtttttttttttttttgcagtttagtcgggcacacaataacgcttgaaaatgtttactatcgtagtcacctaggcggaaatgcagagttagcgtgcaatcgtgcattctgggatatgtttcgcagtttgtcaggctgatcgagcagctgctgtgtcgggaaacctattacgttacggctgtcggctgagccgttgtgctgcgggcagcgcgggaataggatacagaggagtctgagtctctgagtgctggcagtcctggcacgaat

SEQ ID NO: 82200 - DNA, 4155 bp, Zea Mays
cgtcgctctcgctgcccctcgcaccggcacgaaccaacaaaaccagccgtcgtggtccgccctcctcggcgcggcacgggcccgacacggccgcacaggcgcccggcaccagcccacacccgtcgccgtcgcggagaaggtgggggtgaatattcgcgtattcggacgccggatttggttcaggatctcgtcgagatgaaggatcacggatcgggcggcgtcactcccagccccgcagaaggggaaaagaaacccatcaactcggagctgtggcacgcttgtgcggggcccctggtgtcgttgcccccggtgggcagtctcgtcgtatacttcccgcagggccatagtgaacaggttgctgcttcaatgcataaggagctggacaccgtccccagctacccatctctgccttctaagttgatctgcaagctcctaagtctcaccttacatattctgaaactgatgaagtttatgcccagatgatgcttcagcctgtgaacaaatatgatcgagacgcaatgctggcatctgaactgggtctgaaacaaaacaagcaaccaacagaattcttttgcaagacgttgacagcaagcgacacaagtacgcatgggggattctcagtgccacgccgtgcagctgagaagatatttccaccgctaggtaacatgttcgataggactttacgatgcaaccaccagcccaagaactcattgccaaggatctgcatgatatttcatggaaatttcgacatatctatcgaggtcaaccgaagaggcatcttttgacaactggttggagtgtcttcgtcagtacaaaaaggctgttagccggtgattcagttctctttataagggacgagaaatctcaacttctcttaggtataaggcgtgctagcagaccccaaccagctctgtcatcatcagttttatcaagtgacagcatgcacattggaatccttgcagcagcagcccatgctgccgcaaatagtagcccatttactattttctataacccaagggcaagcccatcagaatttgtcatccctttagcaaaatacaataaggctttgtatacacaagtgtcccttggaatgcgattcagaatgctctttgagacagaggattcaggggtaagaagatacatgggcacgatcacaggcattggcgacttagatccactgcgatggaagaattctcattggcgaaaccttcaggttggttgggatgaatcgactgcatctgagaggcgcacccgtgtttcgatatgggagattgaaccagttgctacaccattttatatatgcccaccaccatttttcaggccaaagcttcctaagcaagcaggaatgccagatgatgaaaacgaggttgagagtgctttcaaaagagcgatgccatggcttgctgatgacttcgctctgaaagatgtccaaaatgcattatttccaggcctgagcctagttcaatggatggctatgcagcaaaatcctcagatgctagcaactgcttcccctgctgtacagtcgcagtacttgacctctaatgcactgggtatgcaggatgggataggcagtgtcagtgaagatccaacaaaaagattgactatgcaggcccaaaatattggcttacctaatttacaggctggttcgaaagtggaccaccctgcaattaccccattagctcaacaccagcaacagcctcaccatgtattgcaacaacagcaggtccaaccactgcagcaaagttctgcgatcctacagcaacagcaagcccagttgttgcagcaaaatgccattcacttgcagcagcagcaagaacaactccaacggcaacaatcacagccgcagcaacagttcaaagctactgcatgtcttcagtcatcggatcagcacaagctgaaagagcaacagccttcaggtggacaagctgcctcacaagtacatttgttaaaccagattttgcaaccatcttcatctcagctacaacagctgggtttacccaagtcacctactcagcgcccagggttaccaagtctaacaacaatgggttctttgcagcagtcacaattacctcagactccacagccgcaacaaacagcagaataccaccaggcactcctacaaagtcaacaaccccaactacaacagctatcacaatcagaactgcagctgcagctgcttcaaaagattcaacaacaaaatctgctatctcaactgaacccacagcatcagtcccagctgatccaacaattgtctcagaaaagccaggaaattctccagcaacaagttcttcaacatcagtttggtggtgctgatgccatgggtcagctcaaacatttacagcaaacacctttgaaccataatacaggatccttgccaccccagcaacttgtaagatcacactcagcactcactgagagcgaagaaccttccagctcaacagttccatctggcagccgtatctccccaataaattcatttagtagagcaaaccaaggaaccagaaatttgcctgagatgccagcaacaccgcacattgagcacttacttcaggaaattcaaagtaagacagataatcgaatcaagaatgatatacaaggtagtaaggaaacggtccatgcacctaatcgtcatctagcttcagatcaacttgatgcgtcatctgctacctccttttgcttagatgagagcccacgagaaggcttttcctttcctccagtttgtttggataacaatgttcaagttgatccaagagagaattttcttattgcggaaaatgtggacacattaatgcctgacgccctgttgtcaagagggatgtcgtctggaaagggtatatgcaatctaccttctggacaaagggatcatagggatgtggaaaacgagctatcctctgctgcattcagctcccagtcatttggtgtgccggacatgtcttttaagcctggatgttcaagtgatgttgctgttgctgatggtggaatggcaagccaaggactgtggaatagtcaaacacagcggatgagaaccttcaccaaggttcaaaagcgtggatccgttgggagatcaattgatataacacggtaccgaggttacgaagatcttcggcatgatcttgcatgcatgttcggtattcaagggcagcttgaagatccctacaggacggactggaagctggtctatgttgaccacgaaaatgacatcctccttgttggcgacgacccatgggaggagtttgtaagctgtgtcaagagcattaaaatattgtcatctgttgaagtacagcaaatgagcttggatggtgaccttggctgcatccctcaaactcaagcctgtagtgcttctgatgacgcaaatgcatggagggcctgacgtaaatactaatatgttccttaccatttttaaacaatactgagagtcaggggtcaaagaagtgaaacacacgtctaacgtaatcacgaggtactgttacttagagccaactcactgacagagtcgatgagaagctcgtggcggaagttgttcagcaagctgccatattttggaggccttgacggctgacgctttgttccactgaaatcgggtaattactcaacacaatcatattagtttccttcttgtgtgtgtaagttgggtgggggtggggggtataatgaatttgagaagctactctgcttattagaacctacattcactgtaatcctcctacaaagttgttcgattatctcagtgtatatatgtgcgctgtagaaccgtgactgtcagttttgcaactcgcaatccccaatgtaattgttcctgtgtgctgctttaacagctgaagtactattataaattgtattatctgtaacagaaaaaagatttggtgtcgggatatagtacagtcttgttgtttttttttttttttgcagtttagtcgggcacacaataacgcttgaaaatgtttactatcgtagtcacctaggcggaaatgcagagttagcgtgcaatcgtgcattctgggatatgtttcgcagtttgtcaggctgatcgagcagctgctgtgtcgggaaacctattacgttacggctgtcggctgagccgttgtgctgcgggcagcgcgggaataggatacagaggagtctgagtctctgagtgctggcagtcctggcacgaat

SEQ ID NO: 82201 - DNA, 1174 bp, Zea Mays
gatccgctcgcgatcccagcatcgaacggctcagattcattcaacgcctcctcccactcctactgtccgccatttaaataccccaccgccccttcctctcccccactccactccagtctccactcaccaaacccagcccagagcagacaagcgtcttggtccaaccaaagcaaccgagagctgcgagtccgggaagccggagagacagaggagaagcgcacaggcaccgctcgccggcgagaccgacgacggatgggcctcctggaacaccccctggaggccgtcgccttccgcctctactccctcccagtcccggaggcctccgcggccacgggcgccgccgccgcctggacctgcctcgcggcggcggtcctggccgccgccgctggcgtctggcgcctctgcttgtccctgtccccacccccgcccccgtccgccgccgttgccgccgccgccgcgaatgcttcggagccggatcggtctcacgtggcggaggcgtcgccggagccggccgcggccgcggcggcgacgcccaaggagcggtacacggcgtactaccgcgacgtcgggtgctgctgctgcggcggcgaaagcgatgacgaggaggacgacgcggaggagcggggagacggcgacgtgttcctttcggacgacgacgggccgacgacggatcctttcgggtgggagtgggaggtggtgtggtcgctgcagcctcctctcagcccggtggcggagacgacgggggggaggtaccggaggagcccgacgacggggctcggcggcaacgacggggcggaggtaccggaggagcccgacgacggggctcggcggcagcgtggtgcagctgtgggaccagggcgccgtgcgcggcctgacgcccgcggcgcgcccgcggccgagggcccgggtggtcgtcggcaccgtctcggccttctgaaaacatatccgcgcgcccgggtgtccaaacgagcaataaaactggcccgtctcgtgggagaaagaagagagaagattattagactgtgttcaacggtgtgcgctgggctccccctcccctagcactgtagcagatttaggggctacagtgcgccccctactctcttcagactgtcttcagcggttccccctaaatttctccccctatatcccactcacgtgccacgtcagcgatctc

SEQ ID NO: 82202 - DNA, 495 bp, Zea Mays
cgatcttgagctctatccgtcctgcatagcccgaaaaagcgcaataaatggaggccacacccgaggacaccacgacagtacctcatcgccgccgcacagccaagaatgaggtacatcgtacatgttgtccggcctcgacatgcttaacaacggcaggatggaggatggatgccttgatgaagaagcggcggggctggccactgggcaacggcaaagaagcacaagcccttccccttccaagaagaagtctcgctagagaagggaagcagtaactcgaagcctcaccataaaccgtccacacatgctgtataccttcgatatttagtggctttgtatggtaacttcagttcctggtttgtgtaaatagagttgttatgaaaagccatcggttactgggagacttgggaatgcacattgcctggcgcaatctcatctcatcaaatgaatggcctttacgggcaccaagacctttagggtgcagtgctttgctttact

SEQ ID NO: 82203 - DNA, 638 bp, Zea Mays
cttctgtagatattctcagaaccagcggctggcgccataatgtaaatctgtgccttggccggaggtttggcactgttcgacggagcaagtgacgatcttgagctctatccgtcctgcatagcccgaaaaagcgcaataaatggaggccacacccgaggacaccacgacagtacctcatcgccgccgcacagccaagaatgaggtacatcgtacatgttgtccggcctcgacatgcttaacaacggcaggatggaggatggatgccttgatgaagaagcggcggggctggccactgggcaacggcaaagaagcacaagcccttccccttccaagatgatccatgcttgggagtagcaattcacaattatttcatctcatgtgcagaagaagtctcgctagagaagggaagcagtaactcgaagcctcaccataaaccgtccacacatgctgtataccttcgatatttagtggctttgtatggtaacttcagttcctggtttgtgtaaatagagttgttatgaaaagccatcggttactgggagacttgggaatgcacattgcctggcgcaatctcatctcatcaaatgaatggcctttacgggcaccaagacctttagggtgcagtgctttgctttact

SEQ ID NO: 82204 - DNA, 1303 bp, Zea Mays
attaaagtgcccttacctagaaactggcgtgaaacaagaaaatggagcagtgcaaagcggcgatgtttcgctgaagatcatatactgtggagtctgttatgcagacgttgcttggacgcggaataagctcaatgattcaaaatatcctttggttcctgggcatgagatagctggagttgtaactcaggttggtgcagatgtcaaaggctttaaagtgggtgaccatgtaggtgttggaacatatgtgaactcttgccgtgattgtgagaactgcaatatctctctagacaaccattgcccaaaagcagtttatactttcaatggcattgatacagatggaactgtcacaaaggggggttactccactcacattgtagtccatgaaaggtattgcttcaaaatacccgatggctaccctttggcgaaggcagcacctcttctgtgtgctggaataaccgtgtatactccaatgatgcgacacaacatgaaccaacctggaaagtcacttggggtcattggtcttggtggtctgggtcacatggctgtgaaatttggtaaagcatttggtcttaaggtcacagttttcagtacaagtgaatcaaagagagatgaagccatcaacctccttggagcagataattttgttatatcatcagacacacagcaaatggagtccctgaagaactccctgcacttcataattgacactgcttccggtgaccatccatttgatccgtatttctctctccttaaggttggtggtgtgatgacattggtaggttttccaagtgagatcaaaatgcatcctgcaagccttatacttggtgcgcggaccttgtctggcagtgttgttggaggtataaaagacatccaagaaatggttaacttctgtgcagccaacaatatctatccggagattgagatcattaagatagattatatcaacgaggctctcgcgaggcttgttaatcgagatgtgaaataccgctttgtaatcgacatcgagaactccttcaagtagcgtgctagtgcacatgctctcgtctttctgttagtgttcaacagttcaagagctattacaaatgtgagtcatgccaaataaacttgatgtaaacaaccataattgaacagcaaggggaaacaggtatattgtgataatgaagtcgctctatgaatattcaactgcagtgttctctgacaaataatagcaactagtctgtctgcgatgtctaaatcagcaggtgtgctcttttacacgcaacagtgagtttgaactttgaatacactcctgcccaatacaaac

SEQ ID NO: 82205 - DNA, 1494 bp, Zea Mays
acgaaaaacaatctacggttgccaggtctgcgacgtcagtgccgacgaactcatggctcgcgagaggcccgtaaaaacatgatagccagatctgcgacgtcacggctgtcgccagtgatcgccattcgccaccctctccgttccattccaatccgttcagcggtcagcggaacatgatacgcctgcttgccgcgcttgcattgaggggagttcggggagcggccggtgcggaaggaatcgacacagaggaattcattctgcagttcagttcacatggctgctgaatcagagaacggcaactgcaaagcttgggcagcgagagatccttctggagttctctcaccacacagttttaaccgcagagcagtgcaaagcggcgatgtttcgctgaagatcatatactgtggagtctgttatgcagacgttgcttggacgcggaataagctcaatgattcaaaatatcctttggttcctgggcatgagatagctggagttgtaactcaggttggtgcagatgtcaaaggctttaaagtgggtgaccatgggggttactccactcacattgtagtccatgaaaggtattgcttcaaaatacccgatggctaccctttggcgaaggcagcacctcttctgtgtgctggaataaccgtgtatactccaatgatgcgacacaacatgaaccaacctggaaagtcacttggggtcattggtcttggtggtctgggtcacatggctgtgaaatttggtaaagcatttggtcttaaggtcacagttttcagtacaagtgaatcaaagagagatgaagccatcaacctccttggagcagataattttgttatatcatcagacacacagcaaatggagtccctgaagaactccctgcacttcataattgacactgcttccggtgaccatccatttgatccgtatttctctctccttaaggttggtggtgtgatgacattggtaggttttccaagtgagatcaaaatgcatcctgcaagccttatacttggtgcgcggaccttgtctggcagtgttgttggaggtataaaagacatccaagaaatggttaacttctgtgcagccaacaatatctatccggagattgagatcattaagatagattatatcaacgaggctctcgcgaggcttgttaatcgagatgtgaaataccgctttgtaatcgacatcgagaactccttcaagtagcgtgctagtgcacatgctctcgtctttctgttagtgttcaacagttcaagagctattacaaatgtgagtcatgccaaataaacttgatgtaaacaaccataattgaacagcaaggggaaacaggtatattgtgataatgaagtcgctctatgaatattcaactgcagtgttctctgacaaataatagcaactagtctgtctgcgatgtctaaatcagcaggtgtgctcttttacacgcaacagtgagtttgaactttgaatacactcctgcccaatacaaac

SEQ ID NO: 82206 - DNA, 1398 bp, Zea Mays
acgaaaaacaatctacggttgccaggtctgcgacgtcagtgccgacgaactcatggctcgcgagaggcccgtaaaaacatgatagccagatctgcgacgtcacggctgtcgccagtgatcgccattcgccaccctctccgttccattccaatccgttcagcggtcagcggaacatgatacgcctgcttgccgcgcttgcattgaggggagttcggggagcggccggtgcggaaggaatcgacacagagttcagttcacatggctgctgaatcagagaacggcaactgcaaagcttgggcagcgagagatccttctggagttctctcaccacacagttttaaccgcagagcagtgcaaagcggcgatgtttcgctgaagatcatatactgtggagtctgttatgcagacgttgcttggacgcggaataagctcaatgattcaaaatatcctttggttcctgggcatgagatagctggagttgtaactcaggttggtgcagatgtcaaaggctttaaagtgggtgaccatgggggttactccactcacattgtagtccatgaaaggtattgcttcaaaatacccgatggctaccctttggcgaaggcagcacctcttctgtgtgctggaataaccgtgtatactccaatgatgcgacacaacatgaaccaacctggaaagtcacttggggtcattggtcttggtggtctgggtcacatggctgtgaaatttggtaaagcatttggtcttaaggtcacagttttcagtacaagtgaatcaaagagagatgaagccatcaacctccttggagcagataattttgttatatcatcagacacacagcaaatggaggttggtggtgtgatgacattggtaggttttccaagtgagatcaaaatgcatcctgcaagccttatacttggtgcgcggaccttgtctggcagtgttgttggaggtataaaagacatccaagaaatggttaacttctgtgcagccaacaatatctatccggagattgagatcattaagatagattatatcaacgaggctctcgcgaggcttgttaatcgagatgtgaaataccgctttgtaatcgacatcgagaactccttcaagtagcgtgctagtgcacatgctctcgtctttctgttagtgttcaacagttcaagagctattacaaatgtgagtcatgccaaataaacttgatgtaaacaaccataattgaacagcaaggggaaacaggtatattgtgataatgaagtcgctctatgaatattcaactgcagtgttctctgacaaataatagcaactagtctgtctgcgatgtctaaatcagcaggtgtgctcttttacacgcaacagtgagtttgaactttgaatacactcctgcccaatacaaac

SEQ ID NO: 82207 - DNA, 1365 bp, Zea Mays
acgaaaaacaatctacggttgccaggtctgcgacgtcagtgccgacgaactcatggctcgcgagaggcccgtaaaaacatgatagccagatctgcgacgtcacggctgtcgccagtgatcgccattcgccaccctctccgttccattccaatccgttcagcggtcagcggaacatgatacgcctgcttgccgcgcttgcattgaggggagttcggggagcggccggtgcggaaggaatcgacacagagttcagttcacatggctgctgaatcagagaacggcaactgcaaagcttgggcagcgagagatccttctggagttctctcaccacacagttttaaccgcaggcatgagatagctggagttgtaactcaggttggtgcagatgtcaaaggctttaaagtgggtgaccatgggggttactccactcacattgtagtccatgaaaggtattgcttcaaaatacccgatggctaccctttggcgaaggcagcacctcttctgtgtgctggaataaccgtgtatactccaatgatgcgacacaacatgaaccaacctggaaagtcacttggggtcattggtcttggtggtctgggtcacatggctgtgaaatttggtaaagcatttggtcttaaggtcacagttttcagtacaagtgaatcaaagagagatgaagccatcaacctccttggagcagataattttgttatatcatcagacacacagcaaatggagtccctgaagaactccctgcacttcataattgacactgcttccggtgaccatccatttgatccgtatttctctctccttaaggttggtggtgtgatgacattggtaggttttccaagtgagatcaaaatgcatcctgcaagccttatacttggtgcgcggaccttgtctggcagtgttgttggaggtataaaagacatccaagaaatggttaacttctgtgcagccaacaatatctatccggagattgagatcattaagatagattatatcaacgaggctctcgcgaggcttgttaatcgagatgtgaaataccgctttgtaatcgacatcgagaactccttcaagtagcgtgctagtgcacatgctctcgtctttctgttagtgttcaacagttcaagagctattacaaatgtgagtcatgccaaataaacttgatgtaaacaaccataattgaacagcaaggggaaacaggtatattgtgataatgaagtcgctctatgaatattcaactgcagtgttctctgacaaataatagcaactagtctgtctgcgatgtctaaatcagcaggtgtgctcttttacacgcaacagtgagtttgaactttgaatacactcctgcccaatacaaac

SEQ ID NO: 82208 - DNA, 1600 bp, Zea Mays
acgaaaaacaatctacggttgccaggtctgcgacgtcagtgccgacgaactcatggctcgcgagaggcccgtaaaaacatgatagccagatctgcgacgtcacggctgtcgccagtgatcgccattcgccaccctctccgttccattccaatccgttcagcggtcagcggaacatgatacgcctgcttgccgcgcttgcattgaggggagttcggggagcggccggtgcggaaggaatcgacacagagttcagttcacatggctgctgaatcagagaacggcaactgcaaagcttgggcagcgagagatccttctggagttctctcaccacacagttttaaccgcagtgcaaagcggcgatgtttcgctgaagatcatatactgtggagtctgttatgcagacgttgcttggacgcggaataagctcaatgattcaaaatatcctttggttcctgggcatgagatagctggagttgtaactcaggttggtgcagatgtcaaaggctttaaagtgggtgaccatgtaggtgttggaacatatgtgaactcttgccgtgattgtgagaactgcaatatctctctagacaaccattgcccaaaagcagtttatactttcaatggcattgatacagatggaactgtcacaaaggggggttactccactcacattgtagtccatgaaaggtattgcttcaaaatacccgatggctaccctttggcgaaggcagcacctcttctgtgtgctggaataaccgtgtatactccaatgatgcgacacaacatgaaccaacctggaaagtcacttggggtcattggtcttggtggtctgggtcacatggctgtgaaatttggtaaagcatttggtcttaaggtcacagttttcagtacaagtgaatcaaagagagatgaagccatcaacctccttggagcagataattttgttatatcatcagacacacagcaaatggagtccctgaagaactccctgcacttcataattgacactgcttccggtgaccatccatttgatccgtatttctctctccttaaggttggtggtgtgatgacattggtaggttttccaagtgagatcaaaatgcatcctgcaagccttatacttggtgcgcggaccttgtctggcagtgttgttggaggtataaaagacatccaagaaatggttaacttctgtgcagccaacaatatctatccggagattgagatcattaagatagattatatcaacgaggctctcgcgaggcttgttaatcgagatgtgaaataccgctttgtaatcgacatcgagaactccttcaagtagcgtgctagtgcacatgctctcgtctttctgttagtgttcaacagttcaagagctattacaaatgtgagtcatgccaaataaacttgatgtaaacaaccataattgaacagcaaggggaaacaggtatattgtgataatgaagtcgctctatgaatattcaactgcagtgttctctgacaaataatagcaactagtctgtctgcgatgtctaaatcagcaggtgtgctcttttacacgcaacagtgagtttgaactttgaatacactcctgcccaatacaaac

SEQ ID NO: 82209 - DNA, 1487 bp, Zea Mays
tcaaagcaacgaaaaacaatctacggttgccaggtctgcgacgtcagtgccgacgaactcatggctcgcgagaggcccgtaaaaacatgatagccagatctgcgacgtcacggctgtcgccagtgatcgccattcgccaccctctccgttccattccaatccgttcagcggtcagcggaacatgatacgcctgcttgccgcgcttgcattgaggggagttcggggagcggccggtgcggaaggaatcgacacagagttcagttcacatggctgctgaatcagagaacggcaactgcaaagcttgggcagcgagagatccttctggagttctctcaccacacagttttaaccgcagagcagtgcaaagcggcgatgtttcgctgaagatcatatactgtggagtctgttatgcagacgttgcttggacgcggaataagctcaatgattcaaaatatcctttggttcctgggcatgagatagctggagttgtaactcaggttggtgcagatgtcaaaggctttaaagtgggtgaccatgggggttactccactcacattgtagtccatgaaaggtattgcttcaaaatacccgatggctaccctttggcgaaggcagcacctcttctgtgtgctggaataaccgtgtatactccaatgatgcgacacaacatgaaccaacctggaaagtcacttggggtcattggtcttggtggtctgggtcacatggctgtgaaatttggtaaagcatttggtcttaaggtcacagttttcagtacaagtgaatcaaagagagatgaagccatcaacctccttggagcagataattttgttatatcatcagacacacagcaaatggagtccctgaagaactccctgcacttcataattgacactgcttccggtgaccatccatttgatccgtatttctctctccttaaggttggtggtgtgatgacattggtaggttttccaagtgagatcaaaatgcatcctgcaagccttatacttggtgcgcggaccttgtctggcagtgttgttggaggtataaaagacatccaagaaatggttaacttctgtgcagccaacaatatctatccggagattgagatcattaagatagattatatcaacgaggctctcgcgaggcttgttaatcgagatgtgaaataccgctttgtaatcgacatcgagaactccttcaagtagcgtgctagtgcacatgctctcgtctttctgttagtgttcaacagttcaagagctattacaaatgtgagtcatgccaaataaacttgatgtaaacaaccataattgaacagcaaggggaaacaggtatattgtgataatgaagtcgctctatgaatattcaactgcagtgttctctgacaaataatagcaactagtctgtctgcgatgtctaaatcagcaggtgtgctcttttacacgcaacagtgagtttgaactttgaatacactcctgcccaatacaaac

SEQ ID NO: 82210 - DNA, 1606 bp, Zea Mays
gtctgaatgaagattgggagtggactaaacactggtgcagctggtgtcgatggccctgctgcaaattcagttaaaaggaagaggaagaaccagttcaggggtatccgccggcgcccgtggggcaaatgggctgctgagatcagagatcctcgcaagggcgtgcgcgtctggctcggtactttcaactcccccgaagaagctgccagagcttacgacgccgaggcacgcaggatccgcggcaagaaggctaaagtcaacttcccggatgaggttcctacggcggtttctcagaagcgccgtgctgctgggcctgcctctctgaaagcgcctaagatggacgttgaggaggagaagccgatcatcaagctcgcagtgaacaatatgaccaactcaaacgcatatcactaccctgccgtcgtcggccacaacatcatacccgagccattcatgcagactcagaacatgccattcgctcctctggtgaattatgctgccctagtgaacctgtcttcagaccaaggcagcaactcgttcggttgctcggacttcagcctcgagaacgactccaggacccctgacataacttcggtgcctgcgcccgttgccaccttggccgccgttggcgagtctgtgttcgtccagaacaccgccggccatgctgtggcgtctcctgcgacggggaacactggtgttgatctcgccgagttggagccgtatatgaatttcctgatggacggtggttcagacgactcgatcagcactctcttgagctgtgatggatcccaggacgtggtcagcaacatggacctttggagcttcgaggacatgcccatgtctgctggtttctactgaggctgaggcccagcgactggtgcttgtgtacatagggggggacaaagggaataatgttctggagatgaagaaacgcttgcgtgggcgtgcctgcaggcacgcgtgtagtagctgcggtattagtatatatgcttagatgttcagtcacttcctttaagtacaatttggcgctggacatgtaccttattttactatgtatccgtgacaacagctatgtgtctgctccttttattttcttgtctttgcttcaaaaaaatggctctgaacattgcgagtttgtactttgtagacaatatatatatatatatatgtgtgtatgtgcttggtttgcttcatccttcgatgcaatgtgagtagtgttctgtatgcaggcttgcatgtgctgatatgcgtgcagcacacgtctatgaaaaagcattcatgcgaaatagatggataatagcaatcaaattttcttcataatggatggataatgaacttctttttgagaagccggtttcgtggcacatgcatatggtctaggatggcacaacatgtacatcacctacaattcaatccatatattattacgatttttacccgtctattagcaattagcaacgactattttacgaaggagcttggagcatgggctaaaagtggataggtatgaaacttcacgcatagcgtgggctagcaaaaatcttgtttattttcattgtcagtgtttaattggtgaaggtgactgaacatctaagcatatcgtggataagtt

SEQ ID NO: 82211 - DNA, 1052 bp, Zea Mays
atgtccgctaaatgtgagggactgtcaggtcccctacgtctccaacaaggtcctctaaagcgtcccctaaattatagaggatgtgccagagaccctaactgtggaggccgcccaccgtgcgctatccgcgcgacggatccaccagccgccgcgaggaaacttccgcctcctcctaccgcgcgctggcgactacatctcccggggccgagccctcaatccggcgtgcttcgtcgccggcatcgaggcaggtgggagacaagagggcttgcgagagcggacgcggagcatggcggaggagcagatcgaagaggcgtccatggccatcgccggacgcggagcatcgtggaggagcagatcgaagaggcgtccatggccacggcggcggccacgccgttccagctccagttcgacaagcccatcccgttccagagagggagtcaggaaagaaggcgctcaaaagtcgggacaaaaatatctgagtgaatcggacctgcagaatgcggacggtcacccagagattgatcttgcgttcgtgctgctgctgccccgccggtcactgataaaaatggcagaatggaatccagagaaggatctgcttgctatggttactgatgactccaaggttctcctccatcgcttcaattggcaaaggctttggacaatctctctagggaagtgcatcacatcaatttgttggagccctgatggtaaaataatagcacttggcacataagctggtttgattcttttgcatgatgtggaggtgtgtatctggatgatgataaaaattgtcggtgtctattgtatctttgtatgaacattcgtttgtacttcatagacacctgatccagtgcctatcttctcttaatatttttctaattgcttattctcatttttatatcatgcttaaaccttatgagcgaactattaggagacatttaggggatacaggcctcaaggacttcttgcccaattatgttttcgatagaggcattttaatacttcttgaagattaatgcgtgtcagctatacaattgtcaattgtgtttgac

SEQ ID NO: 82212 - DNA, 1273 bp, Zea Mays
ggacgttgtcggagaggaaggagatatagagggtggaatcttttagaggagactgtaaaggacggatatagaggatgaatatagaggacgttgctggagacagcctaaggctgcctccaacaagagccgctaaaggctcatgtccgctaaatgtgagggactgtcaggtcccctacgtctccaacaaggtcctctaaagcgtcccctaaattatagaggatgtgccagagaccctaactgtggaggccgcccaccgtgcgctatccgcgcgacggatccaccagccgccgcgaggaaacttccgcctcctcctaccgcgcgctggcgactacatctcccggggccgagccctcaatccggcgtgcttcgtcgccggcatcgaggcaggtgggagacaagagggcttgcgagagcggacgcggagcatggcggaggagcagatcgaagaggcgtccatggccatcgccggacgcggagcatcgtggaggagcagatcgaagaggcgtccatggccacggcggcggccacgccgttccagctccagttcgacaagcccatcccgttccagataaaaatggcagaatggaatccagagaaggatctgcttgctatggttactgatgactccaaggttctcctccatcgcttcaattggcaaaggctttggacaatctctctaggttgatacacccctactccattaccctcagttgcctgttgtttttgcccactttgaatattccttgtcattacaatcaatatgtacaatctgtcaattccagtgtgcccttcagttataccttttagttatagtgatttataagatcatgtctgctttgaacttataaaaaatagtgagaaattgagaactaaagtatttataattgttcagggaagtgcatcacatcaatttgttggagccctgatggtaaaataatagcacttggcacataagctggtttgattcttttgcatgatgtggaggtgtgtatctggatgatgataaaaattgtcggtgtctattgtatctttgtatgaacattcgtttgtacttcatagacacctgatccagtgcctatcttctcttaatatttttctaattgcttattctcatttttatatcatgcttaaaccttatgagcgaactattaggagacatttaggggatacaggcctcaaggacttcttgcccaattatgttttcgatagaggcattttaatacttcttgaagattaatgcgtgtcagctatacaattgtcaattgtgtttgac

SEQ ID NO: 82213 - DNA, 2147 bp, Zea Mays
tagaggacgttgtcggagaggaaggagatatagagggtggaatcttttagaggagactgtaaaggacggatatagaggatgaatatagaggacgttgctggagacagcctaaggctgcctccaacaagagccgctaaaggctcatgtccgctaaatgtgagggactgtcaggtcccctacgtctccaacaaggtcctctaaagcgtcccctaaattatagaggatgtgccagagaccctaactgtggaggccgcccaccgtgcgctatccgcgcgacggatccaccagccgccgcgaggaaacttccgcctcctcctaccgcgcgctggcgactacatctcccggggccgagccctcaatccggcgtgcttcgtcgccggcatcgaggcaggtgggagacaagagggcttgcgagagcggacgcggagcatggcggaggagcagatcgaagaggcgtccatggccatcgccggacgcggagcatcgtggaggagcagatcgaagaggcgtccatggccacggcggcggccacgccgttccagctccagttcgacaagcccatcccgttccaggatcagagagggagtcaggaaagaaggcgctcaaaagtcgggacaaaaatatctgagtgaatcggacctgcagaatgcggacggtcacccagagattgatcttgcgttcgtgctgctgctgccccgccggtcactggtaagctccctgcctcgaccttctcttctcaaactcagttcatcgacacaagaaccaagggaatacgacagtggtgagggacggggagagaaggggtatagcgtggctgtcgcggtccttcgaatctggccatgggtcatggccgcacccgcacattgttcgttaacctaccaaccaccagaaactcgagattggaattggatggataaggcacaagctaacaggatgcctctcattttttagatcagcaatcaattcgttacatctagccacttgtgaaaaagcttacaaaaaatcattttatctttcgatcacatatatgatgtgtaaagtactttattgtttaggggaaaaatttgttcccacatattacaacttagctgtatattcactatgctacttttatcaatacacttttcttatattgttgttatctaatatataaattttcttattgtagatttgattttattggtgaatcggtgcagccaaaaggttttcagtatgcatgtcattttgaaacattcatagtgttatcacttaatgatttgtgaattggtgtagccaaaaactacttttgtctagtaatctagtctaatgatttgccttcgccggcagacactgatatagagcactgatttcagctttgaatgctattttttgttttgcaaatgcacattagtaattacaccgtttgcctcttgttcatgcttaatcagtctcattcaccttgtatcatgtttacaattcgctaccaaacaatctttaagtaatagagagttaatagcaagcacatatatcatacggttgctgatactgaatttcaccttttgtcgctttatatcttttctgtaattcagaatcgattgagcacagtgagattcaatttcctatgtatgctaaatggggcatcgggtactgacgtgcctgtgtttcatacttgtagataaaaatggcagaatggaatccagagaaggatctgcttgctatggttactgatgactccaaggttctcctccatcgcttcaattggcaaaggctttggacaatctctctagggaagtgcatcacatcaatttgttggagccctgatggtaaaataatagcacttggcacataagctggtttgattcttttgcatgatgtggaggtgtgtatctggatgatgataaaaattgtcggtgtctattgtatctttgtatgaacattcgtttgtacttcatagacacctgatccagtgcctatcttctcttaatatttttctaattgcttattctcatttttatatcatgcttaaaccttatgagcgaactattaggagacatttaggggatacaggcctcaaggacttcttgcccaattatgttttcgatagaggcattttaatacttcttgaagattaatgcgtgtcagctatacaattgtcaattgtgtttgac

SEQ ID NO: 82214 - DNA, 2417 bp, Zea Mays
gacaaatacgtatgtacaaaaaataaaaataaaaaatatttctaatatagatatttgagtatagaggacgttgtcggagaggaaggagatatagagggtggaatcttttagaggagactgtaaaggacggatatagaggatgaatatagaggacgttgctggagacagcctaaggctgcctccaacaagagccgctaaaggctcatgtccgctaaatgtgagggactgtcaggtcccctacgtctccaacaaggtcctctaaagcgtcccctaaattatagaggatgtgccagagaccctaactgtggaggccgcccaccgtgcgctatccgcgcgacggatccaccagccgccgcgaggaaacttccgcctcctcctaccgcgcgctggcgactacatctcccggggccgagccctcaatccggcgtgcttcgtcgccggcatcgaggcaggtgggagacaagagggcttgcgagagcggacgcggagcatggcggaggagcagatcgaagaggcgtccatggccatcgccggacgcggagcatcgtggaggagcagatcgaagaggcgtccatggccacggcggcggccacgccgttccagctccagttcgacaagcccatcccgttccaggtctagtctgcgctctcctcccctgcctctcccttctgcgtaggcaaaccctgttgtgcaagttcgtgctgtgctgattcttaaccaacatgtgttgaggctgcaaaataatgtgcggccgcttgggttcacgctgtccagggcaacggctggttcacggatgggcaagctaggccattgccccatctcaaattttacgatctacacaggatcagagagggagtcaggaaagaaggcgctcaaaagtcgggacaaaaatatctgagtgaatcggacctgcagaatgcggacggtcacccagagattgatcttgcgttcgtgctgctgctgccccgccggtcactggtaagctccctgcctcgaccttctcttctcaaactcagttcatcgacacaagaaccaagggaatacgacagtggtgagggacggggagagaaggggtatagcgtggctgtcgcggtccttcgaatctggccatgggtcatggccgcacccgcacattgttcgttaacctaccaaccaccagaaactcgagattggaattggatggataaggcacaagctaacaggatgcctctcattttttagatcagcaatcaattcgttacatctagccacttgtgaaaaagcttacaaaaaatcattttatctttcgatcacatatatgatgtgtaaagtactttattgtttaggggaaaaatttgttcccacatattacaacttagctgtatattcactatgctacttttatcaatacacttttcttatattgttgttatctaatatataaattttcttattgtagatttgattttattggtgaatcggtgcagccaaaaggttttcagtatgcatgtcattttgaaacattcatagtgttatcacttaatgatttgtgaattggtgtagccaaaaactacttttgtctagtaatctagtctaatgatttgccttcgccggcagacactgatatagagcactgatttcagctttgaatgctattttttgttttgcaaatgcacattagtaattacaccgtttgcctcttgttcatgcttaatcagtctcattcaccttgtatcatgtttacaattcgctaccaaacaatctttaagtaatagagagttaatagcaagcacatatatcatacggttgctgatactgaatttcaccttttgtcgctttatatcttttctgtaattcagaatcgattgagcacagtgagattcaatttcctatgtatgctaaatggggcatcgggtactgacgtgcctgtgtttcatacttgtagataaaaatggcagaatggaatccagagaaggatctgcttgctatggttactgatgactccaaggttctcctccatcgcttcaattggcaaaggctttggacaatctctctagggaagtgcatcacatcaatttgttggagccctgatggtaaaataatagcacttggcacataagctggtttgattcttttgcatgatgtggaggtgtgtatctggatgatgataaaaattgtcggtgtctattgtatctttgtatgaacattcgtttgtacttcatagacacctgatccagtgcctatcttctcttaatatttttctaattgcttattctcatttttatatcatgcttaaaccttatgagcgaactattaggagacatttaggggatacaggcctcaaggacttcttgcccaattatgttttcgatagaggcattttaatacttcttgaagattaatgcgtgtcagctatacaattgtcaattgtgtttgac

SEQ ID NO: 82215 - DNA, 1330 bp, Zea Mays
gacaaatacgtatgtacaaaaaataaaaataaaaaatatttctaatatagatatttgagtatagaggacgttgtcggagaggaaggagatatagagggtggaatcttttagaggagactgtaaaggacggatatagaggatgaatatagaggacgttgctggagacagcctaaggctgcctccaacaagagccgctaaaggctcatgtccgctaaatgtgagggactgtcaggtcccctacgtctccaacaaggtcctctaaagcgtcccctaaattatagaggatgtgccagagaccctaactgtggaggccgcccaccgtgcgctatccgcgcgacggatccaccagccgccgcgaggaaacttccgcctcctcctaccgcgcgctggcgactacatctcccggggccgagccctcaatccggcgtgcttcgtcgccggcatcgaggcaggtgggagacaagagggcttgcgagagcggacgcggagcatggcggaggagcagatcgaagaggcgtccatggccatcgccggacgcggagcatcgtggaggagcagatcgaagaggcgtccatggccacggcggcggccacgccgttccagctccagttcgacaagcccatcccgttccagggcaacggctggttcacggatgggcaagctaggccattgccccatctcaaattttacgatctacacaggatcagagagggagtcaggaaagaaggcgctcaaaagtcgggacaaaaatatctgagtgaatcggacctgcagaatgcggacggtcacccagagattgatcttgcgttcgtgctgctgctgccccgccggtcactgataaaaatggcagaatggaatccagagaaggatctgcttgctatggttactgatgactccaaggttctcctccatcgcttcaattggcaaaggctttggacaatctctctagggaagtgcatcacatcaatttgttggagccctgatggtaaaataatagcacttggcacataagctggtttgattcttttgcatgatgtggaggtgtgtatctggatgatgataaaaattgtcggtgtctattgtatctttgtatgaacattcgtttgtacttcatagacacctgatccagtgcctatcttctcttaatatttttctaattgcttattctcatttttatatcatgcttaaaccttatgagcgaactattaggagacatttaggggatacaggcctcaaggacttcttgcccaattatgttttcgatagaggcattttaatacttcttgaagattaatgcgtgtcagctatacaattgtcaattgtgtttgac

SEQ ID NO: 82216 - DNA, 1542 bp, Zea Mays
gacaaatacgtatgtacaaaaaataaaaataaaaaatatttctaatatagatatttgagtatagaggacgttgtcggagaggaaggagatatagagggtggaatcttttagaggagactgtaaaggacggatatagaggatgaatatagaggacgttgctggagacagcctaaggctgcctccaacaagagccgctaaaggctcatgtccgctaaatgtgagggactgtcaggtcccctacgtctccaacaaggtcctctaaagcgtcccctaaattatagaggatgtgccagagaccctaactgtggaggccgcccaccgtgcgctatccgcgcgacggatccaccagccgccgcgaggaaacttccgcctcctcctaccgcgcgctggcgactacatctcccggggccgagccctcaatccggcgtgcttcgtcgccggcatcgaggcaggtgggagacaagagggcttgcgagagcggacgcggagcatggcggaggagcagatcgaagaggcgtccatggccatcgccggacgcggagcatcgtggaggagcagatcgaagaggcgtccatggccacggcggcggccacgccgttccagctccagttcgacaagcccatcccgttccagggcaacggctggttcacggatgggcaagctaggccattgccccatctcaaattttacgatctacacaggatcagagagggagtcaggaaagaaggcgctcaaaagtcgggacaaaaatatctgagtgaatcggacctgcagaatgcggacggtcacccagagattgatcttgcgttcgtgctgctgctgccccgccggtcactgataaaaatggcagaatggaatccagagaaggatctgcttgctatggttactgatgactccaaggttctcctccatcgcttcaattggcaaaggctttggacaatctctctaggttgatacacccctactccattaccctcagttgcctgttgtttttgcccactttgaatattccttgtcattacaatcaatatgtacaatctgtcaattccagtgtgcccttcagttataccttttagttatagtgatttataagatcatgtctgctttgaacttataaaaaatagtgagaaattgagaactaaagtatttataattgttcagggaagtgcatcacatcaatttgttggagccctgatggtaaaataatagcacttggcacataagctggtttgattcttttgcatgatgtggaggtgtgtatctggatgatgataaaaattgtcggtgtctattgtatctttgtatgaacattcgtttgtacttcatagacacctgatccagtgcctatcttctcttaatatttttctaattgcttattctcatttttatatcatgcttaaaccttatgagcgaactattaggagacatttaggggatacaggcctcaaggacttcttgcccaattatgttttcgatagaggcattttaatacttcttgaagattaatgcgtgtcagctatacaattgtcaattgtgtttgac

SEQ ID NO: 82217 - DNA, 1298 bp, Zea Mays
gcaaaactaaaatatgtacaatacatttgagagtatgacaaatacgtatgtacaaaaaataaaaataaaaaatatttctaatatagatatttgagtatagaggacgttgtcggagaggaaggagatatagagggtggaatcttttagaggagactgtaaaggacggatatagaggatgaatatagaggacgttgctggagacagcctaaggctgcctccaacaagagccgctaaaggctcatgtccgctaaatgtgagggactgtcaggtcccctacgtctccaacaaggtcctctaaagcgtcccctaaattatagaggatgtgccagagaccctaactgtggaggccgcccaccgtgcgctatccgcgcgacggatccaccagccgccgcgaggaaacttccgcctcctcctaccgcgcgctggcgactacatctcccggggccgagccctcaatccggcgtgcttcgtcgccggcatcgaggcaggtgggagacaagagggcttgcgagagcggacgcggagcatggcggaggagcagatcgaagaggcgtccatggccatcgccggacgcggagcatcgtggaggagcagatcgaagaggcgtccatggccacggcggcggccacgccgttccagctccagttcgacaagcccatcccgttccaggatcagagagggagtcaggaaagaaggcgctcaaaagtcgggacaaaaatatctgagtgaatcggacctgcagaatgcggacggtcacccagagattgatcttgcgttcgtgctgctgctgccccgccggtcactgataaaaatggcagaatggaatccagagaaggatctgcttgctatggttactgatgactccaaggttctcctccatcgcttcaattggcaaaggctttggacaatctctctagggaagtgcatcacatcaatttgttggagccctgatggtaaaataatagcacttggcacataagctggtttgattcttttgcatgatgtggaggtgtgtatctggatgatgataaaaattgtcggtgtctattgtatctttgtatgaacattcgtttgtacttcatagacacctgatccagtgcctatcttctcttaatatttttctaattgcttattctcatttttatatcatgcttaaaccttatgagcgaactattaggagacatttaggggatacaggcctcaaggacttcttgcccaattatgttttcgatagaggcattttaatacttcttgaagattaatgcgtgtcagctatacaattgtcaattgtgtttgac

SEQ ID NO: 82218 - DNA, 1510 bp, Zea Mays
gcaaaactaaaatatgtacaatacatttgagagtatgacaaatacgtatgtacaaaaaataaaaataaaaaatatttctaatatagatatttgagtatagaggacgttgtcggagaggaaggagatatagagggtggaatcttttagaggagactgtaaaggacggatatagaggatgaatatagaggacgttgctggagacagcctaaggctgcctccaacaagagccgctaaaggctcatgtccgctaaatgtgagggactgtcaggtcccctacgtctccaacaaggtcctctaaagcgtcccctaaattatagaggatgtgccagagaccctaactgtggaggccgcccaccgtgcgctatccgcgcgacggatccaccagccgccgcgaggaaacttccgcctcctcctaccgcgcgctggcgactacatctcccggggccgagccctcaatccggcgtgcttcgtcgccggcatcgaggcaggtgggagacaagagggcttgcgagagcggacgcggagcatggcggaggagcagatcgaagaggcgtccatggccatcgccggacgcggagcatcgtggaggagcagatcgaagaggcgtccatggccacggcggcggccacgccgttccagctccagttcgacaagcccatcccgttccaggatcagagagggagtcaggaaagaaggcgctcaaaagtcgggacaaaaatatctgagtgaatcggacctgcagaatgcggacggtcacccagagattgatcttgcgttcgtgctgctgctgccccgccggtcactgataaaaatggcagaatggaatccagagaaggatctgcttgctatggttactgatgactccaaggttctcctccatcgcttcaattggcaaaggctttggacaatctctctaggttgatacacccctactccattaccctcagttgcctgttgtttttgcccactttgaatattccttgtcattacaatcaatatgtacaatctgtcaattccagtgtgcccttcagttataccttttagttatagtgatttataagatcatgtctgctttgaacttataaaaaatagtgagaaattgagaactaaagtatttataattgttcagggaagtgcatcacatcaatttgttggagccctgatggtaaaataatagcacttggcacataagctggtttgattcttttgcatgatgtggaggtgtgtatctggatgatgataaaaattgtcggtgtctattgtatctttgtatgaacattcgtttgtacttcatagacacctgatccagtgcctatcttctcttaatatttttctaattgcttattctcatttttatatcatgcttaaaccttatgagcgaactattaggagacatttaggggatacaggcctcaaggacttcttgcccaattatgttttcgatagaggcattttaatacttcttgaagattaatgcgtgtcagctatacaattgtcaattgtgtttgac

SEQ ID NO: 82219 - DNA, 840 bp, Zea Mays
acgggggaacatagtgtcccaatcatttttaggagactggtctttcggcgctcaggttctaattgatgacaaccccagatatgctctagagtgtgctaatgatggcatgagggtccttctgttcgattacgaaagctcgtatccttggtgcaaaactggagccgatgaactgcatccgctggtgacaaaggttcacaactgggaagaagtcgaggagaaacttctctcttgggtagtacctgatagctgacactcttctgtcttgtgagaagcactgcttgagaccagcaaatgattccttttgcctggtttctaaaggaacctgatagggtgaaagactgcaatgttcctagagcttgattttcaatacagatgtcgatagcctctccaagagtcattctaaaacccactctaaatcatcatccgaagagtcatttgcataaatttgactccaactccaacagtttttctatatcctgggatatttttcattaaactctctattcacaataattagttaggatatggagagtcttggggatgttgtcaacgtaagctaggatattcagcttcattaccgcagcctggttgaggcatattcgactgtacttggtcagtctgagctgtaggcgcttctgctctcacacatcagaatcttgttttatccttttgccgcagccgggtgtactatgtatatatcgacgctgccatatggctaagatggtatttgaattgttctaatacagaaaactcgtgtgtgtgtgggtccttggaccaactgatttggagcattttcattattgaggttaagcacaaactcgatgagagttcagtctttat

SEQ ID NO: 82220 - DNA, 2000 bp, Zea Mays
ggctcctttcccgaaaaagaagcgagcccaccaccacggtcactgacgttcacaaaaaaaatcgcacacaaaattcctagaccacgttttttttagtcgcacaaatcctacaaaccaaacagcaagagcggaagaagaaacgaaaaaggttcactggaatcgaccaagaaatccgccttgccatctccgtttcgtatatgccctgagaatttccaaacgaaatttccgagcttttccctcgccgcgcgaccttcgatctcgcttgaaagagatggcccagatcacgggaccggtgtgaggactgagacgccgacctccgacctcaccgaggcattcgattcgtcgcaatcctcgccctcactcgcgtgttcaggtttgtcgggctgccccgggataggaatgcttctgtcgacatgctaagccgcggagccgtgcggttgctgttgtatcgtctccggcctccgcctctgcgtttgagttggaatccgagcggtgctatgccatccgccgccgccaaccgctcgagccgggaggaggttcacgccgagcggcgcgcttagcttgaggggttgcttgggttggcgggatggtggcggcgacggcgagttcaggaggagggtggacggagaggcggcggggatgaaggcgcaggtgctcaccacgcagcggcagctgatgcgcgatccggaggtgctgccgctcgaggaggccgccacaggcaagagcatgaacgtgaatggtgcctgtcggcgagggaagcggctagggtttccggagcaggcagcggctaagatggtggttgctgttgatgtagatgaagttcttggtagcttccttgcggctctgaacaaatttattgctgatcgttattcttggaatcactcagtatcagaatatcatgtatacgagttctttaagatatggaactgttctcgagaaagagctaattttcttgtccacgagttcttcacaacccattacttccaagatggcattcatcctattccgggggctcgagatgctctccaaactctttcttctttctgtagcttgtctgtagtaacatctcggcaggatgtaattaagaatcacacattggaatggattgagaagtattatccaggcttatttgagcagatccatttcgggaatcatttcgctttggaaggtcaatcaaggccaaaatcagagatttgcaggtctttcggcgctcaggttctaattgatgacaaccccagatatgctctagagtgtgctaatgatggcatgagggtccttctgttcgattacgaaagctcgtatccttggtgcaaaactggagccgatgaactgcatccgctggtgacaaaggttcacaactgggaagaagtcgaggagaaacttctctcttgggtagtacctgatagctgacactcttctgtcttgtgagaagcactgcttgagaccagcaaatgattccttttgcctggtttctaaaggaacctgatagggtgaaagactgcaatgttcctagagcttgattttcaatacagatgtcgatagcctctccaagagtcattctaaaacccactctaaatcatcatccgaagagtcatttgcataaatttgactccaactccaacagtttttctatatcctgggatatttttcattaaactctctattcacaataattagttaggatatggagagtcttggggatgttgtcaacgtaagctaggatattcagcttcattaccgcagcctggttgaggcatattcgactgtacttggtcagtctgagctgtaggcgcttctgctctcacacatcagaatcttgttttatccttttgccgcagccgggtgtactatgtatatatcgacgctgccatatggctaagatggtatttgaattgttctaatacagaaaactcgtgtgtgtgtgggtccttggaccaactgatttggagcattttcattattgaggttaagcacaaactcgatgagagttcagtctttat

SEQ ID NO: 82221 - DNA, 1553 bp, Zea Mays
ggctcctttcccgaaaaagaagcgagcccaccaccacggtcactgacgttcacaaaaaaaatcgcacacaaaattcctagaccacgttttttttagtcgcacaaatcctacaaaccaaacagcaagagcggaagaagaaacgaaaaaggttcactggaatcgaccaagaaatccgccttgccatctccgtttcgtatatgccctgagaatttccaaacgaaatttccgagcttttccctcgccgcgcgaccttcgatctcgcttgaaagagatggcccagatcacgggaccggtgtgaggactgagacgccgacctccgacctcaccgaggcattcgattcgtcgcaatcctcgccctcactcgcgtgttcagttcttggtagcttccttgcggctctgaacaaatttattgctgatcgttattcttggaatcactcagtatcagaatatcatgtatacgagttctttaagatatggaactgttctcgagaaagagctaattttcttgtccacgagttcttcacaacccattacttccaagatggcattcatcctattccgggggctcgagatgctctccaaactctttcttctttctgtagcttgtctgtagtaacatctcggcaggatgtaattaagaatcacacattggaatggattgagaagtattatccaggcttatttgagcagatccatttcgggaatcatttcgctttggaaggtcaatcaaggccaaaatcagagatttgcaggtctttcggcgctcaggttctaattgatgacaaccccagatatgctctagagtgtgctaatgatggcatgagggtccttctgttcgattacgaaagctcgtatccttggtgcaaaactggagccgatgaactgcatccgctggtgacaaaggttcacaactgggaagaagtcgaggagaaacttctctcttgggtagtacctgatagctgacactcttctgtcttgtgagaagcactgcttgagaccagcaaatgattccttttgcctggtttctaaaggaacctgatagggtgaaagactgcaatgttcctagagcttgattttcaatacagatgtcgatagcctctccaagagtcattctaaaacccactctaaatcatcatccgaagagtcatttgcataaatttgactccaactccaacagtttttctatatcctgggatatttttcattaaactctctattcacaataattagttaggatatggagagtcttggggatgttgtcaacgtaagctaggatattcagcttcattaccgcagcctggttgaggcatattcgactgtacttggtcagtctgagctgtaggcgcttctgctctcacacatcagaatcttgttttatccttttgccgcagccgggtgtactatgtatatatcgacgctgccatatggctaagatggtatttgaattgttctaatacagaaaactcgtgtgtgtgtgggtccttggaccaactgatttggagcattttcattattgaggttaagcacaaactcgatgagagttcagtctttat

SEQ ID NO: 82222 - DNA, 575 bp, Zea Mays
aaccttaaatgctgctagggtacatgaacactctgaccttgcgcccctgcactcactcaggcgggaggttcgacttgaacttggcgcggacaacgccggagttgccgtgcgggcgggtgaccttaccccagatgcacctgtagcgggtctcactgctcttggtcttggccttgtagatgtacgccatgcgcttgccagcgtaccacgcgacgtcctccttggtgttcaccccctcgatctgcacaagcgacgtggtctcgtactggttcgacttggacctgcacagccaccaccgcaaccaccgttagcggaaacgaaccgaggaatggccagatccaagtaacacggacgggggaagaagcggaggcaatgagctcgcctcttgtatccgaggatggtgccccggacgtagagcctgacgcgctgccccgtgcgtcccttcaccatggtggccgcctacttccttccgcttccgcttccgcttccgccgccggatacggagagagagagagctcgtgcacattgggggaagacaacgagacggccgcaggcggagagaagaacgaacggcctcg

SEQ ID NO: 82223 - DNA, 2845 bp, Zea Mays
atttaatctcatcagtcatcatgtcgtcatcaaggttctgatttcaagtgtgcttatgcagacaatctccctaggttgttatatatctttgttcatcattgggtaagaagaacttgtttcatgtttgttgacgtgagaggtactatgggactgctacagataactgcaaatgcttgttaagaaatgcaagtgagtggttgtctcacagagcaaccgatgtaactggaaaagaacatgaagagaagcacttaagggtgtttgcctttgtgttaaatggtatatttggaaaagaacatgaagagaagcagatgataaagagaattgtgaacggatgcaagtgcaccgaactcaaagtatactaccagctaagcctccccactatcattttatctaaaaattagcatcaactgatatataccggaagaatgcatatataaactttatacccaataaaaaacccccaatacacacaagctcgacattgtattacttaacatatgtcatataaaagtcatattaggggaagcattgaaaagaagtcagttcattttatgtttgagcgacaaattcactaacatatcacaggctactaaagaacagttgcagcgacaaattcgcttgaaagcttaccttggcctgagaagctacagaagccgtcgctgcgttgcagcgaacccccggtggtgtcctgtcgtccggttaaccaagcgcctctcccttccttcttccgcacccgctcgctagccgaaacaacaggctactaaagaatgaactgaaaacaaaaaaggcatgcaatctaccacatcaggtgttcaaacagtggacattgaaaagaagtcggttccttttaattcaaaatgtgcccttgcatatacatttgaaaccataaaaggaagatgacctctcgatcaagataacgatacactttttgatgggcgaagcagagcagtagcccaaaaaaggaaagtactctaaagtctgaacaatttcgtaaagtaacttggagatattggttgggaagcatagatcagtcaaatagtgtatttcaagagaaaataatggtcaggtggcatgtaaatgcatgtaagaatggcatgaaaattttaatgcttttacttgagtctcaaaatcccatcacgacaaggagattttgttgtaggatcttaataataccttacaacacataatagaaacttcacaaggtagtaaacactaaaacagtcagaaaattgaataaatagtcattaatgagataatgattatacttgtgtagtttgtcaagttgaatggctaactatcaacatttcataaattaaaatgaaataattgttgggggccttcgtcttccgaaggtcctcaaaaacatgattaacaatgtttcccaagtataatatatgtacaggaaccttcggactcgggatgaagttgtacacaatacggagagcagggtcggaacgaaggttgaaccagcgccgaagctgtgcgcaagggagcttcgactcgatagcagaaaaaggaaccgacttaaggaggaaaaggctatttagtcctcaatagattgttcttaagtcaatagtgaatatgaagggcatgaatgtaatttcacacgggctgcgacctgtgcctataaatagatgaacagtacccccatactgttcacgctgacttgtactcgctcgtgcgttacgcttgtacttttaccttctgtcgagtcgaaggtacaaatgtaattcgatattgttcttatttatccaggattatataataaatatatgtaaataatgttatgtgattattcatgttattctctcatgtttcatatgcttctccatttatcaatgtaaattatgatgatgaaggtatgtccttcatgaccttcgtccgaagatcattatatcctaagagaaataatgcttcgagggacgaagggcattaaccattaacttatttctgtgttgccttgttcttaattcatagcatttgagaacaagtccccaacattggcgcccacctccagtgtactcacttccacaatcttcggcaaagcatcgaccttcgtcatgccgccgaagaagataacagcgccaggggctgcactgcagccactggacacaaaccaggagactctctctctccgagaggctcgaagccagaacagaaaggccactagtccaacattctaggaggaggagttggaccaggagatcagggacatggaaatcatccaccaacaggtgcaaaggaaaaaggagaagatggctcggttggccgatcttcaaaggaagatcgatgaagctactgaggaagtgcgtcatcttgctcaggatgatcaagaccgaaggccccaacacagggagcttcgtcaagagggcttgttcaacgaagatggatggtacgatgattttaatcatgatacctttacttttgatgatgtttctcccttggcagcataattgcaggctatctgaaagtcgcctagaggggggtgaatagggcgaaactgaaatttacaaagttaatcacaactacaagccgggttagcgttagaaatataatcgagtccgcgagagagggtggaaaacaaatcgcaagcaaaataagaagtgtgacacacggatttgttttaccgaggttcggttcttgcaaacctactccccgttgaggaggccacaaaggccgggtctttttcaaccccttccctctctcaaacggtccctcagaccgggtgagcttcttcttctcaatcaaacgggaacaaaacttccccgcaaggtccaccacacaattggtgcctcttgccttggttacaattgagttgatcgcaagaaagaatcaaagaagaaag

SEQ ID NO: 82224 - DNA, 3092 bp, Zea Mays
cctaccagggcgtggtgcaaaccagtacagacgcaattggcagaacacggagcatgatggcctacttggccgtggtggtttccctaggccatcaggatatactgggcagttgtcatcaaaggatcatggcaatgcgcctcagctaaacaggacatcagaacgctaccagccaccacgtccttacaaggctgctcctttttcacggaaagacattgactcgattaatgatgagacattcgggtcttctgaattatcaaatgaggatagagcagaagaagaaaggaagcggagggcatcttttgagttgatgagaaaagagcaacataaagcagtgctaggaaagaagagtggtcctgatatcctgaaggagaatcccagtgatgatatattttcaaagttacagacatctactgcaaaggcaaatgccaaaactaaaaacgagaagttagatggttctgtagtatcctcatatcaggaagataccactaaaccatcttcagttctactagctcctgcagccaggccgcttgtcccgccgggttttgcaaatgcattcgctgacaagaagcttcagtcacagtcgtctaacatcacacatgagccgaagctagaggatgaccagtcagcaacagggttcacatctgaaagtaaagagaagggagtttctggtaacgatgctactatgggtccaaagcacacgcttccacctggtagtgttacctcttcagctgaattggcttctagcgttctgaaagggagcgaggattgggatgctgatgtaatggataagtattctattggaaaagaaggcaaatctaaaaatattgatccagttaggaaggatgattcagtagcaatcttagaacagttctttggcaatgttttatcgaaaagcggcagcaacctaccaacttatgttgagaaccagccattgaaaactgatgatgacatgatcacttctgtgccagaatcatccaaatttgctcattggtttcttgatgaagacttgaaacctgcagaagacttatcttcaaagagcctgctctccatgattgtcaaaaatgaaaatccagagcttatctcatttacatcctctacgcctgccaatggagttcttgaacaatgcatccattctgatgttccagaggcagttcctattatgacatgtgaggatcttgagcagacgatgttagcacaggttagcaatagcagctcaactcagataaatgctacaaaggagcaactgactgttatggatgaaccagttgccatgcagaaagtaactgtagataatcatgcatcacaacatcttctttcattgttgcaaaaaggaacagataataagggagcaccttccctgggtttccagagagaatcaactgatgaacctctgagtgttgacacaaatttaatggcaaatggtggaatatctggaagtgatccggttaacagtgttgaaaatgttcctacttctgggaaggacttgacattggaagcgttattcggggctgcatttatgaatgagctccactcgaaagatgcaccagtttctattcgaggagccacaactggtggtcctactgagtttgcagagatgggtaaaactctgttgtcatctagccatgaaggatactaccctgttgaacagaccgtacacttcaacaatactaaagatgctgctgtccgtagagaaccaggtattgagcattcagcagtacctggtctaagtcaggggagtgctagttttgacaagaaaggaatggaaattcatctgcctgaagaagataatttgtttaccatgagtgattctctgcttggtcaaaattctgatattttggcatcagtaggatccagcagggttgaagggctattgcctgaaaaggcacttgataacctcagctataggtttcaaagtcttgtgcctggtgatgcagaacacattcaagtatatggtcctgatgcacttggatctcatcctcgtgattctcagaatatgtatcatcttctacagggtaggcctcctatgatagcacctcaccctatgatggatcacattgttaataggaaacagccagctccatttgatatggcacagtcgatacaccatgattctcaccgttctttcccatctaatgtgaatcatatgcaacataatcttcatgggccaggggtccctcacttggaccctgctggacatattatgcgacaacacatgtccatgcctggaagatttcctccagaaggcttgccaagaggtgtccctccatctcagcctgtgcatcacatggctggttatagacctgaaatgggtaatgtaaataatttccatatgcaccctcgccagcccaactatggagaatttggattgatgatgccaggtccagaggtgaggggcaatcatccagaggcgttcgaaaggttgatccagatggagatgtcagccagatcgaagcaacagcaggtgcaccaccctgcaatggccgctggccgtgtgcctagtgggatgtacgggcacgagcttgatgcgaaattgagatacagatgatggatgcctggatgcttcactccgtacagaggacctggaggtgtggtttgttgtatgtgcgtggtcactctttgcccagactgctgtgtattatttctgctaacatggtttagcatcagccgtcggtcgcgactgattggaggcctgcctcacttgtagggttgtagcatgtacatctgaacgggtgatggaacggagtgggtctaagatctgtaggagcggaagtctaccgggaaaaggggttatggtgtgctgaatggaagacgtggcgtcgacgtcttagcagccacatgtgtaatgacgttttctgtctactgtttctgacgactatgcagtttccattttgtataagctctgttatgcaaaaggaaaaaaaaagaagaaaaaaaactgagtcagattaacagattggcgacagtgtccgcttgaccctatatcttcaacttgtttgaaaggaaatgaccacgcgtcatgccgagacgtttgtagctgatagcactgtttgagacgttttgctgaacggaaaggctgctgcctccaggttttt

SEQ ID NO: 82225 - DNA, 3513 bp, Zea Mays
agtgcgttcgccccttacctttttcttgtccctttcacggtttcaccccgcgttcgctctctctcccgtggcgacgactgggcggccgccgcagccgccctagcccggtgcggctcttcgtcgggtccttcgccggcgacgggcacctaccaggatgaagacgaggatagtgtactccagggagtttctgctgtcgcttggcgagttggagcattgcaagaagctgccccctgactttgatgcagcgctgcttagtgagctgcaggagctgtcagcgggtgtgcttgagagaaacaagggctactacaacacatcccagggacggccagatgggtcggtgggatatacttactcttctcgtggtgggaacactggagggaggtgggatactcgctcatctggatcaagtgatcgggatggggaacctgatcgtgagtctcagacacaggcagggcgtggtgcaaaccagtacagacgcaattggcagaacacggagcatgatggcctacttggccgtggtggtttccctaggccatcaggatatactgggcagttgtcatcaaaggatcatggcaatgcgcctcagctaaacaggacatcagaacgctaccagccaccacgtccttacaaggctgctcctttttcacggaaagacattgactcgattaatgatgagacattcgggtcttctgaattatcaaatgaggatagagcagaagaagaaaggaagcggagggcatcttttgagttgatgagaaaagagcaacataaagcagtgctaggaaagaagagtggtcctgatatcctgaaggagaatcccagtgatgatatattttcaaagttacagacatctactgcaaaggcaaatgccaaaactaaaaacgagaagttagatggttctgtagtatcctcatatcaggaagataccactaaaccatcttcagttctactagctcctgcagccaggccgcttgtcccgccgggttttgcaaatgcattcgctgacaagaagcttcagtcacagtcgtctaacatcacacatgagccgaagctagaggatgaccagtcagcaacagggttcacatctgaaagtaaagagaagggagtttctggtaacgatgctactatgggtccaaagcacacgcttccacctggtagtgttacctcttcagctgaattggcttctagcgttctgaaagggagcgaggattgggatgctgatgtaatggataagtattctattggaaaagaaggcaaatctaaaaatattgatccagttaggaaggatgattcagtagcaatcttagaacagttctttggcaatgttttatcgaaaagcggcagcaacctaccaacttatgttgagccattgaaaactgatgatgacatgatcacttctgtgccagaatcatccaaatttgctcattggtttcttgatgaagacttgaaacctgcagaagacttatcttcaaagagcctgctctccatgattgtcaaaaatgaaaatccaggtctagaaaatttaaaccatactcctttatctgatgctgctgcccagaatttatccccaagagcacctattgataaacttgattctgcatcagagcttatctcatttacatcctctacgcctgccaatggagttcttgaacaatgcatccattctgatgttccagaggcagttcctattatgacatgtgaggatcttgagcagacgatgttagcacaggttagcaatagcagctcaactcagataaatgctacaaaggagcaactgactgttatggatgaaccagttgccatgcagaaagtaactgtagataatcatgcatcacaacatcttctttcattgttgcaaaaaggaacagataataagggagcaccttccctgggtttccagagagaatcaactgatgaacctctgagtgttgacacaaatttaatggcaaatggtggaatatctggaagtgatccggttaacagtgttgaaaatgttcctacttctgggaaggacttgacattggaagcgttattcggggctgcatttatgaatgagctccactcgaaagatgcaccagtttctattcgaggagccacaactggtggtcctactgagtttgcagagatgggtaaaactctgttgtcatctagccatgaaggatactaccctgttgaacagaccgtacacttcaacaatactaaagatgctgctgtccgtagagaaccaggtattgagcattcagcagtacctggtctaagtcaggggagtgctagttttgacaagaaaggaatggaaattcatctgcctgaagaagataatttgtttaccatgagtgattctctgcttggtcaaaattctgatattttggcatcagtaggatccagcagggttgaagggctattgcctgaaaaggcacttgataacctcagctataggtttcaaagtcttgtgcctggtgatgcagaacacattcaagtatatggtcctgatgcacttggatctcatcctcgtgattctcagaatatgtatcatcttctacagggtaggcctcctatgatagcacctcaccctatgatggatcacattgttaataggaaacagccagctccatttgatatggcacagtcgatacaccatgattctcaccgttctttcccatctaatgtgaatcatatgcaacataatcttcatgggccaggggtccctcacttggaccctgctggacatattatgcgacaacacatgtccatgcctggaagatttcctccagaaggcttgccaagaggtgtccctccatctcagcctgtgcatcacatggctggttatagacctgaaatgggtaatgtaaataatttccatatgcaccctcgccagcccaactatggagaatttggattgatgatgccaggcccatcaggtccagaggtgaggggcaatcatccagaggcgttcgaaaggttgatccagatggagatgtcagccagatcgaagcaacagcaggtgcaccaccctgcaatggccgctggccgtgtgcctagtgggatgtacgggcacgagcttgatgcgaaattgagatacagatgatggatgcctggatgcttcactccgtacagaggacctggagggttgtagcatgtacatctgaacgggtgatggaacggagtgggtctaagatctgtaggagcggaagtctaccgggaaaaggggttatggtgtgctgaatggaagacgtggcgtcgacgtcttagcagccacatgtgtaatgacgttttctgtctactgtttctgacgactatgcagtttccattttgtataagctctgttatgcaaaaggaaaaaaaaagaagaaaaaaaactgagtcagattaacagattggcgacagtgtccgcttgaccctatatcttcaacttgtttgaaaggaaatgaccacgcgtcatgccgagacgtttgtagctgatagcactgtttgagacgttttgctgaacggaaaggctgctgcctccaggttttt

SEQ ID NO: 82226 - DNA, 3494 bp, Zea Mays
gtcagacagagacccgcaggcctgcaagcaccgagcagcatcgcccatccggccatcccccatcccgcatccaaggcctgcctcgcctgctcgttcgacctcaaccagtccgccctgtatatccatggcaggatgaagacgaggatagtgtactccagggagtttctgctgtcgcttggcgagttggagcattgcaagaagctgccccctgactttgatgcagcgctgcttagtgagctgcaggagctgtcagcgggtgtgcttgagagaaacaagggctactacaacacatcccagggacggccagatgggtcggtgggatatacttactcttctcgtggtgggaacactggagggaggtgggatactcgctcatctggatcaagtgatcgggatggggaacctgatcgtgagtctcagacacaggggcgtggtgcaaaccagtacagacgcaattggcagaacacggagcatgatggcctacttggccgtggtggtttccctaggccatcaggatatactgggcagttgtcatcaaaggatcatggcaatgcgcctcagctaaacaggacatcagaacgctaccagccaccacgtccttacaaggctgctcctttttcacggaaagacattgactcgattaatgatgagacattcgggtcttctgaattatcaaatgaggatagagcagaagaagaaaggaagcggagggcatcttttgagttgatgagaaaagagcaacataaagcagtgctaggaaagaagagtggtcctgatatcctgaaggagaatcccagtgatgatatattttcaaagttacagacatctactgcaaaggcaaatgccaaaactaaaaacgagaagttagatggttctgtagtatcctcatatcaggaagataccactaaaccatcttcagttctactagctcctgcagccaggccgcttgtcccgccgggttttgcaaatgcattcgctgacaagaagcttcagtcacagtcgtctaacatcacacatgagccgaagctagaggatgaccagtcagcaacagggttcacatctgaaagtaaagagaagggagtttctggtaacgatgctactatgggtccaaagcacacgcttccacctggtagtgttacctcttcagctgaattggcttctagcgttctgaaagggagcgaggattgggatgctgatgtaatggataagtattctattggaaaagaaggcaaatctaaaaatattgatccagttaggaaggatgattcagtagcaatcttagaacagttctttggcaatgttttatcgaaaagcggcagcaacctaccaacttatgttgagaaccagccattgaaaactgatgatgacatgatcacttctgtgccagaatcatccaaatttgctcattggtttcttgatgaagacttgaaacctgcagaagacttatcttcaaagagcctgctctccatgattgtcaaaaatgaaaatccaggtctagaaaatttaaaccatactcctttatctgatgctgctgcccagaatttatccccaagagcacctattgataaacttgattctgcatcagagcttatctcatttacatcctctacgcctgccaatggagttcttgaacaatgcatccattctgatgttccagaggcagttcctattatgacatgtgaggatcttgagcagacgatgttagcacaggttagcaatagcagctcaactcagataaatgctacaaaggagcaactgactgttatggatgaaccagttgccatgcagaaagtaactgtagataatcatgcatcacaacatcttctttcattgttgcaaaaaggaacagataataagggagcaccttccctgggtttccagagagaatcaactgatgaacctctgagtgttgacacaaatttaatggcaaatggtggaatatctggaagtgatccggttaacagtgttgaaaatgttcctacttctgggaaggacttgacattggaagcgttattcggggctgcatttatgaatgagctccactcgaaagatgcaccagtttctattcgaggagccacaactggtggtcctactgagtttgcagagatgggtaaaactctgttgtcatctagccatgaaggatactaccctgttgaacagaccgtacacttcaacaatactaaagatgctgctgtccgtagagaaccaggtattgagcattcagcagtacctggtctaagtcaggggagtgctagttttgacaagaaaggaatggaaattcatctgcctgaagaagataatttgtttaccatgagtgattctctgcttggtcaaaattctgatattttggcatcagtaggatccagcagggttgaagggctattgcctgaaaaggcacttgataacctcagctataggtttcaaagtcttgtgcctggtgatgcagaacacattcaagtatatggtcctgatgcacttggatctcatcctcgtgattctcagaatatgtatcatcttctacagggtaggcctcctatgatagcacctcaccctatgatggatcacattgttaataggaaacagccagctccatttgatatggcacagtcgatacaccatgattctcaccgttctttcccatctaatgtgaatcatatgcaacataatcttcatgggccaggggtccctcacttggaccctgctggacatattatgcgacaacacatgtccatgcctggaagatttcctccagaaggcttgccaagaggtgtccctccatctcagcctgtgcatcacatggctggttatagacctgaaatgggtaatgtaaataatttccatatgcaccctcgccagcccaactatggagaatttggattgatgatgccaggcccatcaggtccagaggtgaggggcaatcatccagaggcgttcgaaaggttgatccagatggagatgtcagccagatcgaagcaacagcaggtgcaccaccctgcaatggccgctggccgtgtgcctagtgggatgtacgggcacgagcttgatgcgaaattgagatacagatgatggatgcctggatgcttcactccgtacagaggacctggagggttgtagcatgtacatctgaacgggtgatggaacggagtgggtctaagatctgtaggagcggaagtctaccgggaaaaggggttatggtgtgctgaatggaagacgtggcgtcgacgtcttagcagccacatgtgtaatgacgttttctgtctactgtttctgacgactatgcagtttccattttgtataagctctgttatgcaaaaggaaaaaaaaagaagaaaaaaaactgagtcagattaacagattggcgacagtgtccgcttgaccctatatcttcaacttgtttgaaaggaaatgaccacgcgtcatgccgagacgtttgtagctgatagcactgtttgagacgttttgctgaacggaaaggctgctgcctccaggttttt

SEQ ID NO: 82227 - DNA, 3402 bp, Zea Mays
gtcagacagagacccgcaggcctgcaagcaccgagcagcatcgcccatccggccatcccccatcccgcatccaaggcctgcctcgcctgctcgttcgacctcaaccaaacagacccgcagtgcgttcgccccttacctttttcttgtccctttcacggtttcaccccgcgttcgctctctctcccgtggcgacgactgggcggccgccgcagccgccctagcccggtgcggctcttcgtcgggtccttcgccggcgacgggcacctaccaggatgaagacgaggatagtgtactccagggagtttctgctgtcgcttggcgagttggagcattgcaagaagctgccccctgactttgatgcagcgctgcttagtgagctgcaggagctgtcagcgggtgtgcttgagagaaacaagggctactacaacacatcccagggacggccagatgggtcggtgggatatacttactcttctcgtggtgggaacactggagggaggtgggatactcgctcatctggatcaagtgatcgggatggggaacctgatcgtgagtctcagacacaggcagggcgtggtgcaaaccagtacagacgcaattggcagaacacggagcatgatggcctacttggccgtggtggtttccctaggccatcaggatatactgggcagttgtcatcaaaggatcatggcaatgcgcctcagctaaacaggacatcagaacgctaccagccaccacgtccttacaaggctgctcctttttcacggaaagacattgactcgattaatgatgagacattcgggtcttctgaattatcaaatgaggatagagcagaagaagaaaggaagcggagggcatcttttgagttgatgagaaaagagcaacataaagcagtgctaggaaagaagagtggtcctgatatcctgaaggagaatcccagtgatgatatattttcaaagttacagacatctactgcaaaggcaaatgccaaaactaaaaacgagaagttagatggttctgtagtatcctcatatcaggaagataccactaaaccatcttcagttctactagctcctgcagccaggccgcttgtcccgccgggttttgcaaatgcattcgctgacaagaagcttcagtcacagtcgtctaacatcacacatgagccgaagctagaggatgaccagtcagcaacagggttcacatctgaaagtaaagagaagggagtttctggtaacgatgctactatgggtccaaagcacacgcttccacctggtagtgttacctcttcagctgaattggcttctagcgttctgaaagggagcgaggattgggatgctgatgtaatggataagtattctattggaaaagaaggcaaatctaaaaatattgatccagttaggaaggatgattcagtagcaatcttagaacagttctttggcaatgttttatcgaaaagcggcagcaacctaccaacttatgttgagaaccagccattgaaaactgatgatgacatgatcacttctgtgccagaatcatccaaatttgctcattggtttcttgatgaagacttgaaacctgcagaagacttatcttcaaagagcctgctctccatgattgtcaaaaatgaaaatccagagcttatctcatttacatcctctacgcctgccaatggagttcttgaacaatgcatccattctgatgttccagaggcagttcctattatgacatgtgaggatcttgagcagacgatgttagcacaggaacagataataagggagcaccttccctgggtttccagagagaatcaactgatgaacctctgagtgttgacacaaatttaatggcaaatggtggaatatctggaagtgatccggttaacagtgttgaaaatgttcctacttctgggaaggacttgacattggaagcgttattcggggctgcatttatgaatgagctccactcgaaagatgcaccagtttctattcgaggagccacaactggtggtcctactgagtttgcagagatgggtaaaactctgttgtcatctagccatgaaggatactaccctgttgaacagaccgtacacttcaacaatactaaagatgctgctgtccgtagagaaccaggtattgagcattcagcagtacctggtctaagtcaggggagtgctagttttgacaagaaaggaatggaaattcatctgcctgaagaagataatttgtttaccatgagtgattctctgcttggtcaaaattctgatattttggcatcagtaggatccagcagggttgaagggctattgcctgaaaaggcacttgataacctcagctataggtttcaaagtcttgtgcctggtgatgcagaacacattcaagtatatggtcctgatgcacttggatctcatcctcgtgattctcagaatatgtatcatcttctacagggtaggcctcctatgatagcacctcaccctatgatggatcacattgttaataggaaacagccagctccatttgatatggcacagtcgatacaccatgattctcaccgttctttcccatctaatgtgaatcatatgcaacataatcttcatgggccaggggtccctcacttggaccctgctggacatattatgcgacaacacatgtccatgcctggaagatttcctccagaaggcttgccaagaggtgtccctccatctcagcctgtgcatcacatggctggttatagacctgaaatgggtaatgtaaataatttccatatgcaccctcgccagcccaactatggagaatttggattgatgatgccaggtccagaggtgaggggcaatcatccagaggcgttcgaaaggttgatccagatggagatgtcagccagatcgaagcaacagcaggtgcaccaccctgcaatggccgctggccgtgtgcctagtgggatgtacgggcacgagcttgatgcgaaattgagatacagatgatggatgcctggatgcttcactccgtacagaggacctggagggttgtagcatgtacatctgaacgggtgatggaacggagtgggtctaagatctgtaggagcggaagtctaccgggaaaaggggttatggtgtgctgaatggaagacgtggcgtcgacgtcttagcagccacatgtgtaatgacgttttctgtctactgtttctgacgactatgcagtttccattttgtataagctctgttatgcaaaaggaaaaaaaaagaagaaaaaaaactgagtcagattaacagattggcgacagtgtccgcttgaccctatatcttcaacttgtttgaaaggaaatgaccacgcgtcatgccgagacgtttgtagctgatagcactgtttgagacgttttgctgaacggaaaggctgctgcctccaggttttt

SEQ ID NO: 82228 - DNA, 3653 bp, Zea Mays
gtcagacagagacccgcaggcctgcaagcaccgagcagcatcgcccatccggccatcccccatcccgcatccaaggcctgcctcgcctgctcgttcgacctcaaccaaacagacccgcagtgcgttcgccccttacctttttcttgtccctttcacggtttcaccccgcgttcgctctctctcccgtggcgacgactgggcggccgccgcagccgccctagcccggtgcggctcttcgtcgggtccttcgccggcgacgggcacctaccaggatgaagacgaggatagtgtactccagggagtttctgctgtcgcttggcgagttggagcattgcaagaagctgccccctgactttgatgcagcgctgcttagtgagctgcaggagctgtcagcgggtgtgcttgagagaaacaagggctactacaacacatcccagggacggccagatgggtcggtgggatatacttactcttctcgtggtgggaacactggagggaggtgggatactcgctcatctggatcaagtgatcgggatggggaacctgatcgtgagtctcagacacaggcagggcgtggtgcaaaccagtacagacgcaattggcagaacacggagcatgatggcctacttggccgtggtggtttccctaggccatcaggatatactgggcagttgtcatcaaaggatcatggcaatgcgcctcagctaaacaggacatcagaacgctaccagccaccacgtccttacaaggctgctcctttttcacggaaagacattgactcgattaatgatgagacattcgggtcttctgaattatcaaatgaggatagagcagaagaagaaaggaagcggagggcatcttttgagttgatgagaaaagagcaacataaagcagtgctaggaaagaagagtggtcctgatatcctgaaggagaatcccagtgatgatatattttcaaagttacagacatctactgcaaaggcaaatgccaaaactaaaaacgagaagttagatggttctgtagtatcctcatatcaggaagataccactaaaccatcttcagttctactagctcctgcagccaggccgcttgtcccgccgggttttgcaaatgcattcgctgacaagaagcttcagtcacagtcgtctaacatcacacatgagccgaagctagaggatgaccagtcagcaacagggttcacatctgaaagtaaagagaagggagtttctggtaacgatgctactatgggtccaaagcacacgcttccacctggtagtgttacctcttcagctgaattggcttctagcgttctgaaagggagcgaggattgggatgctgatgtaatggataagtattctattggaaaagaaggcaaatctaaaaatattgatccagttaggaaggatgattcagtagcaatcttagaacagttctttggcaatgttttatcgaaaagcggcagcaacctaccaacttatgttgagaaccagccattgaaaactgatgatgacatgatcacttctgtgccagaatcatccaaatttgctcattggtttcttgatgaagacttgaaacctgcagaagacttatcttcaaagagcctgctctccatgattgtcaaaaatgaaaatccaggtctagaaaatttaaaccatactcctttatctgatgctgctgcccagaatttatccccaagagcacctattgataaacttgattctgcatcagagcttatctcatttacatcctctacgcctgccaatggagttcttgaacaatgcatccattctgatgttccagaggcagttcctattatgacatgtgaggatcttgagcagacgatgttagcacaggttagcaatagcagctcaactcagataaatgctacaaaggagcaactgactgttatggatgaaccagttgccatgcagaaagtaactgtagataatcatgcatcacaacatcttctttcattgttgcaaaaaggaacagataataagggagcaccttccctgggtttccagagagaatcaactgatgaacctctgagtgttgacacaaatttaatggcaaatggtggaatatctggaagtgatccggttaacagtgttgaaaatgttcctacttctgggaaggacttgacattggaagcgttattcggggctgcatttatgaatgagctccactcgaaagatgcaccagtttctattcgaggagccacaactggtggtcctactgagtttgcagagatgggtaaaactctgttgtcatctagccatgaaggatactaccctgttgaacagaccgtacacttcaacaatactaaagatgctgctgtccgtagagaaccaggtattgagcattcagcagtacctggtctaagtcaggggagtgctagttttgacaagaaaggaatggaaattcatctgcctgaagaagataatttgtttaccatgagtgattctctgcttggtcaaaattctgatattttggcatcagtaggatccagcagggttgaagggctattgcctgaaaaggcacttgataacctcagctataggtttcaaagtcttgtgcctggtgatgcagaacacattcaagtatatggtcctgatgcacttggatctcatcctcgtgattctcagaatatgtatcatcttctacagggtaggcctcctatgatagcacctcaccctatgatggatcacattgttaataggaaacagccagctccatttgatatggcacagtcgatacaccatgattctcaccgttctttcccatctaatgtgaatcatatgcaacataatcttcatgggccaggggtccctcacttggaccctgctggacatattatgcgacaacacatgtccatgcctggaagatttcctccagaaggcttgccaagaggtgtccctccatctcagcctgtgcatcacatggctggttatagacctgaaatgggtaatgtaaataatttccatatgcaccctcgccagcccaactatggagaatttggattgatgatgccaggcccatcaggtccagaggtgaggggcaatcatccagaggcgttcgaaaggttgatccagatggagatgtcagccagatcgaagcaacagcaggtgcaccaccctgcaatggccgctggccgtgtgcctagtgggatgtacgggcacgagcttgatgcgaaattgagatacagatgatggatgcctggatgcttcactccgtacagaggacctggaggtgtggtttgttgtatggttgtagcatgtacatctgaacgggtgatggaacggagtgggtctaagatctgtaggagcggaagtctaccgggaaaaggggttatggtgtgctgaatggaagacgtggcgtcgacgtcttagcagccacatgtgtaatgacgttttctgtctactgtttctgacgactatgcagtttccattttgtataagctctgttatgcaaaaggaaaaaaaaagaagaaaaaaaactgagtcagattaacagattggcgacagtgtccgcttgaccctatatcttcaacttgtttgaaaggaaatgaccacgcgtcatgccgagacgtttgtagctgatagcactgtttgagacgttttgctgaacggaaaggctgctgcctccaggttttt

SEQ ID NO: 82229 - DNA, 3530 bp, Zea Mays
gtcagacagagacccgcaggcctgcaagcaccgagcagcatcgcccatccggccatcccccatcccgcatccaaggcctgcctcgcctgctcgttcgacctcaaccaaacagacccgcagtgcgttcgccccttacctttttcttgtccctttcacggtttcaccccgcgttcgctctctctcccgtggcgacgactgggcggccgccgcagccgccctagcccggtgcggctcttcgtcgggtccttcgccggcgacgggcacctaccaggatgaagacgaggatagtgtactccagggagtttctgctgtcgcttggcgagttggagcattgcaagaagctgccccctgactttgatgcagcgctgcttagtgagctgcaggagctgtcagcgggtgtgcttgagagaaacaagggctactacaacacatcccagggacggccagatgggtcggtgggatatacttactcttctcgtggtgggaacactggagggaggtgggatactcgctcatctggatcaagtgatcgggatggggaacctgatcggcgtggtgcaaaccagtacagacgcaattggcagaacacggagcatgatggcctacttggccgtggtggtttccctaggccatcaggatatactgggcagttgtcatcaaaggatcatggcaatgcgcctcagctaaacaggacatcagaacgctaccagccaccacgtccttacaaggctgctcctttttcacggaaagacattgactcgattaatgatgagacattcgggtcttctgaattatcaaatgaggatagagcagaagaagaaaggaagcggagggcatcttttgagttgatgagaaaagagcaacataaagcagtgctaggaaagaagagtggtcctgatatcctgaaggagaatcccagtgatgatatattttcaaagttacagacatctactgcaaaggcaaatgccaaaactaaaaacgagaagttagatggttctgtagtatcctcatatcaggaagataccactaaaccatcttcagttctactagctcctgcagccaggccgcttgtcccgccgggttttgcaaatgcattcgctgacaagaagcttcagtcacagtcgtctaacatcacacatgagccgaagctagaggatgaccagtcagcaacagggttcacatctgaaagtaaagagaagggagtttctggtaacgatgctactatgggtccaaagcacacgcttccacctggtagtgttacctcttcagctgaattggcttctagcgttctgaaagggagcgaggattgggatgctgatgtaatggataagtattctattggaaaagaaggcaaatctaaaaatattgatccagttaggaaggatgattcagtagcaatcttagaacagttctttggcaatgttttatcgaaaagcggcagcaacctaccaacttatgttgagaaccagccattgaaaactgatgatgacatgatcacttctgtgccagaatcatccaaatttgctcattggtttcttgatgaagacttgaaacctgcagaagacttatcttcaaagagcctgctctccatgattgtcaaaaatgaaaatccagagcttatctcatttacatcctctacgcctgccaatggagttcttgaacaatgcatccattctgatgttccagaggcagttcctattatgacatgtgaggatcttgagcagacgatgttagcacaggttagcaatagcagctcaactcagataaatgctacaaaggagcaactgactgttatggatgaaccagttgccatgcagaaagtaactgtagataatcatgcatcacaacatcttctttcattgttgcaaaaaggaacagataataagggagcaccttccctgggtttccagagagaatcaactgatgaacctctgagtgttgacacaaatttaatggcaaatggtggaatatctggaagtgatccggttaacagtgttgaaaatgttcctacttctgggaaggacttgacattggaagcgttattcggggctgcatttatgaatgagctccactcgaaagatgcaccagtttctattcgaggagccacaactggtggtcctactgagtttgcagagatgggtaaaactctgttgtcatctagccatgaaggatactaccctgttgaacagaccgtacacttcaacaatactaaagatgctgctgtccgtagagaaccaggtattgagcattcagcagtacctggtctaagtcaggggagtgctagttttgacaagaaaggaatggaaattcatctgcctgaagaagataatttgtttaccatgagtgattctctgcttggtcaaaattctgatattttggcatcagtaggatccagcagggttgaagggctattgcctgaaaaggcacttgataacctcagctataggtttcaaagtcttgtgcctggtgatgcagaacacattcaagtatatggtcctgatgcacttggatctcatcctcgtgattctcagaatatgtatcatcttctacagggtaggcctcctatgatagcacctcaccctatgatggatcacattgttaataggaaacagccagctccatttgatatggcacagtcgatacaccatgattctcaccgttctttcccatctaatgtgaatcatatgcaacataatcttcatgggccaggggtccctcacttggaccctgctggacatattatgcgacaacacatgtccatgcctggaagatttcctccagaaggcttgccaagaggtgtccctccatctcagcctgtgcatcacatggctggttatagacctgaaatgggtaatgtaaataatttccatatgcaccctcgccagcccaactatggagaatttggattgatgatgccaggtccagaggtgaggggcaatcatccagaggcgttcgaaaggttgatccagatggagatgtcagccagatcgaagcaacagcaggtgcaccaccctgcaatggccgctggccgtgtgcctagtgggatgtacgggcacgagcttgatgcgaaattgagatacagatgatggatgcctggatgcttcactccgtacagaggacctggaggtgtggtttgttgtatggttgtagcatgtacatctgaacgggtgatggaacggagtgggtctaagatctgtaggagcggaagtctaccgggaaaaggggttatggtgtgctgaatggaagacgtggcgtcgacgtcttagcagccacatgtgtaatgacgttttctgtctactgtttctgacgactatgcagtttccattttgtataagctctgttatgcaaaaggaaaaaaaaagaagaaaaaaaactgagtcagattaacagattggcgacagtgtccgcttgaccctatatcttcaacttgtttgaaaggaaatgaccacgcgtcatgccgagacgtttgtagctgatagcactgtttgagacgttttgctgaacggaaaggctgctgcctccaggttttt

SEQ ID NO: 82230 - DNA, 3557 bp, Zea Mays
gtcagacagagacccgcaggcctgcaagcaccgagcagcatcgcccatccggccatcccccatcccgcatccaaggcctgcctcgcctgctcgttcgacctcaaccaaacagacccgcagtgcgttcgccccttacctttttcttgtccctttcacggtttcaccccgcgttcgctctctctcccgtggcgacgactgggcggccgccgcagccgccctagcccggtgcggctcttcgtcgggtccttcgccggcgacgggcacctaccaggatgaagacgaggatagtgtactccagggagtttctgctgtcgcttggcgagttggagcattgcaagaagctgccccctgactttgatgcagcgctgcttagtgagctgcaggagctgtcagcgggtgtgcttgagagaaacaagggctactacaacacatcccagggacggccagatgggtcggtgggatatacttactcttctcgtggtgggaacactggagggaggtgggatactcgctcatctggatcaagtgatcgggatggggaacctgatcgtgagtctcagacacaggggcgtggtgcaaaccagtacagacgcaattggcagaacacggagcatgatggcctacttggccgtggtggtttccctaggccatcaggatatactgggcagttgtcatcaaaggatcatggcaatgcgcctcagctaaacaggacatcagaacgctaccagccaccacgtccttacaaggctgctcctttttcacggaaagacattgactcgattaatgatgagacattcgggtcttctgaattatcaaatgaggatagagcagaagaagaaaggaagcggagggcatcttttgagttgatgagaaaagagcaacataaagcagtgctaggaaagaagagtggtcctgatatcctgaaggagaatcccagtgatgatatattttcaaagttacagacatctactgcaaaggcaaatgccaaaactaaaaacgagaagttagatggttctgtagtatcctcatatcaggaagataccactaaaccatcttcagttctactagctcctgcagccaggccgcttgtcccgccgggttttgcaaatgcattcgctgacaagaagcttcagtcacagtcgtctaacatcacacatgagccgaagctagaggatgaccagtcagcaacagggttcacatctgaaagtaaagagaagggagtttctggtaacgatgctactatgggtccaaagcacacgcttccacctggtagtgttacctcttcagctgaattggcttctagcgttctgaaagggagcgaggattgggatgctgatgtaatggataagtattctattggaaaagaaggcaaatctaaaaatattgatccagttaggaaggatgattcagtagcaatcttagaacagttctttggcaatgttttatcgaaaagcggcagcaacctaccaacttatgttgagaaccagccattgaaaactgatgatgacatgatcacttctgtgccagaatcatccaaatttgctcattggtttcttgatgaagacttgaaacctgcagaagacttatcttcaaagagcctgctctccatgattgtcaaaaatgaaaatccagagcttatctcatttacatcctctacgcctgccaatggagttcttgaacaatgcatccattctgatgttccagaggcagttcctattatgacatgtgaggatcttgagcagacgatgttagcacaggttagcaatagcagctcaactcagataaatgctacaaaggagcaactgactgttatggatgaaccagttgccatgcagaaagtaactgtagataatcatgcatcacaacatcttctttcattgttgcaaaaaggaacagataataagggagcaccttccctgggtttccagagagaatcaactgatgaacctctgagtgttgacacaaatttaatggcaaatggtggaatatctggaagtgatccggttaacagtgttgaaaatgttcctacttctgggaaggacttgacattggaagcgttattcggggctgcatttatgaatgagctccactcgaaagatgcaccagtttctattcgaggagccacaactggtggtcctactgagtttgcagagatgggtaaaactctgttgtcatctagccatgaaggatactaccctgttgaacagaccgtacacttcaacaatactaaagatgctgctgtccgtagagaaccaggtattgagcattcagcagtacctggtctaagtcaggggagtgctagttttgacaagaaaggaatggaaattcatctgcctgaagaagataatttgtttaccatgagtgattctctgcttggtcaaaattctgatattttggcatcagtaggatccagcagggttgaagggctattgcctgaaaaggcacttgataacctcagctataggtttcaaagtcttgtgcctggtgatgcagaacacattcaagtatatggtcctgatgcacttggatctcatcctcgtgattctcagaatatgtatcatcttctacagggtaggcctcctatgatagcacctcaccctatgatggatcacattgttaataggaaacagccagctccatttgatatggcacagtcgatacaccatgattctcaccgttctttcccatctaatgtgaatcatatgcaacataatcttcatgggccaggggtccctcacttggaccctgctggacatattatgcgacaacacatgtccatgcctggaagatttcctccagaaggcttgccaagaggtgtccctccatctcagcctgtgcatcacatggctggttatagacctgaaatgggtaatgtaaataatttccatatgcaccctcgccagcccaactatggagaatttggattgatgatgccaggcccatcaggtccagaggtgaggggcaatcatccagaggcgttcgaaaggttgatccagatggagatgtcagccagatcgaagcaacagcaggtgcaccaccctgcaatggccgctggccgtgtgcctagtgggatgtacgggcacgagcttgatgcgaaattgagatacagatgatggatgcctggatgcttcactccgtacagaggacctggaggtgtggtttgttgtatggttgtagcatgtacatctgaacgggtgatggaacggagtgggtctaagatctgtaggagcggaagtctaccgggaaaaggggttatggtgtgctgaatggaagacgtggcgtcgacgtcttagcagccacatgtgtaatgacgttttctgtctactgtttctgacgactatgcagtttccattttgtataagctctgttatgcaaaaggaaaaaaaaagaagaaaaaaaactgagtcagattaacagattggcgacagtgtccgcttgaccctatatcttcaacttgtttgaaaggaaatgaccacgcgtcatgccgagacgtttgtagctgatagcactgtttgagacgttttgctgaacggaaaggctgctgcctccaggttttt

SEQ ID NO: 82231 - DNA, 3501 bp, Zea Mays
gtcagacagagacccgcaggcctgcaagcaccgagcagcatcgcccatccggccatcccccatcccgcatccaaggcctgcctcgcctgctcgttcgacctcaaccagtccgccctgtatatccatggcaggatgaagacgaggatagtgtactccagggagtttctgctgtcgcttggcgagttggagcattgcaagaagctgccccctgactttgatgcagcgctgcttagtgagctgcaggagctgtcagcgggtgtgcttgagagaaacaagggctactacaacacatcccagggacggccagatgggtcggtgggatatacttactcttctcgtggtgggaacactggagggaggtgggatactcgctcatctggatcaagtgatcgggatggggaacctgatcgtgagtctcagacacaggggcgtggtgcaaaccagtacagacgcaattggcagaacacggagcatgatggcctacttggccgtggtggtttccctaggccatcaggatatactgggcagttgtcatcaaaggatcatggcaatgcgcctcagctaaacaggacatcagaacgctaccagccaccacgtccttacaaggctgctcctttttcacggaaagacattgactcgattaatgatgagacattcgggtcttctgaattatcaaatgaggatagagcagaagaagaaaggaagcggagggcatcttttgagttgatgagaaaagagcaacataaagcagtgctaggaaagaagagtggtcctgatatcctgaaggagaatcccagtgatgatatattttcaaagttacagacatctactgcaaaggcaaatgccaaaactaaaaacgagaagttagatggttctgtagtatcctcatatcaggaagataccactaaaccatcttcagttctactagctcctgcagccaggccgcttgtcccgccgggttttgcaaatgcattcgctgacaagaagcttcagtcacagtcgtctaacatcacacatgagccgaagctagaggatgaccagtcagcaacagggttcacatctgaaagtaaagagaagggagtttctggtaacgatgctactatgggtccaaagcacacgcttccacctggtagtgttacctcttcagctgaattggcttctagcgttctgaaagggagcgaggattgggatgctgatgtaatggataagtattctattggaaaagaaggcaaatctaaaaatattgatccagttaggaaggatgattcagtagcaatcttagaacagttctttggcaatgttttatcgaaaagcggcagcaacctaccaacttatgttgagaaccagccattgaaaactgatgatgacatgatcacttctgtgccagaatcatccaaatttgctcattggtttcttgatgaagacttgaaacctgcagaagacttatcttcaaagagcctgctctccatgattgtcaaaaatgaaaatccaggtctagaaaatttaaaccatactcctttatctgatgctgctgcccagaatttatccccaagagcacctattgataaacttgattctgcatcagagcttatctcatttacatcctctacgcctgccaatggagttcttgaacaatgcatccattctgatgttccagaggcagttcctattatgacatgtgaggatcttgagcagacgatgttagcacaggttagcaatagcagctcaactcagataaatgctacaaaggagcaactgactgttatggatgaaccagttgccatgcagaaagtaactgtagataatcatgcatcacaacatcttctttcattgttgcaaaaaggaacagataataagggagcaccttccctgggtttccagagagaatcaactgatgaacctctgagtgttgacacaaatttaatggcaaatggtggaatatctggaagtgatccggttaacagtgttgaaaatgttcctacttctgggaaggacttgacattggaagcgttattcggggctgcatttatgaatgagctccactcgaaagatgcaccagtttctattcgaggagccacaactggtggtcctactgagtttgcagagatgggtaaaactctgttgtcatctagccatgaaggatactaccctgttgaacagaccgtacacttcaacaatactaaagatgctgctgtccgtagagaaccaggtattgagcattcagcagtacctggtctaagtcaggggagtgctagttttgacaagaaaggaatggaaattcatctgcctgaagaagataatttgtttaccatgagtgattctctgcttggtcaaaattctgatattttggcatcagtaggatccagcagggttgaagggctattgcctgaaaaggcacttgataacctcagctataggtttcaaagtcttgtgcctggtgatgcagaacacattcaagtatatggtcctgatgcacttggatctcatcctcgtgattctcagaatatgtatcatcttctacagggtaggcctcctatgatagcacctcaccctatgatggatcacattgttaataggaaacagccagctccatttgatatggcacagtcgatacaccatgattctcaccgttctttcccatctaatgtgaatcatatgcaacataatcttcatgggccaggggtccctcacttggaccctgctggacatattatgcgacaacacatgtccatgcctggaagatttcctccagaaggcttgccaagaggtgtccctccatctcagcctgtgcatcacatggctggttatagacctgaaatgggtaatgtaaataatttccatatgcaccctcgccagcccaactatggagaatttggattgatgatgccaggtccagaggtgaggggcaatcatccagaggcgttcgaaaggttgatccagatggagatgtcagccagatcgaagcaacagcaggtgcaccaccctgcaatggccgctggccgtgtgcctagtgggatgtacgggcacgagcttgatgcgaaattgagatacagatgatggatgcctggatgcttcactccgtacagaggacctggaggtgtggtttgttgtatggttgtagcatgtacatctgaacgggtgatggaacggagtgggtctaagatctgtaggagcggaagtctaccgggaaaaggggttatggtgtgctgaatggaagacgtggcgtcgacgtcttagcagccacatgtgtaatgacgttttctgtctactgtttctgacgactatgcagtttccattttgtataagctctgttatgcaaaaggaaaaaaaaagaagaaaaaaaactgagtcagattaacagattggcgacagtgtccgcttgaccctatatcttcaacttgtttgaaaggaaatgaccacgcgtcatgccgagacgtttgtagctgatagcactgtttgagacgttttgctgaacggaaaggctgctgcctccaggttttt

SEQ ID NO: 82232 - DNA, 3625 bp, Zea Mays
gtcagacagagacccgcaggcctgcaagcaccgagcagcatcgcccatccggccatcccccatcccgcatccaaggcctgcctcgcctgctcgttcgacctcaaccaaacagacccgcagtgcgttcgccccttacctttttcttgtccctttcacggtttcaccccgcgttcgctctctctcccgtggcgacgactgggcggccgccgcagccgccctagcccggtgcggctcttcgtcgggtccttcgccggcgacgggcacctaccaggatgaagacgaggatagtgtactccagggagtttctgctgtcgcttggcgagttggagcattgcaagaagctgccccctgactttgatgcagcgctgcttagtgagctgcaggagctgtcagcgggtgtgcttgagagaaacaagggctactacaacacatcccagggacggccagatgggtcggtgggatatacttactcttctcgtggtgggaacactggagggaggtgggatactcgctcatctggatcaagtgatcgggatggggaacctgatcgtgagtctcagacacaggggcgtggtgcaaaccagtacagacgcaattggcagaacacggagcatgatggcctacttggccgtggtggtttccctaggccatcaggatatactgggcagttgtcatcaaaggatcatggcaatgcgcctcagctaaacaggacatcagaacgctaccagccaccacgtccttacaaggctgctcctttttcacggaaagacattgactcgattaatgatgagacattcgggtcttctgaattatcaaatgaggatagagcagaagaagaaaggaagcggagggcatcttttgagttgatgagaaaagagcaacataaagcagtgctaggaaagaagagtggtcctgatatcctgaaggagaatcccagtgatgatatattttcaaagttacagacatctactgcaaaggcaaatgccaaaactaaaaacgagaagttagatggttctgtagtatcctcatatcaggaagataccactaaaccatcttcagttctactagctcctgcagccaggccgcttgtcccgccgggttttgcaaatgcattcgctgacaagaagcttcagtcacagtcgtctaacatcacacatgagccgaagctagaggatgaccagtcagcaacagggttcacatctgaaagtaaagagaagggagtttctggtaacgatgctactatgggtccaaagcacacgcttccacctggtagtgttacctcttcagctgaattggcttctagcgttctgaaagggagcgaggattgggatgctgatgtaatggataagtattctattggaaaagaaggcaaatctaaaaatattgatccagttaggaaggatgattcagtagcaatcttagaacagttctttggcaatgttttatcgaaaagcggcagcaacctaccaacttatgttgagaaccagccattgaaaactgatgatgacatgatcacttctgtgccagaatcatccaaatttgctcattggtttcttgatgaagacttgaaacctgcagaagacttatcttcaaagagcctgctctccatgattgtcaaaaatgaaaatccaggtctagaaaatttaaaccatactcctttatctgatgctgctgcccagaatttatccccaagagcacctattgataaacttgattctgcatcagagcttatctcatttacatcctctacgcctgccaatggagttcttgaacaatgcatccattctgatgttccagaggcagttcctattatgacatgtgaggatcttgagcagacgatgttagcacaggttagcaatagcagctcaactcagataaatgctacaaaggagcaactgactgttatggatgaaccagttgccatgcagaaagtaactgtagataatcatgcatcacaacatcttctttcattgttgcaaaaaggaacagataataagggagcaccttccctgggtttccagagagaatcaactgatgaacctctgagtgttgacacaaatttaatggcaaatggtggaatatctggaagtgatccggttaacagtgttgaaaatgttcctacttctgggaaggacttgacattggaagcgttattcggggctgcatttatgaatgagctccactcgaaagatgcaccagtttctattcgaggagccacaactggtggtcctactgagtttgcagagatgggtaaaactctgttgtcatctagccatgaaggatactaccctgttgaacagaccgtacacttcaacaatactaaagatgctgctgtccgtagagaaccaggtattgagcattcagcagtacctggtctaagtcaggggagtgctagttttgacaagaaaggaatggaaattcatctgcctgaagaagataatttgtttaccatgagtgattctctgcttggtcaaaattctgatattttggcatcagtaggatccagcagggttgaagggctattgcctgaaaaggcacttgataacctcagctataggtttcaaagtcttgtgcctggtgatgcagaacacattcaagtatatggtcctgatgcacttggatctcatcctcgtgattctcagaatatgtatcatcttctacagggtaggcctcctatgatagcacctcaccctatgatggatcacattgttaataggaaacagccagctccatttgatatggcacagtcgatacaccatgattctcaccgttctttcccatctaatgtgaatcatatgcaacataatcttcatgggccaggggtccctcacttggaccctgctggacatattatgcgacaacacatgtccatgcctggaagatttcctccagaaggcttgccaagaggtgtccctccatctcagcctgtgcatcacatggctggttatagacctgaaatgggtaatgtaaataatttccatatgcaccctcgccagcccaactatggagaatttggattgatgatgccaggtccagaggtgaggggcaatcatccagaggcgttcgaaaggttgatccagatggagatgtcagccagatcgaagcaacagcaggtgcaccaccctgcaatggccgctggccgtgtgcctagtgggatgtacgggcacgagcttgatgcgaaattgagatacagatgatggatgcctggatgcttcactccgtacagaggacctggagggttgtagcatgtacatctgaacgggtgatggaacggagtgggtctaagatctgtaggagcggaagtctaccgggaaaaggggttatggtgtgctgaatggaagacgtggcgtcgacgtcttagcagccacatgtgtaatgacgttttctgtctactgtttctgacgactatgcagtttccattttgtataagctctgttatgcaaaaggaaaaaaaaagaagaaaaaaaactgagtcagattaacagattggcgacagtgtccgcttgaccctatatcttcaacttgtttgaaaggaaatgaccacgcgtcatgccgagacgtttgtagctgatagcactgtttgagacgttttgctgaacggaaaggctgctgcctccaggttttt

SEQ ID NO: 82233 - DNA, 3649 bp, Zea Mays
gtcagacagagacccgcaggcctgcaagcaccgagcagcatcgcccatccggccatcccccatcccgcatccaaggcctgcctcgcctgctcgttcgacctcaaccaaacagacccgcagtgcgttcgccccttacctttttcttgtccctttcacggtttcaccccgcgttcgctctctctcccgtggcgacgactgggcggccgccgcagccgccctagcccggtgcggctcttcgtcgggtccttcgccggcgacgggcacctaccaggatgaagacgaggatagtgtactccagggagtttctgctgtcgcttggcgagttggagcattgcaagaagctgccccctgactttgatgcagcgctgcttagtgagctgcaggagctgtcagcgggtgtgcttgagagaaacaagggctactacaacacatcccagggacggccagatgggtcggtgggatatacttactcttctcgtggtgggaacactggagggaggtgggatactcgctcatctggatcaagtgatcgggatggggaacctgatcgtgagtctcagacacaggcagggcgtggtgcaaaccagtacagacgcaattggcagaacacggagcatgatggcctacttggccgtggtggtttccctaggccatcaggatatactgggcagttgtcatcaaaggatcatggcaatgcgcctcagctaaacaggacatcagaacgctaccagccaccacgtccttacaaggctgctcctttttcacggaaagacattgactcgattaatgatgagacattcgggtcttctgaattatcaaatgaggatagagcagaagaagaaaggaagcggagggcatcttttgagttgatgagaaaagagcaacataaagcagtgctaggaaagaagagtggtcctgatatcctgaaggagaatcccagtgatgatatattttcaaagttacagacatctactgcaaaggcaaatgccaaaactaaaaacgagaagttagatggttctgtagtatcctcatatcaggaagataccactaaaccatcttcagttctactagctcctgcagccaggccgcttgtcccgccgggttttgcaaatgcattcgctgacaagaagcttcagtcacagtcgtctaacatcacacatgagccgaagctagaggatgaccagtcagcaacagggttcacatctgaaagtaaagagaagggagtttctggtaacgatgctactatgggtccaaagcacacgcttccacctggtagtgttacctcttcagctgaattggcttctagcgttctgaaagggagcgaggattgggatgctgatgtaatggataagtattctattggaaaagaaggcaaatctaaaaatattgatccagttaggaaggatgattcagtagcaatcttagaacagttctttggcaatgttttatcgaaaagcggcagcaacctaccaacttatgttgagaaccagccattgaaaactgatgatgacatgatcacttctgtgccagaatcatccaaatttgctcattggtttcttgatgaagacttgaaacctgcagaagacttatcttcaaagagcctgctctccatgattgtcaaaaatgaaaatccaggtctagaaaatttaaaccatactcctttatctgatgctgctgcccagaatttatccccaagagcacctattgataaacttgattctgcatcagagcttatctcatttacatcctctacgcctgccaatggagttcttgaacaatgcatccattctgatgttccagaggcagttcctattatgacatgtgaggatcttgagcagacgatgttagcacaggttagcaatagcagctcaactcagataaatgctacaaaggagcaactgactgttatggatgaaccagttgccatgcagaaagtaactgtagataatcatgcatcacaacatcttctttcattgttgcaaaaaggaacagataataagggagcaccttccctgggtttccagagagaatcaactgatgaacctctgagtgttgacacaaatttaatggcaaatggtggaatatctggaagtgatccggttaacagtgttgaaaatgttcctacttctgggaaggacttgacattggaagcgttattcggggctgcatttatgaatgagctccactcgaaagatgcaccagtttctattcgaggagccacaactggtggtcctactgagtttgcagagatgggtaaaactctgttgtcatctagccatgaaggatactaccctgttgaacagaccgtacacttcaacaatactaaagatgctgctgtccgtagagaaccaggtattgagcattcagcagtacctggtctaagtcaggggagtgctagttttgacaagaaaggaatggaaattcatctgcctgaagaagataatttgtttaccatgagtgattctctgcttggtcaaaattctgatattttggcatcagtaggatccagcagggttgaagggctattgcctgaaaaggcacttgataacctcagctataggtttcaaagtcttgtgcctggtgatgcagaacacattcaagtatatggtcctgatgcacttggatctcatcctcgtgattctcagaatatgtatcatcttctacagggtaggcctcctatgatagcacctcaccctatgatggatcacattgttaataggaaacagccagctccatttgatatggcacagtcgatacaccatgattctcaccgttctttcccatctaatgtgaatcatatgcaacataatcttcatgggccaggggtccctcacttggaccctgctggacatattatgcgacaacacatgtccatgcctggaagatttcctccagaaggcttgccaagaggtgtccctccatctcagcctgtgcatcacatggctggttatagacctgaaatgggtaatgtaaataatttccatatgcaccctcgccagcccaactatggagaatttggattgatgatgccaggcccatcaggtccagaggtgaggggcaatcatccagaggcgttcgaaaggttgatccagatggagatgtcagccagatcgaagcaacagcaggtgcaccaccctgcaatggccgctggccgtgtgcctagtgggatgtacgggcacgagcttgatgcgaaattgagatacagatgatggatgcctggatgcttcactccgtacagaggacctggaggtgtggtttgttggttgtagcatgtacatctgaacgggtgatggaacggagtgggtctaagatctgtaggagcggaagtctaccgggaaaaggggttatggtgtgctgaatggaagacgtggcgtcgacgtcttagcagccacatgtgtaatgacgttttctgtctactgtttctgacgactatgcagtttccattttgtataagctctgttatgcaaaaggaaaaaaaaagaagaaaaaaaactgagtcagattaacagattggcgacagtgtccgcttgaccctatatcttcaacttgtttgaaaggaaatgaccacgcgtcatgccgagacgtttgtagctgatagcactgtttgagacgttttgctgaacggaaaggctgctgcctccaggttttt

SEQ ID NO: 82234 - DNA, 3634 bp, Zea Mays
gtcagacagagacccgcaggcctgcaagcaccgagcagcatcgcccatccggccatcccccatcccgcatccaaggcctgcctcgcctgctcgttcgacctcaaccaaacagacccgcagtgcgttcgccccttacctttttcttgtccctttcacggtttcaccccgcgttcgctctctctcccgtggcgacgactgggcggccgccgcagccgccctagcccggtgcggctcttcgtcgggtccttcgccggcgacgggcacctaccaggatgaagacgaggatagtgtactccagggagtttctgctgtcgcttggcgagttggagcattgcaagaagctgccccctgactttgatgcagcgctgcttagtgagctgcaggagctgtcagcgggtgtgcttgagagaaacaagggctactacaacacatcccagggacggccagatgggtcggtgggatatacttactcttctcgtggtgggaacactggagggaggtgggatactcgctcatctggatcaagtgatcgggatggggaacctgatcgtgagtctcagacacaggggcgtggtgcaaaccagtacagacgcaattggcagaacacggagcatgatggcctacttggccgtggtggtttccctaggccatcaggatatactgggcagttgtcatcaaaggatcatggcaatgcgcctcagctaaacaggacatcagaacgctaccagccaccacgtccttacaaggctgctcctttttcacggaaagacattgactcgattaatgatgagacattcgggtcttctgaattatcaaatgaggatagagcagaagaagaaaggaagcggagggcatcttttgagttgatgagaaaagagcaacataaagcagtgctaggaaagaagagtggtcctgatatcctgaaggagaatcccagtgatgatatattttcaaagttacagacatctactgcaaaggcaaatgccaaaactaaaaacgagaagttagatggttctgtagtatcctcatatcaggaagataccactaaaccatcttcagttctactagctcctgcagccaggccgcttgtcccgccgggttttgcaaatgcattcgctgacaagaagcttcagtcacagtcgtctaacatcacacatgagccgaagctagaggatgaccagtcagcaacagggttcacatctgaaagtaaagagaagggagtttctggtaacgatgctactatgggtccaaagcacacgcttccacctggtagtgttacctcttcagctgaattggcttctagcgttctgaaagggagcgaggattgggatgctgatgtaatggataagtattctattggaaaagaaggcaaatctaaaaatattgatccagttaggaaggatgattcagtagcaatcttagaacagttctttggcaatgttttatcgaaaagcggcagcaacctaccaacttatgttgagaaccagccattgaaaactgatgatgacatgatcacttctgtgccagaatcatccaaatttgctcattggtttcttgatgaagacttgaaacctgcagaagacttatcttcaaagagcctgctctccatgattgtcaaaaatgaaaatccaggtctagaaaatttaaaccatactcctttatctgatgctgctgcccagaatttatccccaagagcacctattgataaacttgattctgcatcagagcttatctcatttacatcctctacgcctgccaatggagttcttgaacaatgcatccattctgatgttccagaggcagttcctattatgacatgtgaggatcttgagcagacgatgttagcacaggttagcaatagcagctcaactcagataaatgctacaaaggagcaactgactgttatggatgaaccagttgccatgcagaaagtaactgtagataatcatgcatcacaacatcttctttcattgttgcaaaaaggaacagataataagggagcaccttccctgggtttccagagagaatcaactgatgaacctctgagtgttgacacaaatttaatggcaaatggtggaatatctggaagtgatccggttaacagtgttgaaaatgttcctacttctgggaaggacttgacattggaagcgttattcggggctgcatttatgaatgagctccactcgaaagatgcaccagtttctattcgaggagccacaactggtggtcctactgagtttgcagagatgggtaaaactctgttgtcatctagccatgaaggatactaccctgttgaacagaccgtacacttcaacaatactaaagatgctgctgtccgtagagaaccaggtattgagcattcagcagtacctggtctaagtcaggggagtgctagttttgacaagaaaggaatggaaattcatctgcctgaagaagataatttgtttaccatgagtgattctctgcttggtcaaaattctgatattttggcatcagtaggatccagcagggttgaagggctattgcctgaaaaggcacttgataacctcagctataggtttcaaagtcttgtgcctggtgatgcagaacacattcaagtatatggtcctgatgcacttggatctcatcctcgtgattctcagaatatgtatcatcttctacagggtaggcctcctatgatagcacctcaccctatgatggatcacattgttaataggaaacagccagctccatttgatatggcacagtcgatacaccatgattctcaccgttctttcccatctaatgtgaatcatatgcaacataatcttcatgggccaggggtccctcacttggaccctgctggacatattatgcgacaacacatgtccatgcctggaagatttcctccagaaggcttgccaagaggtgtccctccatctcagcctgtgcatcacatggctggttatagacctgaaatgggtaatgtaaataatttccatatgcaccctcgccagcccaactatggagaatttggattgatgatgccaggcccatcaggtccagaggtgaggggcaatcatccagaggcgttcgaaaggttgatccagatggagatgtcagccagatcgaagcaacagcaggtgcaccaccctgcaatggccgctggccgtgtgcctagtgggatgtacgggcacgagcttgatgcgaaattgagatacagatgatggatgcctggatgcttcactccgtacagaggacctggagggttgtagcatgtacatctgaacgggtgatggaacggagtgggtctaagatctgtaggagcggaagtctaccgggaaaaggggttatggtgtgctgaatggaagacgtggcgtcgacgtcttagcagccacatgtgtaatgacgttttctgtctactgtttctgacgactatgcagtttccattttgtataagctctgttatgcaaaaggaaaaaaaaagaagaaaaaaaactgagtcagattaacagattggcgacagtgtccgcttgaccctatatcttcaacttgtttgaaaggaaatgaccacgcgtcatgccgagacgtttgtagctgatagcactgtttgagacgttttgctgaacggaaaggctgctgcctccaggttttt

SEQ ID NO: 82235 - DNA, 3637 bp, Zea Mays
gtcagacagagacccgcaggcctgcaagcaccgagcagcatcgcccatccggccatcccccatcccgcatccaaggcctgcctcgcctgctcgttcgacctcaaccaaacagacccgcagtgcgttcgccccttacctttttcttgtccctttcacggtttcaccccgcgttcgctctctctcccgtggcgacgactgggcggccgccgcagccgccctagcccggtgcggctcttcgtcgggtccttcgccggcgacgggcacctaccaggatgaagacgaggatagtgtactccagggagtttctgctgtcgcttggcgagttggagcattgcaagaagctgccccctgactttgatgcagcgctgcttagtgagctgcaggagctgtcagcgggtgtgcttgagagaaacaagggctactacaacacatcccagggacggccagatgggtcggtgggatatacttactcttctcgtggtgggaacactggagggaggtgggatactcgctcatctggatcaagtgatcgggatggggaacctgatcgtgagtctcagacacaggcagggcgtggtgcaaaccagtacagacgcaattggcagaacacggagcatgatggcctacttggccgtggtggtttccctaggccatcaggatatactgggcagttgtcatcaaaggatcatggcaatgcgcctcagctaaacaggacatcagaacgctaccagccaccacgtccttacaaggctgctcctttttcacggaaagacattgactcgattaatgatgagacattcgggtcttctgaattatcaaatgaggatagagcagaagaagaaaggaagcggagggcatcttttgagttgatgagaaaagagcaacataaagcagtgctaggaaagaagagtggtcctgatatcctgaaggagaatcccagtgatgatatattttcaaagttacagacatctactgcaaaggcaaatgccaaaactaaaaacgagaagttagatggttctgtagtatcctcatatcaggaagataccactaaaccatcttcagttctactagctcctgcagccaggccgcttgtcccgccgggttttgcaaatgcattcgctgacaagaagcttcagtcacagtcgtctaacatcacacatgagccgaagctagaggatgaccagtcagcaacagggttcacatctgaaagtaaagagaagggagtttctggtaacgatgctactatgggtccaaagcacacgcttccacctggtagtgttacctcttcagctgaattggcttctagcgttctgaaagggagcgaggattgggatgctgatgtaatggataagtattctattggaaaagaaggcaaatctaaaaatattgatccagttaggaaggatgattcagtagcaatcttagaacagttctttggcaatgttttatcgaaaagcggcagcaacctaccaacttatgttgagaaccagccattgaaaactgatgatgacatgatcacttctgtgccagaatcatccaaatttgctcattggtttcttgatgaagacttgaaacctgcagaagacttatcttcaaagagcctgctctccatgattgtcaaaaatgaaaatccaggtctagaaaatttaaaccatactcctttatctgatgctgctgcccagaatttatccccaagagcacctattgataaacttgattctgcatcagagcttatctcatttacatcctctacgcctgccaatggagttcttgaacaatgcatccattctgatgttccagaggcagttcctattatgacatgtgaggatcttgagcagacgatgttagcacaggttagcaatagcagctcaactcagataaatgctacaaaggagcaactgactgttatggatgaaccagttgccatgcagaaagtaactgtagataatcatgcatcacaacatcttctttcattgttgcaaaaaggaacagataataagggagcaccttccctgggtttccagagagaatcaactgatgaacctctgagtgttgacacaaatttaatggcaaatggtggaatatctggaagtgatccggttaacagtgttgaaaatgttcctacttctgggaaggacttgacattggaagcgttattcggggctgcatttatgaatgagctccactcgaaagatgcaccagtttctattcgaggagccacaactggtggtcctactgagtttgcagagatgggtaaaactctgttgtcatctagccatgaaggatactaccctgttgaacagaccgtacacttcaacaatactaaagatgctgctgtccgtagagaaccaggtattgagcattcagcagtacctggtctaagtcaggggagtgctagttttgacaagaaaggaatggaaattcatctgcctgaagaagataatttgtttaccatgagtgattctctgcttggtcaaaattctgatattttggcatcagtaggatccagcagggttgaagggctattgcctgaaaaggcacttgataacctcagctataggtttcaaagtcttgtgcctggtgatgcagaacacattcaagtatatggtcctgatgcacttggatctcatcctcgtgattctcagaatatgtatcatcttctacagggtaggcctcctatgatagcacctcaccctatgatggatcacattgttaataggaaacagccagctccatttgatatggcacagtcgatacaccatgattctcaccgttctttcccatctaatgtgaatcatatgcaacataatcttcatgggccaggggtccctcacttggaccctgctggacatattatgcgacaacacatgtccatgcctggaagatttcctccagaaggcttgccaagaggtgtccctccatctcagcctgtgcatcacatggctggttatagacctgaaatgggtaatgtaaataatttccatatgcaccctcgccagcccaactatggagaatttggattgatgatgccaggcccatcaggtccagaggtgaggggcaatcatccagaggcgttcgaaaggttgatccagatggagatgtcagccagatcgaagcaacagcaggtgcaccaccctgcaatggccgctggccgtgtgcctagtgggatgtacgggcacgagcttgatgcgaaattgagatacagatgatggatgcctggatgcttcactccgtacagaggacctggagggttgtagcatgtacatctgaacgggtgatggaacggagtgggtctaagatctgtaggagcggaagtctaccgggaaaaggggttatggtgtgctgaatggaagacgtggcgtcgacgtcttagcagccacatgtgtaatgacgttttctgtctactgtttctgacgactatgcagtttccattttgtataagctctgttatgcaaaaggaaaaaaaaagaagaaaaaaaactgagtcagattaacagattggcgacagtgtccgcttgaccctatatcttcaacttgtttgaaaggaaatgaccacgcgtcatgccgagacgtttgtagctgatagcactgtttgagacgttttgctgaacggaaaggctgctgcctccaggttttt

SEQ ID NO: 82236 - DNA, 3439 bp, Zea Mays
ctgttttgacactgagacagtcagacagagacccgcaggcctgcaagcaccgagcagcatcgcccatccggccatcccccatcccgcatccaaggcctgcctcgcctgctcgttcgacctcaaccagtccgccctgtatatccatggcaggatgaagacgaggatagtgtactccagggagtttctgctgtcgcttggcgagttggagcattgcaagaagctgccccctgactttgatgcagcgctgcttagtgagctgcaggagctgtcagcgggtgtgcttgagagaaacaagggctactacaacacatcccagggacggccagatgggtcggtgggatatacttactcttctcgtggtgggaacactggagggaggtgggatactcgctcatctggatcaagtgatcgggatggggaacctgatcgtgagtctcagacacaggcagggcgtggtgcaaaccagtacagacgcaattggcagaacacggagcatgatggcctacttggccgtggtggtttccctaggccatcaggatatactgggcagttgtcatcaaaggatcatggcaatgcgcctcagctaaacaggacatcagaacgctaccagccaccacgtccttacaaggctgctcctttttcacggaaagacattgactcgattaatgatgagacattcgggtcttctgaattatcaaatgaggatagagcagaagaagaaaggaagcggagggcatcttttgagttgatgagaaaagagcaacataaagcagtgctaggaaagaagagtggtcctgatatcctgaaggagaatcccagtgatgatatattttcaaagttacagacatctactgcaaaggcaaatgccaaaactaaaaacgagaagttagatggttctgtagtatcctcatatcaggaagataccactaaaccatcttcagttctactagctcctgcagccaggccgcttgtcccgccgggttttgcaaatgcattcgctgacaagaagcttcagtcacagtcgtctaacatcacacatgagccgaagctagaggatgaccagtcagcaacagggttcacatctgaaagtaaagagaagggagtttctggtaacgatgctactatgggtccaaagcacacgcttccacctggtagtgttacctcttcagctgaattggcttctagcgttctgaaagggagcgaggattgggatgctgatgtaatggataagtattctattggaaaagaaggcaaatctaaaaatattgatccagttaggaaggatgattcagtagcaatcttagaacagttctttggcaatgttttatcgaaaagcggcagcaacctaccaacttatgttgagaaccagccattgaaaactgatgatgacatgatcacttctgtgccagaatcatccaaatttgctcattggtttcttgatgaagacttgaaacctgcagaagacttatcttcaaagagcctgctctccatgattgtcaaaaatgaaaatccagagcttatctcatttacatcctctacgcctgccaatggagttcttgaacaatgcatccattctgatgttccagaggcagttcctattatgacatgtgaggatcttgagcagacgatgttagcacaggttagcaatagcagctcaactcagataaatgctacaaaggagcaactgactgttatggatgaaccagttgccatgcagaaagtaactgtagataatcatgcatcacaacatcttctttcattgttgcaaaaaggaacagataataagggagcaccttccctgggtttccagagagaatcaactgatgaacctctgagtgttgacacaaatttaatggcaaatggtggaatatctggaagtgatccggttaacagtgttgaaaatgttcctacttctgggaaggacttgacattggaagcgttattcggggctgcatttatgaatgagctccactcgaaagatgcaccagtttctattcgaggagccacaactggtggtcctactgagtttgcagagatgggtaaaactctgttgtcatctagccatgaaggatactaccctgttgaacagaccgtacacttcaacaatactaaagatgctgctgtccgtagagaaccaggtattgagcattcagcagtacctggtctaagtcaggggagtgctagttttgacaagaaaggaatggaaattcatctgcctgaagaagataatttgtttaccatgagtgattctctgcttggtcaaaattctgatattttggcatcagtaggatccagcagggttgaagggctattgcctgaaaaggcacttgataacctcagctataggtttcaaagtcttgtgcctggtgatgcagaacacattcaagtatatggtcctgatgcacttggatctcatcctcgtgattctcagaatatgtatcatcttctacagggtaggcctcctatgatagcacctcaccctatgatggatcacattgttaataggaaacagccagctccatttgatatggcacagtcgatacaccatgattctcaccgttctttcccatctaatgtgaatcatatgcaacataatcttcatgggccaggggtccctcacttggaccctgctggacatattatgcgacaacacatgtccatgcctggaagatttcctccagaaggcttgccaagaggtgtccctccatctcagcctgtgcatcacatggctggttatagacctgaaatgggtaatgtaaataatttccatatgcaccctcgccagcccaactatggagaatttggattgatgatgccaggcccatcaggtccagaggtgaggggcaatcatccagaggcgttcgaaaggttgatccagatggagatgtcagccagatcgaagcaacagcaggtgcaccaccctgcaatggccgctggccgtgtgcctagtgggatgtacgggcacgagcttgatgcgaaattgagatacagatgatggatgcctggatgcttcactccgtacagaggacctggaggtgtggtttgttgtatggttgtagcatgtacatctgaacgggtgatggaacggagtgggtctaagatctgtaggagcggaagtctaccgggaaaaggggttatggtgtgctgaatggaagacgtggcgtcgacgtcttagcagccacatgtgtaatgacgttttctgtctactgtttctgacgactatgcagtttccattttgtataagctctgttatgcaaaaggaaaaaaaaagaagaaaaaaaactgagtcagattaacagattggcgacagtgtccgcttgaccctatatcttcaacttgtttgaaaggaaatgaccacgcgtcatgccgagacgtttgtagctgatagcactgtttgagacgttttgctgaacggaaaggctgctgcctccaggttttt

SEQ ID NO: 82237 - DNA, 2463 bp, Zea Mays
ggcaaccatacctattcaccagaagcagcatgggctggctgctagcaggctcggcttgggaagttcggggaagaacaaggtcttcgtggcaggagacgacttgtggtacaacaagattattgacccgtcgagcgacttcatcttgacgtggatatacgtcttccgtgtgtcatgcttcattgctctgttcatggaccctctgtacttctatgtgcctgaaatcgattacaggcaaacctttcattgtgtcaggaaggatacacgcctagccatcatcgttactgtgttccgatcaattgtcgacctcttttatgtcatccagatgatgataaagttcaggactgcatatattaatccaagctcaaacttaggggtttttggtcgaggagatctcatcacagatcctaaggaaatcgcaaagcagtacttgagatctgactttgttgttgatttggtggcttctttgcctttaccacagatcattatttggtctgtgataccagctatcaaatattcttcgtctgagcatggcaatgacatgctgcttctggttgctcttttccagtatatcctaagattatacctcatattttccttgaacgataaaatcgtcaaaattactgggggtgtttgcaaagactgcttggcatggggctgcctacaacctgctgttatacatgattgctagccatgttttaggagcgttgtggtaccttctatctgttgatcgtcagattgcgtgctggaaaaacttttgcgatgaaactgattgccacactcgatatctatattgtgatgtaaaaccagattcaatgtggaatgggacctcagtcttttctacttgtaatgctaagaacagtaccaaatttgactttggtatgttccagccactgttagcaaacaaaactcctaacgagagcttcctgaagaagtatatctattgcctttggtggggtttgcagaatctaaggttgctatggccagacattgactgtgagcaccttcattggtgagacactgtatgctatattattggcagtggttggcctagtcttgtttgcccatttgatcggaaaagttcagacctacctgcaatcaatcaccgcaagggttgaggagtggaggctaaagcagagagataccgaggagtggatggggcatcggcaactgccccatgaattacgggaaagagtgagaagatttgttcattacaagtggctcgcaactcgaggcgtggacgaagagtctatattgagtgccctacctacagatcttcgccgcgacatcaagcgccacctttgcctgtatcttgttcgtagggtcccacttttctcccagatggacgatcagcttctagacgccatatgcgagcgcctggtatcgtccttgagcacagagggcacatacattgtccgagaaggcgacccagtgaccgagatgctgttcatcatccgcggcaagctggaaagctccacgacagacggtggccggacaggtttcttcaactcgatcaccctgaagcccggcgacttctgtggcgaggagctcctcggatgggcgctcgtccccaagcccaccgtcaacctgccactgtccacccggacggtgaaggcggttctcgaggtcgaggcgttcgctctccaggccgacgacctgaggttcgtcgccagccagttcaggcgcctccacagtaggaagctgcagcacacgttccggtactactcccaccactggaggacctgggccgcgtgcttcatccagcacgcctggcgccgcctgaggaggaggaagatggccaaggacctgagtctgagggagtcgttctcgtccacgggaccgtacgaaggcgatggcgacgacgcctcctcccctgaacagagtatcacacttaggagaggagccggcagcatcatcagggagctgcctaagttcaggaagccatcggagccggatttctcggcggagcatgacgactgactgactggcggaggactgagtggctgatacattgtttgttaaggcaaaagattggtgcttctgatcggttgttcatactgtacatacatatgtagtggtgcttgtcattgtattgtagggatcccaccgtagattagaaagattgcttgtgtccgctggccgagcagattttgcttcccgggtcagggctctaccattcttttttcttcttttcttccaagtgtgaaaaattgcagcaggatgtactgttgtctgtttctcttacaccggtctggttgttgattctgtgaaattttgttgtgtgactaccgagactctgatcattttacagttgtgcctgctctcctctgtgtggcacaaatgcggttggacttgcaacagacgtttctttgttacgttgttgggtttttttaacgaagagctccggaagttcattccagagcttcttttggcgaacacggcatcacccttgaacttctgactgta

SEQ ID NO: 82238 - DNA, 2483 bp, Zea Mays
tgatgagagggcgaaggcaaccatacctattcaccagaagcagcatgggctggctgctagcaggctcggcttgggaagttcggggaagaacaaggtcttcgtggcaggagacgacttgtggtacaacaagattattgacccgtcgagcgacttcatcttgacgtggatatacgtcttccgtgtgtcatgcttcattgctctgttcatggaccctctgtacttctatgtgcctgaaatcgattacaggcaaacctttcattgtgtcaggaaggatacacgcctagccatcatcgttactgtgttccgatcaattgtcgacctcttttatgtcatccagatgatgataaagttcaggactgcatatattaatccaagctcaaacttaggggtttttggtcgaggagatctcatcacagatcctaaggaaatcgcaaagcagtacttgagatctgactttgttgttgatttggtggcttctttgcctttaccacagatcattatttggtctgtgataccagctatcaaatattcttcgtctgagcatggcaatgacatgctgcttctggttgctcttttccagtatatcctaagattatacctcatattttccttgaacgataaaatcgtcaaaattactgggggtgtttgcaaagactgcttggcatggggctgcctacaacctgctgttatacatgattgctagccatgttttaggagcgttgtggtaccttctatctgttgatcgtcagattgcgtgctggaaaaacttttgcgatgaaactgattgccacactcgatatctatattgtgatgtaaaaccagattcaatgtggaatgggacctcagtcttttctacttgtaatgctaagaacagtaccaaatttgactttggtatgttccagccactgttagcaaacaaaactcctaacgagagcttcctgaagaagtatatctattgcctttggtggggtttgcagaatctaagctacagttgctatggccagacattgactgtgagcaccttcattggtgagacactgtatgctatattattggcagtggttggcctagtcttgtttgcccatttgatcggaaaagttcagacctacctgcaatcaatcaccgcaagggttgaggagtggaggctaaagcagagagataccgaggagtggatggggcatcggcaactgccccatgaattacgggaaagagtgagaagatttgttcattacaagtggctcgcaactcgaggcgtggacgaagagtctatattgagtgccctacctacagatcttcgccgcgacatcaagcgccacctttgcctgtatcttgttcgtagggtcccacttttctcccagatggacgatcagcttctagacgccatatgcgagcgcctggtatcgtccttgagcacagagggcacatacattgtccgagaaggcgacccagtgaccgagatgctgttcatcatccgcggcaagctggaaagctccacgacagacggtggccggacaggtttcttcaactcgatcaccctgaagcccggcgacttctgtggcgaggagctcctcggatgggcgctcgtccccaagcccaccgtcaacctgccactgtccacccggacggtgaaggcggttctcgaggtcgaggcgttcgctctccaggccgacgacctgaggttcgtcgccagccagttcaggcgcctccacagtaggaagctgcagcacacgttccggtactactcccaccactggaggacctgggccgcgtgcttcatccagcacgcctggcgccgcctgaggaggaggaagatggccaaggacctgagtctgagggagtcgttctcgtccacgggaccgtacgaaggcgatggcgacgacgcctcctcccctgaacagagtatcacacttaggagaggagccggcagcatcatcagggagctgcctaagttcaggaagccatcggagccggatttctcggcggagcatgacgactgactgactggcggaggactgagtggctgatacattgtttgttaaggcaaaagattggtgcttctgatcggttgttcatactgtacatacatatgtagtggtgcttgtcattgtattgtagggatcccaccgtagattagaaagattgcttgtgtccgctggccgagcagattttgcttcccgggtcagggctctaccattcttttttcttcttttcttccaagtgtgaaaaattgcagcaggatgtactgttgtctgtttctcttacaccggtctggttgttgattctgtgaaattttgttgtgtgactaccgagactctgatcattttacagttgtgcctgctctcctctgtgtggcacaaatgcggttggacttgcaacagacgtttctttgttacgttgttgggtttttttaacgaagagctccggaagttcattccagagcttcttttggcgaacacggcatcacccttgaacttctgactgta

SEQ ID NO: 82239 - DNA, 2781 bp, Zea Mays
ccaacagattccatgatgagagggcgaaggcaaccatacctattcaccagaagcagcatgggctggctgctagcaggctcggcttgggaagttcggggaagaacaaggtcttcgtggcaggagacgacttgtggtacaacaagattattgacccgtcgagcgacttcatcttgacgtggatatacgtcttccgtgtgtcatgcttcattgctctgttcatggaccctctgtacttctatgtgcctgaaatcgattacaggcaaacctttcattgtgtcaggaaggatacacgcctagccatcatcgttactgtgttccgatcaattgtcgacctcttttatgtcatccagatgatgataaagttcaggactgcatatattaatccaagctcaaacttaggggtttttggtcgaggagatctcatcacagatcctaaggaaatcgcaaagcagtacttgagatctgactttgttgttgatttggtggcttctttgcctttaccacagatcattatttggtctgtgataccagctatcaaatattcttcgtctgagcatggcaatgacatgctgcttctggttgctcttttccagtatatcctaagattatacctcatattttccttgaacgataaaatcgtcaaaattactgggggtgtttgcaaagactgcttggcatggggctgcctacaacctgctgttatacatgattgctagccatgttttaggagcgttgtggtaccttctatctgttgatcgtcagattgcgtgctggaaaaacttttgcgatgaaactgattgccacactcgatatctatattgtgatgtaaaaccagattcaatgtggaatgggacctcagtcttttctacttgtaatgctaagaacagtaccaaatttgactttggtatgttccagccactgttagcaaacaaaactcctaacgagagcttcctgaagaagtatatctattgcctttggtggggtttgcagaatctaagttgctatggccagacattgactgtgagcaccttcattggtgagacactgtatgctatattattggcagtggttggcctagtcttgtttgcccatttgatcggaaaagttcaggtacttcgtctatgctatatgcaatgaggaatagaatcctgagattttgcttctgatttcttcaaacctccctgttcatgcccccacttggtagtgtatgtgtattttgatcaatgtgtacagtatatactgattctcagcctgtaaatattctagctcattttaagtcggcaggttgaaaccttaccagttaaccttactgaacaagctccccagtcccatcattccatgcattaagttagttttgttttcgccgcgtaatgtcagtgattctgtgttttttcctgctagacctacctgcaatcaatcaccgcaagggttgaggagtggaggctaaagcagagagataccgaggagtggatggggcatcggcaactgccccatgaattacgggaaagagtgagaagatttgttcattacaagtggctcgcaactcgaggcgtggacgaagagtctatattgagtgccctacctacagatcttcgccgcgacatcaagcgccacctttgcctgtatcttgttcgtagggtcccacttttctcccagatggacgatcagcttctagacgccatatgcgagcgcctggtatcgtccttgagcacagagggcacatacattgtccgagaaggcgacccagtgaccgagatgctgttcatcatccgcggcaagctggaaagctccacgacagacggtggccggacaggtttcttcaactcgatcaccctgaagcccggcgacttctgtggcgaggagctcctcggatgggcgctcgtccccaagcccaccgtcaacctgccactgtccacccggacggtgaaggcggttctcgaggtcgaggcgttcgctctccaggccgacgacctgaggttcgtcgccagccagttcaggcgcctccacagtaggaagctgcagcacacgttccggtactactcccaccactggaggacctgggccgcgtgcttcatccagcacgcctggcgccgcctgaggaggaggaagatggccaaggacctgagtctgagggagtcgttctcgtccacgggaccgtacgaaggcgatggcgacgacgcctcctcccctgaacagagtatcacacttaggagaggagccggcagcatcatcagggagctgcctaagttcaggaagccatcggagccggatttctcggcggagcatgacgactgactgactggcggaggactgagtggctgatacattgtttgttaaggcaaaagattggtgcttctgatcggttgttcatactgtacatacatatgtagtggtgcttgtcattgtattgtagggatcccaccgtagattagaaagattgcttgtgtccgctggccgagcagattttgcttcccgggtcagggctctaccattcttttttcttcttttcttccaagtgtgaaaaattgcagcaggatgtactgttgtctgtttctcttacaccggtctggttgttgattctgtgaaattttgttgtgtgactaccgagactctgatcattttacagttgtgcctgctctcctctgtgtggcacaaatgcggttggacttgcaacagacgtttctttgttacgttgttgggtttttttaacgaagagctccggaagttcattccagagcttcttttggcgaacacggcatcacccttgaacttctgactgta

SEQ ID NO: 82240 - DNA, 2612 bp, Zea Mays
attctgggtgcctgatggcgacgagcggataactgatactcctaagagcaaacaatccctgaagtgtccagtatgctatttttgttgtttactttagggcaatcctaatgctatcttcttcaccaacagattccatgatgagagggcgaaggcaaccatacctattcaccagaagcagcatgggctggctgctagcaggctcggcttgggaagttcggggaagaacaaggtcttcgtggcaggagacgacttgtggtacaacaagattattgacccgtcgagcgacttcatcttgacgtggatatacgtcttccgtgtgtcatgcttcattgctctgttcatggaccctctgtacttctatgtgcctgaaatcgattacaggcaaacctttcattgtgtcaggaaggatacacgcctagccatcatcgttactgtgttccgatcaattgtcgacctcttttatgtcatccagatgatgataaagttcaggactgcatatattaatccaagctcaaacttaggggtttttggtcgaggagatctcatcacagatcctaaggaaatcgcaaagcagtacttgagatctgactttgttgttgatttggtggcttctttgcctttaccacagatcattatttggtctgtgataccagctatcaaatattcttcgtctgagcatggcaatgacatgctgcttctggttgctcttttccagtatatcctaagattatacctcatattttccttgaacgataaaatcgtcaaaattactgggggtgtttgcaaagactgcttggcatggggctgcctacaacctgctgttatacatgattgctagccatgttttaggagcgttgtggtaccttctatctgttgatcgtcagattgcgtgctggaaaaacttttgcgatgaaactgattgccacactcgatatctatattgtgatgtaaaaccagattcaatgtggaatgggacctcagtcttttctacttgtaatgctaagaacagtaccaaatttgactttggtatgttccagccactgttagcaaacaaaactcctaacgagagcttcctgaagaagtatatctattgcctttggtggggtttgcagaatctaagttgctatggccagacattgactgtgagcaccttcattggtgagacactgtatgctatattattggcagtggttggcctagtcttgtttgcccatttgatcggaaaagttcagacctacctgcaatcaatcaccgcaagggttgaggagtggaggctaaagcagagagataccgaggagtggatggggcatcggcaactgccccatgaattacgggaaagagtgagaagatttgttcattacaagtggctcgcaactcgaggcgtggacgaagagtctatattgagtgccctacctacagatcttcgccgcgacatcaagcgccacctttgcctgtatcttgttcgtagggtcccacttttctcccagatggacgatcagcttctagacgccatatgcgagcgcctggtatcgtccttgagcacagagggcacatacattgtccgagaaggcgacccagtgaccgagatgctgttcatcatccgcggcaagctggaaagctccacgacagacggtggccggacaggtttcttcaactcgatcaccctgaagcccggcgacttctgtggcgaggagctcctcggatgggcgctcgtccccaagcccaccgtcaacctgccactgtccacccggacggtgaaggcggttctcgaggtcgaggcgttcgctctccaggccgacgacctgaggttcgtcgccagccagttcaggcgcctccacagtaggaagctgcagcacacgttccggtactactcccaccactggaggacctgggccgcgtgcttcatccagcacgcctggcgccgcctgaggaggaggaagatggccaaggacctgagtctgagggagtcgttctcgtccacgggaccgtacgaaggcgatggcgacgacgcctcctcccctgaacagagtatcacacttaggagaggagccggcagcatcatcagggagctgcctaagttcaggaagccatcggagccggatttctcggcggagcatgacgactgactgactggcggaggactgagtggctgatacattgtttgttaaggcaaaagattggtgcttctgatcggttgttcatactgtacatacatatgtagtggtgcttgtcattgtattgtagggatcccaccgtagattagaaagattgcttgtgtccgctggccgagcagattttgcttcccgggtcagggctctaccattcttttttcttcttttcttccaagtgtgaaaaattgcagcaggatgtactgttgtctgtttctcttacaccggtctggttgttgattctgtgaaattttgttgtgtgactaccgagactctgatcattttacagttgtgcctgctctcctctgtgtggcacaaatgcggttggacttgcaacagacgtttctttgttacgttgttgggtttttttaacgaagagctccggaagttcattccagagcttcttttggcgaacacggcatcacccttgaacttctgactgta

SEQ ID NO: 82241 - DNA, 1715 bp, Zea Mays
cttccgggtccaaccaaaagttctgattcctaaactggcccgtactcccgtccaatcccaacccggcaacgcgagaatatatcaatccatcctcgcgtcgcgtgatctcatctcgccctcgctcacctacatctccgtccgcaagcgtcagccaggctgccccgggaggccgggaggaagcagatcggagaaggtgatctgttgtaatggctcgattgtacatcggcaacctggatccccgggtgaccgctcgggagctggaggacgagttccgcacgttcggggttcttcgcagtgtctgggttgctcggaaaccacctggctttgcgtttattgattttgatgataagagggacgcagaggatgcaatccgtgacctagatggcaagaatggatggagagttgagttatctcgtaatgccagcggtggtcgtggaggtcgtgaccggcatggtgggtctgagtccaagtgttacgagtgtggtgagactggccactttgctcgtgagtgccgtttgaggattggttctggaggtctaggcagcggaaggcgccgaagccgtagccgtagccgcagtcgcagtcccagatatcgccggagtccaagttacggtagaaggagttacagtcctgcagcacgctctccaaggcgtcgtagcgtctcaccagctcgtggacgcagctatagcaggtcaccacagcacaagggtgcacgtgaagaatctccctatgataatggataccgccgcagcaggagctagagccagatcgttgtatccgacgacgagcgttatgtgacagatattgggaaagctatggtcaataacctgcttgacagatccttcgtcgactgcttgactttggttaaggcatcgtcctgcactgcttaaacgactcggccgactacggctttcagttctgtcttcatggttttgttctgcgctctacattcttcgcacaccctcgcatgcttcattcagtctgccgtgtgttaatctgcctgcgtatcttctcgaagatgctgcgcatcgcaaaagcagtttggtctccgtgctgcgtgcgctgctcctggttcaggaactgcagtatgttagatggatgaggatgactgaatgactcacctactcacgttatcatgccttcagaggacccaagttagtgagcgccaggaagtgaattgaccaggccaaatgctacgttgagccgactttggctttgctctgcgatctccacttgccaacatgtgttgccttcgacgaagtcttcttcgccttccgcttccttctctgcagcatcctgattgatattcttcattcttcgagtgacatgcagtcaccctaattgatcgtcatagagcctgcgttgaagtcgaatcccccctaatggacaatgtagttaaattgttattagcttgtttcttgttggatagactaatgtcagatgctgtttggtataaaatggtaaccatctggttgatgattggcggcgaactatttgttcagcacgtggttgctatatgacaagtcacaaggtattattaacctgagtggtaggctgcatttggatcaaccaggctggttgagaggcagcatgtgcttgtttggttgctcgtccgtgcatctagtagcttaagttgaagtgtttggttaatggttgtatgtatttttgtgctcattgcaccgcggaatgcagaatctgggcagctcgcttgaaac

SEQ ID NO: 82242 - DNA, 1728 bp, Zea Mays
cttccgggtccaaccaaaagttctgattcctaaactggcccgtactcccgtccaatcccaacccggcaacgcgagaatatatcaatccatcctcgcgtcgcgtgatctcatctcgccctcgctcacctacatctccgtccgcaagcgtcagccaggctgccccgggaggccgggaggaagcagatcggagaaggtgatctgttgtaatggctcgattgtacatcggcaacctggatccccgggtgaccgctcgggagctggaggacgagttccgcacgttcggggttcttcgcagtgtctgggttgctcggaaaccacctggctttgcgtttattgattttgatgataagagggacgcagaggatgcaatccgtgacctagatggcaagaatggatggagagttgagttatctcgtaatgccagcggtggtcgtggaggtcgtgaccggcatggtgggtctgagtccaagtgttacgagtgtggtgagactggccactttgctcgtgagtgccgtttgaggattggttctggaggtctaggcagcggaaggcgccgaagccgtagccgtagccgcagtcgcagtcccagatatcgccggagtccaagttacggtagaaggagttacagtcctgcagcacgctctccaaggcgtcgtagcgtctcaccagctcgtggacgcagctatagcaggtcaccacagcacaagggtgcacgtgaagaatctccctatgataatggataccgccgcagcaggagctagagccagatcgttgtatccgacgacgagcgttatgtgacagatattgggaaagctatggtcaataacctgcttgacagatccttcgtcgactgcttgactttggttaaggcatcgtcctgcactgcttaaacgactcggccgactacggctttcagttctgtcttcatggttttgttctgcgctctacattcttcgcacaccctcgcatgcttcattcagtctgccgtgtgttaatctgcctgcgtatcttctcgaagatgctgcgcatcgcaaaagcatttctccccgtaggtttggtctccgtgctgcgtgcgctgctcctggttcaggaactgcagtatgttagatggatgaggatgactgaatgactcacctactcacgttatcatgccttcagaggacccaagttagtgagcgccaggaagtgaattgaccaggccaaatgctacgttgagccgactttggctttgctctgcgatctccacttgccaacatgtgttgccttcgacgaagtcttcttcgccttccgcttccttctctgcagcatcctgattgatattcttcattcttcgagtgacatgcagtcaccctaattgatcgtcatagagcctgcgttgaagtcgaatcccccctaatggacaatgtagttaaattgttattagcttgtttcttgttggatagactaatgtcagatgctgtttggtataaaatggtaaccatctggttgatgattggcggcgaactatttgttcagcacgtggttgctatatgacaagtcacaaggtattattaacctgagtggtaggctgcatttggatcaaccaggctggttgagaggcagcatgtgcttgtttggttgctcgtccgtgcatctagtagcttaagttgaagtgtttggttaatggttgtatgtatttttgtgctcattgcaccgcggaatgcagaatctgggcagctcgcttgaaac

SEQ ID NO: 82243 - DNA, 1753 bp, Zea Mays
cttccgggtccaaccaaaagttctgattcctaaactggcccgtactcccgtccaatcccaacccggcaacgcgagaatatatcaatccatcctcgcgtcgcgtgatctcatctcgccctcgctcacctacatctccgtccgcaagcgtcagccaggctgccccgggaggccgggaggaagcagatcggagaaggcaagccacggatttccttctcgccttctggaccccatgtgatctgttgtaatggctcgattgtacatcggcaacctggatccccgggtgaccgctcgggagctggaggacgagttccgcacgttcggggttcttcgcagtgtctgggttgctcggaaaccacctggctttgcgtttattgattttgatgataagagggacgcagaggatgcaatccgtgacctagatggcaagaatggatggagagttgagttatctcgtaatgccagcggtggtcgtggaggtcgtgaccggcatggtgggtctgagtccaagtgttacgagtgtggtgagactggccactttgctcgtgagtgccgtttgaggattggttctggaggtctaggcagcggaaggcgccgaagccgtagccgtagccgcagtcgcagtcccagatatcgccggagtccaagttacggtagaaggagttacagtcctgcagcacgctctccaaggcgtcgtagcgtctcaccagctcgtggacgcagctatagcaggtcaccacagcacaagggtgcacgtgaagaatctccctatgataatggataccgccgcagcaggagctagagccagatcgttgtatccgacgacgagcgttatgtgacagatattgggaaagctatggtcaataacctgcttgacagatccttcgtcgactgcttgactttggttaaggcatcgtcctgcactgcttaaacgactcggccgactacggctttcagttctgtcttcatggttttgttctgcgctctacattcttcgcacaccctcgcatgcttcattcagtctgccgtgtgttaatctgcctgcgtatcttctcgaagatgctgcgcatcgcaaaagcagtttggtctccgtgctgcgtgcgctgctcctggttcaggaactgcagtatgttagatggatgaggatgactgaatgactcacctactcacgttatcatgccttcagaggacccaagttagtgagcgccaggaagtgaattgaccaggccaaatgctacgttgagccgactttggctttgctctgcgatctccacttgccaacatgtgttgccttcgacgaagtcttcttcgccttccgcttccttctctgcagcatcctgattgatattcttcattcttcgagtgacatgcagtcaccctaattgatcgtcatagagcctgcgttgaagtcgaatcccccctaatggacaatgtagttaaattgttattagcttgtttcttgttggatagactaatgtcagatgctgtttggtataaaatggtaaccatctggttgatgattggcggcgaactatttgttcagcacgtggttgctatatgacaagtcacaaggtattattaacctgagtggtaggctgcatttggatcaaccaggctggttgagaggcagcatgtgcttgtttggttgctcgtccgtgcatctagtagcttaagttgaagtgtttggttaatggttgtatgtatttttgtgctcattgcaccgcggaatgcagaatctgggcagctcgcttgaaac

SEQ ID NO: 82244 - DNA, 1766 bp, Zea Mays
cttccgggtccaaccaaaagttctgattcctaaactggcccgtactcccgtccaatcccaacccggcaacgcgagaatatatcaatccatcctcgcgtcgcgtgatctcatctcgccctcgctcacctacatctccgtccgcaagcgtcagccaggctgccccgggaggccgggaggaagcagatcggagaaggcaagccacggatttccttctcgccttctggaccccatgtgatctgttgtaatggctcgattgtacatcggcaacctggatccccgggtgaccgctcgggagctggaggacgagttccgcacgttcggggttcttcgcagtgtctgggttgctcggaaaccacctggctttgcgtttattgattttgatgataagagggacgcagaggatgcaatccgtgacctagatggcaagaatggatggagagttgagttatctcgtaatgccagcggtggtcgtggaggtcgtgaccggcatggtgggtctgagtccaagtgttacgagtgtggtgagactggccactttgctcgtgagtgccgtttgaggattggttctggaggtctaggcagcggaaggcgccgaagccgtagccgtagccgcagtcgcagtcccagatatcgccggagtccaagttacggtagaaggagttacagtcctgcagcacgctctccaaggcgtcgtagcgtctcaccagctcgtggacgcagctatagcaggtcaccacagcacaagggtgcacgtgaagaatctccctatgataatggataccgccgcagcaggagctagagccagatcgttgtatccgacgacgagcgttatgtgacagatattgggaaagctatggtcaataacctgcttgacagatccttcgtcgactgcttgactttggttaaggcatcgtcctgcactgcttaaacgactcggccgactacggctttcagttctgtcttcatggttttgttctgcgctctacattcttcgcacaccctcgcatgcttcattcagtctgccgtgtgttaatctgcctgcgtatcttctcgaagatgctgcgcatcgcaaaagcatttctccccgtaggtttggtctccgtgctgcgtgcgctgctcctggttcaggaactgcagtatgttagatggatgaggatgactgaatgactcacctactcacgttatcatgccttcagaggacccaagttagtgagcgccaggaagtgaattgaccaggccaaatgctacgttgagccgactttggctttgctctgcgatctccacttgccaacatgtgttgccttcgacgaagtcttcttcgccttccgcttccttctctgcagcatcctgattgatattcttcattcttcgagtgacatgcagtcaccctaattgatcgtcatagagcctgcgttgaagtcgaatcccccctaatggacaatgtagttaaattgttattagcttgtttcttgttggatagactaatgtcagatgctgtttggtataaaatggtaaccatctggttgatgattggcggcgaactatttgttcagcacgtggttgctatatgacaagtcacaaggtattattaacctgagtggtaggctgcatttggatcaaccaggctggttgagaggcagcatgtgcttgtttggttgctcgtccgtgcatctagtagcttaagttgaagtgtttggttaatggttgtatgtatttttgtgctcattgcaccgcggaatgcagaatctgggcagctcgcttgaaac

SEQ ID NO: 82245 - DNA, 999 bp, Zea Mays
tgcaagtgcattatttttgcactgtattgttcatttctagcgtgtttggtttgaggaatgagttagcaacaacagttttctcctggtgccgtgcccacagagaactattgcctggatacgacactctcttgaaaatttgctgcaagcttggtgaaagcaagatcatcctctgtgaagagggtaccaagcacaagttgcagaaggtgcagctcaactatccaagtgatgatgtgacatttgccctcaaggaatctccagatcttccttggctatctaagtacttgtgaggctcttattgcattaaccattgattcctggcactctgttgcctttctgttctctttggaggctagacaattctacttcacccgcaaacctttcaaacacacatatcccatggtcgatctcctggtcactctagcctcgtatctgcaaaggaaccggcgaaggatgacggcatgtcgctgcacccaacggaacgcgtcacactaggaacgtaaaacgttagaaacatgtacgtctggaatttcgtccccttcatgactggatacgtatgtatccacttcaacccatgtagtttggagtggtttggtatgtattttaaactaaactctatattaaaccactctaatccatatcgattgaggtgaatatgcatgcgtccatatgttgtaactgaactgccgcgtagtgagatttagtaactatatatgaatggtttgttacaataacattgcgagttttgaataagaaacattgagatatcaatttgtactctgctggctccaatgcgatggccatttaaggcattgtttggttattctcattctatataagattgaatgagattaaaaaaaaataagaaagaattttaacttactagggatttaaacccacctaattttatctaattcatttatattgagattaaaacgaaccaaacataaatctcattttttttgtaaatctcccccggcccccgcaaagctgaaaactgca

SEQ ID NO: 82246 - DNA, 1002 bp, Zea Mays
actaaataaacaagtgccaaaatcaccgaaggcagaacagatccaaccaataactatatgtttagttagcaacaacagttttctcctggtgccgtgcccacagagaactattgcctggatacgacactctcttgaaaatttgctgcaagcttggtgaaagcaagatcatcctctgtgaagagggtaccaagcacaagttgcagaaggtgcagctcaactatccaagtgatgatgtgacatttgccctcaaggaatctccagatcttccttggctatctaagtacttgtgaggctcttattgcattaaccattgattcctggcactctgttgcctttctgttctctttggaggctagacaattctacttcacccgcaaacctttcaaacacacatatcccatggtcgatctcctggtcactctagcctcgtatctgcaaaggaaccggcgaaggatgacggcatgtcgctgcacccaacggaacgcgtcacactaggaacgtaaaacgttagaaacatgtacgtctggaatttcgtccccttcatgactggatacgtatgtatccacttcaacccatgtagtttggagtggtttggtatgtattttaaactaaactctatattaaaccactctaatccatatcgattgaggtgaatatgcatgcgtccatatgttgtaactgaactgccgcgtagtgagatttagtaactatatatgaatggtttgttacaataacattgcgagttttgaataagaaacattgagatatcaatttgtactctgctggctccaatgcgatggccatttaaggcattgtttggttattctcattctatataagattgaatgagattaaaaaaaaataagaaagaattttaacttactagggatttaaacccacctaattttatctaattcatttatattgagattaaaacgaaccaaacataaatctcattttttttgtaaatctcccccggcccccgcaaagctgaaaactgca

SEQ ID NO: 82247 - DNA, 1477 bp, Zea Mays
ctacaaggtggcactaaaattggaaagcaagcaaaccagccaattattttgctgatcgatgagctcgatcttcttttgacaagaaaccagtcggtgctgtataacatccttgattggcccaccaaaccatattcaaatctagttgtcataggtatagcaaacacaatggatcttccagaaaaattattgcctcgtatatcaagtcggatgggcattcaacgactgtgttttggtccatacaattatcggcaactacaggaaattataacaagccgtttaaaggggattgatgcctttgaagaacaagctattgaatttgcttctagaaagctgctatgtcaggtgatgctaggcgagctttagagatttgtagacgagcagcagagtttgcagactaccgtgttaaacagtctcgacagtctgcacagaatactgtttctgcaaataaaggtgatggtgttgtttccatgggtgacatagaagctgctattcaggaagtcttccaggcaccgcatattcaagtgatgaagaattgtccaaagtttggaaaagttatcttggttgccatagttcatgagctgtacaaaagtggactaggtgaaataatgtttgataagctgcaagcttggtgaaagcaagatcatcctctgtgaagagggtaccaagcacaagttgcagaaggtgcagctcaactatccaagtgatgatgtgacatttgccctcaaggaatctccagatcttccttggctatctaagtacttgtgaggctcttattgcattaaccattgattcctggcactctgttgcctttctgttctctttggaggctagacaattctacttcacccgcaaacctttcaaacacacatatcccatggtcgatctcctggtcactctagcctcgtatctgcaaaggaaccggcgaaggatgacggcatgtcgctgcacccaacggaacgcgtcacactaggaacgtaaaacgttagaaacatgtacgtctggaatttcgtccccttcatgactggatacgtatgtatccacttcaacccatgtagtttggagtggtttggtatgtattttaaactaaactctatattaaaccactctaatccatatcgattgaggtgaatatgcatgcgtccatatgttgtaactgaactgccgcgtagtgagatttagtaactatatatgaatggtttgttacaataacattgcgagttttgaataagaaacattgagatatcaatttgtactctgctggctccaatgcgatggccatttaaggcattgtttggttattctcattctatataagattgaatgagattaaaaaaaaataagaaagaattttaacttactagggatttaaacccacctaattttatctaattcatttatattgagattaaaacgaaccaaacataaatctcattttttttgtaaatctcccccggcccccgcaaagctgaaaactgca

SEQ ID NO: 82248 - DNA, 2516 bp, Zea Mays
gaacccctcacggtgaaggtctggagcgcgactacgaactgcgtagccgtggtccagcgacgttgggcgtcgaggcgcttgacagcttgcaaggcatcgttgttctatactgtgtttatggagggagcctgatggcaccttctgggcaaaggtcaggtggtacattatccccgaagagactgcagcaggaaggcagctgcataacttgagaagagagctgtatcgtaccaatgatcttgcagacattgagatggaaacaatccttagacattgttctataatgtgccccaaagactttagggatgctaacgatggaggagatgatgtattttactgtgaatatgagtatgatattcattggcataattttaagcgtttggcagatattggtgatgaacccgagacaaaggaagatcccagtgacgagccttacaatgccagtgatgattataacagtgacactgatgaagattcagagtatgacgaggtggaagaacctacatcatctttctctgccagagggaatcaatcacatgaattggcagcgaattcaaggaagggtagaatatatggcctacaaaaaattggaatacgaaaaattcctgagcatgttcggtgccaccaaaagactgagctggagaaggctaaagcaaccctgttattggcaactctccctaagtcattaccttgcagggataaagaaatggaggagatatcgatatttgtaaaggatgcaatctgcaatgaccagtgcctaggacggtgcctttatatacatggtgtacctggtactggcaagactatgagtgtacttgctgttatgaggaggctgagatctgaatttgattctggaacactgaggccatattgttttattgaaattaatggtcttaaattagcatccccagagaatatctacaaggtggcactaaaattggaaagcaagcaaaccagccaattattttgctgatcgatgagctcgatcttcttttgacaagaaaccagtcggtgctgtataacatccttgattggcccaccaaaccatattcaaatctagttgtcataggtatagcaaacacaatggatcttccagaaaaattattgcctcgtatatcaagtcggatgggcattcaacgactgtgttttggtccatacaattatcggcaactacaggaaattataacaagccgtttaaaggggattgatgcctttgaagaacaagctattgaatttgcttctagaaaggtagctgctatgtcaggtgatgctaggcgagctttagagatttgtagacgagcagcagagtttgcagactaccgtgttaaacagtctcgacagtctgcacagaatactgtttctgcaaataaaggtgatggtgttgtttccatgggtgacatagaagctgctattcaggaagtcttccaggcaccgcatattcaagtgatgaagaattgtccaaagtttggaaaagttatcttggttgccatagttcatgagctgtacaaaagtggactaggtgaaataatgtttgataagcattactccgatcatcagcaagaattggtggatcttcagtcagttagcaacaacagttttctcctggtgccgtgcccacagagaactattgcctggatacgacactctcttgaaaatttgctgcaagcttggtgaaagcaagatcatcctctgtgaagagggtaccaagcacaagttgcagaaggtgcagctcaactatccaagtgatgatgtgacatttgccctcaaggaatctccagatcttccttggctatctaagtacttgtgaggctcttattgcattaaccattgattcctggcactctgttgcctttctgttctctttggaggctagacaattctacttcacccgcaaacctttcaaacacacatatcccatggtcgatctcctggtcactctagcctcgtatctgcaaaggaaccggcgaaggatgacggcatgtcgctgcacccaacggaacgcgtcacactaggaacgtaaaacgttagaaacatgtacgtctggaatttcgtccccttcatgactggatacgtatgtatccacttcaacccatgtagtttggagtggtttggtatgtattttaaactaaactctatattaaaccactctaatccatatcgattgaggtgaatatgcatgcgtccatatgttgtaactgaactgccgcgtagtgagatttagtaactatatatgaatggtttgttacaataacattgcgagttttgaataagaaacattgagatatcaatttgtactctgctggctccaatgcgatggccatttaaggcattgtttggttattctcattctatataagattgaatgagattaaaaaaaaataagaaagaattttaacttactagggatttaaacccacctaattttatctaattcatttatattgagattaaaacgaaccaaacataaatctcattttttttgtaaatctcccccggcccccgcaaagctgaaaactgca

SEQ ID NO: 82249 - DNA, 3286 bp, Zea Mays
atggcaaaactgcattgccaatgggagtcagagggccgaaaccctaactcgtccacttttcaaatccacattccccccttatgcctctcacccgtcacccctcgccgtctccggcgagacccggaaatggatgtcgctgccaccccctcaaggtcaaaatctaagcccagatcctcgctggtgaatcccgtcgcagcccccgccgagtccaggatggacctctgcaccccatcgaagcccacgcccaggcggaactccaaatcgacggcctcgccggcgccaatgtctccgtcgacgccctacaccgtccggcgctcgcgccgcctcctcgaaacccccaccaaagccgccctggaggtgcaggtgaaggctacgctgacccctacctccaagggcaagcgcgccgcgccgtcacctaaaacccctgctcagcacgagcccaagaggcagaaacgacacccgaggaagagggcatactaccggaaggtggtgtatgacggcggggagttcgaggtcggtgatgacgtgtacgtgaagcggcgggaggcggcggagtctgacgcggaggaccccgaggaggaagagtgccgcgtatgcttccgcaccggtggcggggttatggtggagtgcgacgcgtgcctcggcggatttcacctgcgttgcgtgcgaccgccgcttcggagggtgcctgaaggtgactgggcatgtccatactgcgaggccgagcgcgccggaaaggtggtcgagcggcccaggccgcctgagggcaagcgcatcgtgaggactgccaaggagaaactcctttccagcgatctgtgggctgcacgcatcgagagtttatggagggagcctgatggcaccttctgggcaaaggtcaggtggtacattatccccgaagagactgcagcaggaaggcagctgcataacttgagaagagagctgtatcgtaccaatgatcttgcagacattgagatggaaacaatccttagacattgttctataatgtgccccaaagactttagggatgctaacgatggaggagatgatgtattttactgtgaatatgagtatgatattcattggcataattttaagcgtttggcagatattggtgatgaacccgagacaaaggaagatcccagtgacgagccttacaatgccagtgatgattataacagtgacactgatgaagattcagagtatgacgaggtggaagaacctacatcatctttctctgccagagggaatcaatcacatgaattggcagcgaattcaaggaagggtagaatatatggcctacaaaaaattggaatacgaaaaattcctgagcatgttcggtgccaccaaaagactgagctggagaaggctaaagcaaccctgttattggcaactctccctaagtcattaccttgcagggataaagaaatggaggagatatcgatatttgtaaaggatgcaatctgcaatgaccagtgcctaggacggtgcctttatatacatggtgtacctggtactggcaagactatgagtgtacttgctgttatgaggaggctgagatctgaatttgattctggaacactgaggccatattgttttattgaaattaatggtcttaaattagcatccccagagaatatctacaaggttgtatatgagcagttgagtgggcatagggttgggtggaaaaaggctcttcactatttaacagaacatttttcaggtggcactaaaattggaaagcaagcaaaccagccaattattttgctgatcgatgagctcgatcttcttttgacaagaaaccagtcggtgctgtataacatccttgattggcccaccaaaccatattcaaatctagttgtcataggtatagcaaacacaatggatcttccagaaaaattattgcctcgtatatcaagtcggatgggcattcaacgactgtgttttggtccatacaattatcggcaactacaggaaattataacaagccgtttaaaggggattgatgcctttgaagaacaagctattgaatttgcttctagaaaggtagctgctatgtcaggtgatgctaggcgagctttagagatttgtagacgagcagcagagtttgcagactaccgtgttaaacagtctcgacagtctgcacagaatactgtttctgcaaataaagatctgatttttgtaggtgatggtgttgtttccatgggtgacatagaagctgctattcaggaagtcttccaggcaccgcatattcaagtgatgaagaattgtccaaagtttggaaaagttatcttggttgccatagttcatgagctgtacaaaagtggactaggtgaaataatgtttgataagttagcaacaacagttttctcctggtgccgtgcccacagagaactattgcctggatacgacactctcttgaaaatttgctgcaagcttggtgaaagcaagatcatcctctgtgaagagggtaccaagcacaagttgcagaaggtgcagctcaactatccaagtgatgatgtgacatttgccctcaaggaatctccagatcttccttggctatctaagtacttgtgaggctcttattgcattaaccattgattcctggcactctgttgcctttctgttctctttggaggctagacaattctacttcacccgcaaacctttcaaacacacatatcccatggtcgatctcctggtcactctagcctcgtatctgcaaaggaaccggcgaaggatgacggcatgtcgctgcacccaacggaacgcgtcacactaggaacgtaaaacgttagaaacatgtacgtctggaatttcgtccccttcatgactggatacgtatgtatccacttcaacccatgtagtttggagtggtttggtatgtattttaaactaaactctatattaaaccactctaatccatatcgattgaggtgaatatgcatgcgtccatatgttgtaactgaactgccgcgtagtgagatttagtaactatatatgaatggtttgttacaataacattgcgagttttgaataagaaacattgagatatcaatttgtactctgctggctccaatgcgatggccatttaaggcattgtttggttattctcattctatataagattgaatgagattaaaaaaaaataagaaagaattttaacttactagggatttaaacccacctaattttatctaattcatttatattgagattaaaacgaaccaaacataaatctcattttttttgtaaatctcccccggcccccgcaaagctgaaaactgca

SEQ ID NO: 82250 - DNA, 2856 bp, Zea Mays
ggaatctcccaatttcttaggacttcgatctcgtgcaactttttttacttcacgctgttcttgtttatagtccacttgtacctgatgtctgcagctaaccccattcatgtctcgatgcccagtggtgtgtttttggaagccattgggcaccattcgcctgccaaaaatttttcttgacatttttctccatttcttttgccagtttatcccaagttcagattgtaacaaaaggttcgagcaaacttttgatctgattgataccttcaggagcggttagcttgacactctcttggttttttcaagactttctggatcgatacgatacagacgcacctacctcacccagctccgatcttgctgtcgcttcccacagtgcgtagaatccaagaaaccccaaatctgtgcctggagcatcgagcatccattatccggatcatggagaggttcggtaaagcccagtgaagaaatccgagctctgttgcagtctcctagcgggctgcgggccataggagatctcgcgcgcgacagcacaagcgaccacggaaatgtcgccgcagccggcccccgacctcgccgaggacaaggagagggacaccaatgtcttcatcgaggaggccccgggatcgccagctaaggtggccgagggcgacggccatggccacggcagccccccaacgtcgccggtggcgtggttccggatgctggccagggaactgcactggagcttcgtcttcggcgtggtggccacgtacggcatcagccagggcctcggtggcggcatctcgcgcgtcgcgtccgactactactggaaggacgtgcagcgggtgcagccgtcggtggcgcaggtgtaccagggcgtcacgtccatcccctggatggtcaagccgctctggggcctgctcaccgacgtgctccccgttgccggataccgccgccggccctactttattcttgcaggcttcatcggagtgattgcaatgcttatactcgctctccacagcaagcttcatgcattgttcgctttgttggcattgatgaccggaagcgctagcgtggcgatagctgatgttactatagatgcttgcgtggcagaaaacagtatagtgtaccctcatcttgctgctgatatgataagcttaaaatggattctgttcatctgttggaggtcttatcggattctcaataagtggttttcttgttcatgcaataggggctcaagtgagtatcactagttcatctcttaagatttgtttgagtttcgtgcttttgaaatttctttgatgtgcatttatcactgctagaattagaacccctggatatcttcatcttaatctaattcgaagtaatttcatccgatgcattttttctgcataataatcagtcaactttacttgtactgcttctcttttctgtgacttgtcaaatgtaaattagactgacagttaccattacttggatggtgctggcatatttttcttcctttcaaaatgcatatggtgttggtatctgataatggataaatcttgcctttctcaagggtgcccttggcctgttaaccataccctctgccttggtaattttatccggaactctgctaaaggaggttcatatccccaactttccatacgagcaggcccataagaagttcgtagaagcaagtgggaaaatgttaacagctttgaaatgtcctgaagtatggcgaccatgtgtttacatgtacatatcacttgcgttgagtgtcgacatccaagaaggaatgttcttctggtacacggaccaaagcgcagggttatcttttcatgagggatttattggcttcatgttcgctattggatcagttggttctcttgtgggtgttatactttatcagaatattcttaaggaccattcctttcgaagccttcttttttcaagccagctgttgctaagcttggcaggaatgcttgatctgatcttggtgcttcgactaaatcttaagatggggataccagattactactttgcggtgatcgatgagggggtctccaaaatgatcaaccgtatcaaatggatgcctcttctagtgcttagctcaaagctttgccccactggcattgaaggcacattctacgcattgctcatgtccatcgacaacattggctcgttaactggatcatgggttggtggattgctccttcatttgttgagaatcacaagaacagaattcaagaacctctgggccgcaatcttgattcggaatatgatgaggctgctaccactggcgctgctgttcttggtgccaagaagtgatccgaattccactcttcttccatccgatttgctgaatgagggagatgatgatgaagctcagcgagtagagaatgtcgagttaacttctctccctgcaaacagaaattcttgcgatggtaaatctctccatgacggagaacgggatgacgatgaagcttcacttcttgccaacaggagttgatactggattgaatatggagatttttcttttgtacacgagcaaatagataaaatttagaaaaatctttgacatttgtttactatagatactcatttagatgttcacgttgttaaattcattgaatttgcagcagggtagcgaaggcttgagagaagatactggggatgctttgagctggatttcccatataccaaaactataatggatcaaactttactaagtgtgaatcttgacttttcttatgaagttcacacatgctgctatgttacagttgtcagagtcgttgactaattgaaagattagtcaacgtccggtcaggcattgtaaacactataaaagaaagtttcaaagtattgaagcacattgttttttctcgtttcaaaatg

SEQ ID NO: 82251 - DNA, 2317 bp, Zea Mays
aaggaatctcccaatttcttaggacttcgatctcgtgcaactttttttacttcacgctgttcttgtttatagtccacttgtacctgatgtctgcagctaaccccattcatgtctcgatgcccagtgtttatcccaagttcagattgtaacaaaaggttcgagcaaacttttgatctgattgataccttcaggagcgtgcgtagaatccaagaaaccccaaatctgtgcctggagcatcgagcatccattatccggatcatggagaggttcggtaaagcccagtgaagaaatccgagctctgttgcagtctcctagcgggctgcgggccataggagatctcgcgcgcgacagcacaagcgaccacggaaatgtcgccgcagccggcccccgacctcgccgaggacaaggagagggacaccaatgtcttcatcgaggaggccccgggatcgccagctaaggtggccgagggcgacggccatggccacggcagccccccaacgtcgccggtggcgtggttccggatgctggccagggaactgcactggagcttcgtcttcggcgtggtggccacgtacggcatcagccagggcctcggtggcggcatctcgcgcgtcgcgtccgactactactggaaggacgtgcagcgggtgcagccgtcggtggcgcaggtgtaccagggcgtcacgtccatcccctggatggtcaagccgctctggggcctgctcaccgacgtgctccccgttgccggataccgccgccggccctactttattcttgcagcaagcttcatgcattgttcgctttgttggcattgatgaccggaagcgctagcgtggcgatagctgatgttactatagatgcttgcgtggcagaaaacagtatagtgtaccctcatcttgctgctgatatgataagcttaaaatggattctgttcatctgttggaggtcttatcggattctcaataagtggttttcttgttcatgcaataggggctcaaggtgcccttggcctgttaaccataccctctgccttggtaattttatccggaactctgctaaaggaggttcatatccccaactttccatacgagcaggcccataagaagttcgtagaagcaagtgggaaaatgttaacagctttgaaatgtcctgaagtatggcgaccatgtgtttacatgtacatatcacttgcgttgagtgtcgacatccaagaaggaatgttcttctggtacacggaccaaagcgcagggttatcttttcatgagggatttattggcttcatgttcgctattggatcagttggttctcttgtgggtgttatactttatcagaatattcttaaggaccattcctttcgaagccttcttttttcaagccagctgttgctaagcttggcaggaatgcttgatctgatcttggtgcttcgactaaatcttaagatggggataccagattactactttgcggtgatcgatgagggggtctccaaaatgatcaaccgtatcaaatggatgcctcttctagtgcttagctcaaagctttgccccactggcattgaaggcacattctacgcattgctcatgtccatcgacaacattggctcgttaactggatcatgggttggtggattgctccttcatttgttgagaatcacaagaacagaattcaagaacctctgggccgcaatcttgattcggaatatgatgaggctgctaccactggcgctgctgttcttggtgccaagaagtgatccgaattccactcttcttccatccgatttgctgaatgagggagatgatgatgaagctcagcgagtagagaatgtcgagttaacttctctccctgcaaacagaaattcttgcgatggtaaatctctccatgacggagaacgggatgacgatgaagcttcacttcttgccaacaggagttgatactggattgaatatggagatttttcttttgtacacgagcaaatagataaaatttagaaaaatctttgacatttgtttactatagatactcatttagatgttcacgttgttaaattcattgaatttgcagcagggtagcgaaggcttgagagaagatactggggatgctttgagctggatttcccatataccaaaactataatggatcaaactttactaagtgtgaatcttgacttttcttatgaagttcacacatgctgctatgttacagttgtcagagtcgttgactaattgaaagattagtcaacgtccggtcaggcattgtaaacactataaaagaaagtttcaaagtattgaagcacattgttttttctcgtttcaaaatg

SEQ ID NO: 82252 - DNA, 2957 bp, Zea Mays
aacggctaacctgccgaaggaatctcccaatttcttaggacttcgatctcgtgcaactttttttacttcacgctgttcttgtttatagtccacttgtacctgatgtctgcagctaaccccattcatgtctcgatgcccagtgtttatcccaagttcagattgtaacaaaaggttcgagcaaacttttgatctgattgataccttcaggagcgtgcgtagaatccaagaaaccccaaatctgtgcctggagcatcgagcatccattatccggatcatggagaggttcggtaaagcccagtgaagaaatccgagctctgttgcagtctcctagcgggctgcgggccataggagatctcgcgcgcgacagcacaagcgaccacggaaatgtcgccgcagccggcccccgacctcgccgaggacaaggagagggacaccaatgtcttcatcgaggaggccccgggatcgccagctaaggtggccgagggcgacggccatggccacggcagccccccaacgtcgccggtggcgtggttccggatgctggccagggaactgcactggagcttcgtcttcggcgtggtggccacgtacggcatcagccagggcctcggtggcggcatctcgcgcgtcgcgtccgactactactggaaggacgtgcagcgggtgcagccgtcggtggcgcaggtgtaccagggcgtcacgtccatcccctggatggtcaagccgctctggggcctgctcaccgacgtgctccccgttgccggataccgccgccggccctactttattcttgcaggtgaggagcatgtgttggtttttggttagagacgctcctgggtcctgatttctggaaaaccagtgttcctcgttcaatttggtaggaactttaggactgaaaaatatcttgcggaaatgtaggagtgcaagtaaagttagatgactcgtaatcctgaaaagtagtgacaaaacgtgtcaacggcaatgagcatcaaacatgcctattagctaatggctatgcactagttgactttacatctagtaggtgcagcataagatccaaactaaatcattaaaaaaacttgttttaaaatgatgattagttcagtacatcttaattttgattcattaactgcatggaggagtaccaaatagctagtaggaaggaatcaatgtgactgtgtaggtgcatttattttgaaaaaacaagctttgcagcaaacagcataagccaaaatgagccattgttcgctaacaatggcattcatactactactactattctcttgataggagaataagcttcatttagtaaaagcataaatagaaaatgagtattttgtttgttttgttccctccctgtttttgaggagtatgcaggcttcatcggagtgattgcaatgcttatactcgctctccacagcaagcttcatgcattgttcgctttgttggcattgatgaccggaagcgctagcgtggcgatagctgatgttactatagatgcttgcgtggcagaaaacagtatagtgtaccctcatcttgctgctgatatgataagcttaaaatggattctgttcatctgttggaggtcttatcggattctcaataagtggttttcttgttcatgcaataggggctcaaggtgcccttggcctgttaaccataccctctgccttggtaattttatccggaactctgctaaaggaggttcatatccccaactttccatacgagcaggcccataagaagttcgtagaagcaagtgggaaaatgttaacagctttgaaatgtcctgaagtatggcgaccatgtgtttacatgtacatatcacttgcgttgagtgtcgacatccaagaaggaatgttcttctggtacacggaccaaagcgcagggttatcttttcatgagggatttattggcttcatgttcgctattggatcagttggttctcttgtgggtgttatactttatcagaatattcttaaggaccattcctttcgaagccttcttttttcaagccagctgttgctaagcttggcaggaatgcttgatctgatcttggtgcttcgactaaatcttaagatggggataccagattactactttgcggtgatcgatgagggggtctccaaaatgatcaaccgtatcaaatggatgcctcttctagtgcttagctcaaagctttgccccactggcattgaaggcacattctacgcattgctcatgtccatcgacaacattggctcgttaactggatcatgggttggtggattgctccttcatttgttgagaatcacaagaacagaattcaagaacctctgggccgcaatcttgattcggaatatgatgaggctgctaccactggcgctgctgttcttggtgccaagaagtgatccgaattccactcttcttccatccgatttgctgaatgagggagatgatgatgaagctcagcgagtagagaatgtcgagttaacttctctccctgcaaacagaaattcttgcgatggtaaatctctccatgacggagaacgggatgacgatgaagcttcacttcttgccaacaggagttgatactggattgaatatggagatttttcttttgtacacgagcaaatagataaaatttagaaaaatctttgacatttgtttactatagatactcatttagatgttcacgttgttaaattcattgaatttgcagcagggtagcgaaggcttgagagaagatactggggatgctttgagctggatttcccatataccaaaactataatggatcaaactttactaagtgtgaatcttgacttttcttatgaagttcacacatgctgctatgttacagttgtcagagtcgttgactaattgaaagattagtcaacgtccggtcaggcattgtaaacactataaaagaaagtttcaaagtattgaagcacattgttttttctcgtttcaaaatg

SEQ ID NO: 82253 - DNA, 2405 bp, Zea Mays
gtttttaaaaccaattaaacaaaaggtcaaacggctaacctgccgaaggaatctcccaatttcttaggacttcgatctcgtgcaactttttttacttcacgctgttcttgtttatagtccacttgtacctgatgtctgcagctaaccccattcatgtctcgatgcccagtgtttatcccaagttcagattgtaacaaaaggttcgagcaaacttttgatctgattgataccttcaggagcgtgcgtagaatccaagaaaccccaaatctgtgcctggagcatcgagcatccattatccggatcatggagaggttcggtaaagcccagtgaagaaatccgagctctgttgcagtctcctagcgggctgcgggccataggagatctcgcgcgcgacagcacaagcgaccacggaaatgtcgccgcagccggcccccgacctcgccgaggacaaggagagggacaccaatgtcttcatcgaggaggccccgggatcgccagctaaggtggccgagggcgacggccatggccacggcagccccccaacgtcgccggtggcgtggttccggatgctggccagggaactgcactggagcttcgtcttcggcgtggtggccacgtacggcatcagccagggcctcggtggcggcatctcgcgcgtcgcgtccgactactactggaaggacgtgcagcgggtgcagccgtcggtggcgcaggtgtaccagggcgtcacgtccatcccctggatggtcaagccgctctggggcctgctcaccgacgtgctccccgttgccggataccgccgccggccctactttattcttgcaggcttcatcggagtgattgcaatgcttatactcgctctccacagcaagcttcatgcattgttcgctttgttggcattgatgaccggaagcgctagcgtggcgatagctgatgttactatagatgcttgcgtggcagaaaacagtatagtgtaccctcatcttgctgctgatatgataagcttaaaatggattctgttcatctgttggaggtcttatcggattctcaataagtggttttcttgttcatgcaataggggctcaaggtgcccttggcctgttaaccataccctctgccttggtaattttatccggaactctgctaaaggaggttcatatccccaactttccatacgagcaggcccataagaagttcgtagaagcaagtgggaaaatgttaacagctttgaaatgtcctgaagtatggcgaccatgtgtttacatgtacatatcacttgcgttgagtgtcgacatccaagaaggaatgttcttctggtacacggaccaaagcgcagggttatcttttcatgagggatttattggcttcatgttcgctattggatcagttggttctcttgtgggtgttatactttatcagaatattcttaaggaccattcctttcgaagccttcttttttcaagccagctgttgctaagcttggcaggaatgcttgatctgatcttggtgcttcgactaaatcttaagatggggataccagattactactttgcggtgatcgatgagggggtctccaaaatgatcaaccgtatcaaatggatgcctcttctagtgcttagctcaaagctttgccccactggcattgaaggcacattctacgcattgctcatgtccatcgacaacattggctcgttaactggatcatgggttggtggattgctccttcatttgttgagaatcacaagaacagaattcaagaacctctgggccgcaatcttgattcggaatatgatgaggctgctaccactggcgctgctgttcttggtgccaagaagtgatccgaattccactcttcttccatccgatttgctgaatgagggagatgatgatgaagctcagcgagtagagaatgtcgagttaacttctctccctgcaaacagaaattcttgcgatggtaaatctctccatgacggagaacgggatgacgatgaagcttcacttcttgccaacaggagttgatactggattgaatatggagatttttcttttgtacacgagcaaatagataaaatttagaaaaatctttgacatttgtttactatagatactcatttagatgttcacgttgttaaattcattgaatttgcagcagggtagcgaaggcttgagagaagatactggggatgctttgagctggatttcccatataccaaaactataatggatcaaactttactaagtgtgaatcttgacttttcttatgaagttcacacatgctgctatgttacagttgtcagagtcgttgactaattgaaagattagtcaacgtccggtcaggcattgtaaacactataaaagaaagtttcaaagtattgaagcacattgttttttctcgtttcaaaatg

SEQ ID NO: 82254 - DNA, 1083 bp, Zea Mays
atcttctcccctgctccgctctccgtcgatggaagggtcgctaccgccgttgccctcgccctcgcagtccatgtccatcgatggaagggtcgctacagcccttgccttcgcctccgcaatccatggacgcccccgccccgagacgtgcccacccagagagccgagccgctcgctcaccttgctaccccacacccgtcttgttctcctcctcgtcccggcgctcctactactcccctccatggcgcacagctttcaggtgccaagttcattccgacattaaagtatcccctacattggacttgaaggacgatagcaaatctgaaacttggaggatcaagatgctctatgacggtgattgcgctctctgtatgcgtgaggtaaacatgctgagggaaagaaacaaatcctatggggcaataaagtttgctgacataagctctaaagattactctccagatgacaatgaaggccttgattatgaaattatgtgtatcacttcaatttatttgacttttcttgctcacccactctatgatttctcgtagtgaaattggtcatgtcgtgttttgtttcccaaaggctatggtgtaaacattgctttggtcatgtcgtattttgtttctcaaactgatttctatcaaacaccagggcatccgaagcggagtcgtcggaggacttggttacgacttctcgttcttgatgctgttcttcacgtatggcctttgcttctacgtcggtgcgcagtttgtgcgccaggggaaaactacctttctagatgttttcaagggttttttcgcgttagttctggcagctattggagtcccgcaggcgagtgcgctggcttctgatgcgaccaaagcaagggactctgctatttccatcttcggcgttctggacagggagtccaaaattgactccagcagcggcgacgggatgacgttggagaatgtcagtggcaacatcgatttcagcaacgtcagcttcaagtacccactgcgtcctgacgtccagatattcagcaacttcaccttgtgcattcctggaaagtgccctgttaaaccagagagacaagtctgtaactaa

SEQ ID NO: 82255 - DNA, 1244 bp, Zea Mays
aaaaaccctaaaccctcagctcccacccgcgccacggccatgtctcctgtcgtgatcccgcccccgcccccgccatcttctcccctgctccgctctccgtcgatggaagggtcgctaccgccgttgccctcgccctcgcagtccatgtccatcgatggaagggtcgctacagcccttgccttcgcctccgcaatccatggacgcccccgccccgagacgtgcccacccagagagccgagccgctcgctcaccttgctaccccacacccgtcttgttctcctcctcgtcccggcgctcctactactcccctccatggcgcacagcgagggcgcttagcgtcggcgaggagctcatggccaagagaccatgccgtcaggtgtacaggatcgacggactgccctgtttgtgtgctttcaggtgccaagttcattccgacattaaagtatcccctacattggacttgaaggacgatagcaaatctgaaacttggaggatcaagatgctctatgacggtgattgcgctctctgtatgcgtgaggtaaacatgctgagggaaagaaacaaatcctatggggcaataaagtttgctgacataagctctaaagattactctccagatgacaatgaaggccttgattatgaaattatgtgtatcacttcaatttatttgacttttcttgctcacccactctatgatttctcgtagtgaaattggtcatgtcgtgttttgtttcccaaaggctatggtgtaaacattgctttggtcatgtcgtattttgtttctcaaactgatttctatcaaacaccagggcatccgaagcggagtcgtcggaggacttggttacgacttctcgttcttgatgctgttcttcacgtatggcctttgcttctacgtcggtgcgcagtttgtgcgccaggggaaaactacctttctagatgttttcaagggttttttcgcgttagttctggcagctattggagtcccgcaggcgagtgcgctggcttctgatgcgaccaaagcaagggactctgctatttccatcttcggcgttctggacagggagtccaaaattgactccagcagcggcgacgggatgacgttggagaatgtcagtggcaacatcgatttcagcaacgtcagcttcaagtacccactgcgtcctgacgtccagatattcagcaacttcaccttgtgcattcctggaaagtgccctgttaaaccagagagacaagtctgtaactaa

SEQ ID NO: 82256 - DNA, 2203 bp, Zea Mays
aaaaacaatggatccgccaaacatacagcttatcagcacacgagaagatgccgcaatagtaacgtcttttgtcaggcgccacctgtaaatttggatttttgctgctctcagaatctttcccatggttcctttgcttctgctgggtaccatgcgattaaggaatgccctcctcttcaatactttgacaaatattaatgctacaagaaatctagaaacgtctactgtctacggtctactgtccaattatacggccaattcactgttaagagttttggtaaactagtctctgaaagtttggtcactctggtgtccactttgcagttcccccttctctccaagagcggtctgttacagaggctgatagtagaggcgagccagaacggcagcgacgaagttgccatacaagacgtccctggcggagcgaagaccttcgagatctgcgcgaagttctgctacggcatggtggtgaccctgaacgcgtacaacgtcgtcgccgcgaggtgcgcggcggagtaccttgggatgaccgaggacgtcgagaagagcaacctggtgttcaagatcgaggtgttcctgagctccggcatcttcaggagctggaaggactcgatcatcgcgctgcagaccaccgacgcgttgctgccgtggtcggaggagctcaagctggtcggcagatgcgtggactctgtcgctgccaaggctaccgtcagcgcgtcgaacgttgtgtggtcgtacacctacaacaggaagtctgcgtcctcggacgagatcgtcgaggctcgcaggagctcccaggcggttcccaaggactggtgggttgaggatctgtgtgagctcgatgtggacctctacaggcgtgtcatggttgcggtcaagtcgagggggaggatcccctccgatgccatcggagaggcgctcaaggcatacgccgctagatggctgcctgagtgctgtgacgcgctggtagacgacgcctactctggagcgtacaagcacctgctcgagaccatcgtctggcttttgccctcggacaaggggtcttcggggatctcctgtcgtttcttcctgaagctgctgaaattcactgtcctcgtcggcgctggggagctcctgaaggaagagctcatggacaggactgtgttgcagctccacaaggcctcggtcagtgatctcctgatcccctccaggcctccggcgcagaccgtctatgatgtccagctggttcagacactcatcggcaggtacatgagccatgccggggtatctcaaggtgggatttttctcaacgaccttgaccaggagatgtttgagacgaacgtggacggtgaatctttgctagcgttgtgcaagctggtcgataggtacttggctgaagttgcctctgatccaaatctctctgtttcgagctttgtggatttggcgacttccatgcctgaaacagccagaccgacacatgatggattgtacactgccattgacgtatatctgaagttgcatcccggcctacccaagatggagaagaggaagatttcgaacctgatggacgtgaggaagctgtccaagggggcgtgcatccacgcggcgcagaacgaccgactcccgctgcgcgtggtggtccaggtcctcttcttcgagcagctgcgcgccgcgggagccgccgccgccgctgggacgcccagcgccagcgtggccaaccagagcagccggatgtcgctgtcgtcgcggtcgcggaggatctttgacaggctgtgggtcggcggagcgaagctgcccggggaggccgccgccgcgggcaaggggtcgtcggacacgtccgggagctcgcagagcccgcggtcgtcggcgaagccgccggagtccaagtcgtccagctcgtcgtcaaggaaccggcggtactcggtctcgtaggccggggccgggggccggccggtcggcggcggaggctgtacagagaggaaggagagcctggtccaagcctaaacgtagctgctgctaactttcagagttcatgttgatctcgtgctgcctgcagtatgtggcatgcagctagaagaaatctttgttctgtcagtccagttgttctatctaatcttgagataatccctggtttctgtaacagacttggaaactatgattcagtcgaattctccatgaactgggcaatcctttttggcggctccaccactcgtgtcatgtgcttgat

SEQ ID NO: 82257 - DNA, 2177 bp, Zea Mays
ccacatttggtgcatgttcttcagctttgtttggagatacgtgctgtcagaccttccgtcagacatcgtcgtccatgtcgacgacgcaaggttctacctgcacaagttcccccttctctccaagagcggtctgttacagaggctgatagtagaggcgagccagaacggcagcgacgaagttgccatacaagacgtccctggcggagcgaagaccttcgagatctgcgcgaagttctgctacggcatggtggtgaccctgaacgcgtacaacgtcgtcgccgcgaggtgcgcggcggagtaccttgggatgaccgaggacgtcgagaagagcaacctggtgttcaagatcgaggtgttcctgagctccggcatcttcaggagctggaaggactcgatcatcgcgctgcagaccaccgacgcgttgctgccgtggtcggaggagctcaagctggtcggcagatgcgtggactctgtcgctgccaaggctaccgtcagcgcgtcgaacgttgtgtggtcgtacacctacaacaggaagtctgcgtcctcggacgagatcgtcgaggctcgcaggagctcccaggcggttcccaaggactggtgggttgaggatctgtgtgagctcgatgtggacctctacaggcgtgtcatggttgcggtcaagtcgagggggaggatcccctccgatgccatcggagaggcgctcaaggcatacgccgctagatggctgcctgagtgctgtgacgcgctggtagacgacgcctactctggagcgtacaagcacctgctcgagaccatcgtctggcttttgccctcggacaaggggtcttcggggatctcctgtcgtttcttcctgaagctgctgaaattcactgtcctcgtcggcgctggggagctcctgaaggaagagctcatggacaggactgtgttgcagctccacaaggcctcggtcagtgatctcctgatcccctccaggcctccggcgcagaccgtctatgatgtccagctggttcagacactcatcggcaggtacatgagccatgccggggtatctcaaggtgggatttttctcaacgaccttgaccaggagatgtttgagacgaacgtggacggtgaatctttgctagcgttgtgcaagctggtcgataggtacttggctgaagttgcctctgatccaaatctctctgtttcgagctttgtggatttggcgacttccatgcctgaaacagccagaccgacacatgatggattgtacactgccattgacgtatatctgaagttgcatcccggcctacccaagatggagaagaggaagatttcgaacctgatggacgtgaggaagctgtccaagggggcgtgcatccacgcggcgcagaacgaccgactcccgctgcgcgtggtggtccaggtcctcttcttcgagcagctgcgcgccgcgggagccgccgccgccgctgggacgcccagcgccagcgtggcgcggtgcatagcgcgcctggcggagcaggaggaagaggaggagcgctggaacgacggccgcgcgctgccggagcccccgacccccggcgcgctgaagaggcagctggggagcctgaagctgcagggcgaccaccaccagggcgcgggcgacgacgggcggcgcctggtggcgcgcagcaacagcgtggccaaccagagcagccggatgtcgctgtcgtcgcggtcgcggaggatctttgacaggctgtgggtcggcggagcgaagctgcccggggaggccgccgccgcgggcaaggggtcgtcggacacgtccgggagctcgcagagcccgcggtcgtcggcgaagccgccggagtccaagtcgtccagctcgtcgtcaaggaaccggcggtactcggtctcgtaggccggggccgggggccggccggtcggcggcggaggctgtacagagaggaaggagagcctggtccaagcctaaacgtagctgctgctaactttcagagttcatgttgatctcgtgctgcctgcagtatgtggcatgcagctagaagaaatctttgttctgtcagtccagttgttctatctaatcttgagataatccctggtttctgtaacagacttggaaactatgattcagtcgaattctccatgaactgggcaatcctttttggcggctccaccactcgtgtcatgtgcttgat

SEQ ID NO: 82258 - DNA, 2167 bp, Zea Mays
gttgtggtgtgagggaggatcatgagatacgtgctgtcagaccttccgtcagacatcgtcgtccatgtcgacgacgcaaggttctacctgcacaagttcccccttctctccaagagcggtctgttacagaggctgatagtagaggcgagccagaacggcagcgacgaagttgccatacaagacgtccctggcggagcgaagaccttcgagatctgcgcgaagttctgctacggcatggtggtgaccctgaacgcgtacaacgtcgtcgccgcgaggtgcgcggcggagtaccttgggatgaccgaggacgtcgagaagagcaacctggtgttcaagatcgaggtgttcctgagctccggcatcttcaggagctggaaggactcgatcatcgcgctgcagaccaccgacgcgttgctgccgtggtcggaggagctcaagctggtcggcagatgcgtggactctgtcgctgccaaggctaccgtcagcgcgtcgaacgttgtgtggtcgtacacctacaacaggaagtctgcgtcctcggacgagatcgtcgaggctcgcaggagctcccaggcggttcccaaggactggtgggttgaggatctgtgtgagctcgatgtggacctctacaggcgtgtcatggttgcggtcaagtcgagggggaggatcccctccgatgccatcggagaggcgctcaaggcatacgccgctagatggctgcctgagtgctgtgacgcgctggtagacgacgcctactctggagcgtacaagcacctgctcgagaccatcgtctggcttttgccctcggacaaggggtcttcggggatctcctgtcgtttcttcctgaagctgctgaaattcactgtcctcgtcggcgctggggagctcctgaaggaagagctcatggacaggactgtgttgcagctccacaaggcctcggtcagtgatctcctgatcccctccaggcctccggcgcagaccgtctatgatgtccagctggttcagacactcatcggcaggtacatgagccatgccggggtatctcaaggtgggatttttctcaacgaccttgaccaggagatgtttgagacgaacgtggacggtgaatctttgctagcgttgtgcaagctggtcgataggtacttggctgaagttgcctctgatccaaatctctctgtttcgagctttgtggatttggcgacttccatgcctgaaacagccagaccgacacatgatggattgtacactgccattgacgtatatctgaagttgcatcccggcctacccaagatggagaagaggaagatttcgaacctgatggacgtgaggaagctgtccaagggggcgtgcatccacgcggcgcagaacgaccgactcccgctgcgcgtggtggtccaggtcctcttcttcgagcagctgcgcgccgcgggagccgccgccgccgctgggacgcccagcgccagcgtggcgcggtgcatagcgcgcctggcggagcaggaggaagaggaggagcgctggaacgacggccgcgcgctgccggagcccccgacccccggcgcgctgaagaggcagctggggagcctgaagctgcagggcgaccaccaccagggcgcgggcgacgacgggcggcgcctggtggcgcgcagcaacagcgtggccaaccagagcagccggatgtcgctgtcgtcgcggtcgcggaggatctttgacaggctgtgggtcggcggagcgaagctgcccggggaggccgccgccgcgggcaaggggtcgtcggacacgtccgggagctcgcagagcccgcggtcgtcggcgaagccgccggagtccaagtcgtccagctcgtcgtcaaggaaccggcggtactcggtctcgtaggccggggccgggggccggccggtcggcggcggaggctgtacagagaggaaggagagcctggtccaagcctaaacgtagctgctgctaactttcagagttcatgttgatctcgtgctgcctgcagtatgtggcatgcagctagaagaaatctttgttctgtcagtccagttgttctatctaatcttgagataatccctggtttctgtaacagacttggaaactatgattcagtcgaattctccatgaactgggcaatcctttttggcggctccaccactcgtgtcatgtgcttgat

SEQ ID NO: 82259 - DNA, 2167 bp, Zea Mays
cgccgtgaccgaacggcaacgcgtacatacgtgctgtcagaccttccgtcagacatcgtcgtccatgtcgacgacgcaaggttctacctgcacaagttcccccttctctccaagagcggtctgttacagaggctgatagtagaggcgagccagaacggcagcgacgaagttgccatacaagacgtccctggcggagcgaagaccttcgagatctgcgcgaagttctgctacggcatggtggtgaccctgaacgcgtacaacgtcgtcgccgcgaggtgcgcggcggagtaccttgggatgaccgaggacgtcgagaagagcaacctggtgttcaagatcgaggtgttcctgagctccggcatcttcaggagctggaaggactcgatcatcgcgctgcagaccaccgacgcgttgctgccgtggtcggaggagctcaagctggtcggcagatgcgtggactctgtcgctgccaaggctaccgtcagcgcgtcgaacgttgtgtggtcgtacacctacaacaggaagtctgcgtcctcggacgagatcgtcgaggctcgcaggagctcccaggcggttcccaaggactggtgggttgaggatctgtgtgagctcgatgtggacctctacaggcgtgtcatggttgcggtcaagtcgagggggaggatcccctccgatgccatcggagaggcgctcaaggcatacgccgctagatggctgcctgagtgctgtgacgcgctggtagacgacgcctactctggagcgtacaagcacctgctcgagaccatcgtctggcttttgccctcggacaaggggtcttcggggatctcctgtcgtttcttcctgaagctgctgaaattcactgtcctcgtcggcgctggggagctcctgaaggaagagctcatggacaggactgtgttgcagctccacaaggcctcggtcagtgatctcctgatcccctccaggcctccggcgcagaccgtctatgatgtccagctggttcagacactcatcggcaggtacatgagccatgccggggtatctcaaggtgggatttttctcaacgaccttgaccaggagatgtttgagacgaacgtggacggtgaatctttgctagcgttgtgcaagctggtcgataggtacttggctgaagttgcctctgatccaaatctctctgtttcgagctttgtggatttggcgacttccatgcctgaaacagccagaccgacacatgatggattgtacactgccattgacgtatatctgaagttgcatcccggcctacccaagatggagaagaggaagatttcgaacctgatggacgtgaggaagctgtccaagggggcgtgcatccacgcggcgcagaacgaccgactcccgctgcgcgtggtggtccaggtcctcttcttcgagcagctgcgcgccgcgggagccgccgccgccgctgggacgcccagcgccagcgtggcgcggtgcatagcgcgcctggcggagcaggaggaagaggaggagcgctggaacgacggccgcgcgctgccggagcccccgacccccggcgcgctgaagaggcagctggggagcctgaagctgcagggcgaccaccaccagggcgcgggcgacgacgggcggcgcctggtggcgcgcagcaacagcgtggccaaccagagcagccggatgtcgctgtcgtcgcggtcgcggaggatctttgacaggctgtgggtcggcggagcgaagctgcccggggaggccgccgccgcgggcaaggggtcgtcggacacgtccgggagctcgcagagcccgcggtcgtcggcgaagccgccggagtccaagtcgtccagctcgtcgtcaaggaaccggcggtactcggtctcgtaggccggggccgggggccggccggtcggcggcggaggctgtacagagaggaaggagagcctggtccaagcctaaacgtagctgctgctaactttcagagttcatgttgatctcgtgctgcctgcagtatgtggcatgcagctagaagaaatctttgttctgtcagtccagttgttctatctaatcttgagataatccctggtttctgtaacagacttggaaactatgattcagtcgaattctccatgaactgggcaatcctttttggcggctccaccactcgtgtcatgtgcttgat

SEQ ID NO: 82260 - DNA, 2137 bp, Zea Mays
acgcggcgcagaccaagcccaccccaatatggcgctgctcgccgccgcggcacgccgccaccaccgcctgctcctccgcacccgctttctcgccaccacttcctccacataccctctccctcccgaccccgtcccagaccccgaccccgaccccatcacccccgcgccgtcccccgtccgcactcccccggacgagcagttcgcggcgtgggtgacgcggctgcgcccgggctttaccgcgtccgatctcgccgcggctatcaccgccgaggaggacccggacctcgcgctcgcgctcttccgatgggccgcgctgcgcccggggttccggcacgcgcccgaatcctacctcgccgcgctcaccgcggcctcgtctggccgccgccccgccgcggccgaggccctcgtccacgacgtcttcgcgggggcctgcgcgcccgacctcaggctcttcaacgcctgcctccgcttctgctgcgcgcgccgcagcctgttccagctcgccttcgacatgttcaacaagatgcgcgccatgcccgccgccgcagggtgccgcccggacgtcgagacctacacgctcctcctcaccgcagtcgtccgccgcgtgcgccgcccgccggcgtcgatggtctacctccacgccgtccggtccctctaccgccagatgaaggcctccggcgtggttccggacaccttcctgctcaacctcatcatcaaggcctacgcgcggtgcgtggaggtagacgaggcgctcaaggtgttccgtgaaatgccgctgtacggctgtgaacccaacgagttcacgtacggctacattgtgaaggccatgtttcagaagggcaggtcggacaaggggatggagtactttgcagagatgagggagaaggggtttgtaccatccggaggcgtgtacatgatcgccgtgtcggcgctggcattggagtggaggtttgacgaatcaaggcgggtgctgctggatatgctggattgtggtaggaagccagatatgatcacctacaggacgctgctggaggagatgtgccgggctggacgcacggaggaggcatttgatgtgctggaggagctgaaagggaggaagcgagggacattggaccagaggatgtattcagaattgctcgatgggctgcactggatctcccagcctcgtcaaaacaacagccaacctgcgctcgataagggttctgatgattgaaaaatgttcaacgtattgtcttgtattattgtggcactgatggtcatccaaaatcaaatgcatggctggttttagttgagaagactggctggatctgcttgaagattcactatgaattgatgtaaatgagtcacccatctcacattagcgctacacaagcatgattgatgcacgacccaaggttcaaagaataccttatgggagcttgcgccataccgcgtcgtgcggagttcttctctccttccgctcgaagagaagagaaaaaagaacggtccgtgctcggctgccgtgaatctctctcacctccccgaagcaagcgagcggggcagcgcgccaggaaggatcggaggagacgccatcaatcagcacttgcacgcgcgcggtcggccgcaggtggaggaagaagatgggcctgtgctcgtgctgctgccggtgcctggagctgctgtgctcggtcctcctcccgcccctcggcgtctgcctccgccacggctgctgctccatggagttctggatcagtgtgctgctcaccatcctcggctacctccccggcgtcctctacgccgtgtacgtcatctgctccgtcgacccccaccgccaccgcgacaacgacgactacgtctacgtagcatgacaagatggaccggtccccgtggtgctctggtccgtgtctctgctgctacctccgtcctctgtgctgtgtgcatctttttgtttggtttagtaaactaaatccatcctgtggccttctgtaaactgtaaattcgtatgtcgaatctgacaatctggacggattcattccataaactaagatctggtgttgcgggatctgtggagttagttagggttactttgctacctcgttcagttgtgcttgtgaaatgaaactgcagatggttattaaatcccctgcattttccctca

SEQ ID NO: 82261 - DNA, 2048 bp, Zea Mays
cggctcgctagcctctctccctgttgagtccagtgaacccaacgcggcgcagaccaagcccaccccaatatggcgctgctcgccgccgcggcacgccgccaccaccgcctgctcctccgcacccgctttctcgccaccacttcctccacataccctctccctcccgaccccgtcccagaccccgaccccgaccccatcacccccgcgccgtcccccgtccgcactcccccggacgagcagttcgcggcgtgggtgacgcggctgcgcccgggctttaccgcgtccgatctcgccgcggctatcaccgccgaggaggacccggacctcgcgctcgcgctcttccgatgggccgcgctgcgcccggggttccggcacgcgcccgaatcctacctcgccgcgctcaccgcggcctcgtctggccgccgccccgccgcggccgaggccctcgtccacgacgtcttcgcgggggcctgcgcgcccgacctcaggctcttcaacgcctgcctccgcttctgctgcgcgcgccgcagcctgttccagctcgccttcgacatgttcaacaagatgcgcgccatgcccgccgccgcagggtgccgcccggacgtcgagacctacacgctcctcctcaccgcagtcgtccgccgcgtgcgccgcccgccggcgtcgatggtctacctccacgccgtccggtccctctaccgccagatgaaggcctccggcgtggttccggacaccttcctgctcaacctcatcatcaaggcctacgcgcggtgcgtggaggtagacgaggcgctcaaggtgttccgtgaaatgccgctgtacggctgtgaacccaacgagttcacgtacggctacattgtgaaggccatgtttcagaagggcaggtcggacaaggggatggagtactttgcagagatgagggagaaggggtttgtaccatccggaggcgtgtacatgatcgccgtgtcggcgctggcattggagtggaggtttgacgaatcaaggcgggtgctgctggatatgctggattgtggtaggaagccagatatgatcacctacaggacgctgctggaggagatgtgccgggctggacgcacggaggaggcatttgatgtgctggaggagctgaaagggaggaagcgagggacattggaccagaggatgtattcagaattgctcgatgggctgcactggatctcccagcctcgtcaaaacaacagccaacctgcgctcgataagggttctgatgattgaaaaatgttcaacgtattgtcttgtattattgtggcactgatggtcatccaaaatcaaatgcatggctggttttagttgagaagactggctggatctgcttgaagattcactatgaattgatgtaaatgagtcacccatctcacattagcgctacacaagcatgattgatgcacgacccaaggttcaaagaataccttatgggagatcgggatcagattgcttttggaagaatccagaagagcaagcaaatatcacatctagtcatgcacaaccgcctactattttggaagagggcctagtgttagtaatagtgaaacaaatggagtcagtcctcagactaatcagcctatcacttcttagatggaaactgatattgatgtgctctttgagaaggatgttgatttgtcgttgggaaatctgggccattgttgtcgctggaaactatcttttttccatcctacaacagtccctgtcaactacacattctcactaggatctacattctcactaggatctttgttctagtacttgatttgtctttgaatcactggagtgctccattacgtacaagtgatgattggctaagttctgaggtgatatgctccatcatgtacaaatgatgatttgaaaacatcagacatcacacattccaacaaaaaacaaaaaacttagagtccctttggaatgcagaaattttggaggattcatacaagaatttcacaggaatcaattcatttttgcaggaaaaacacttgaaacagaaagaattcccacattctaaagggagacttagc

SEQ ID NO: 82262 - DNA, 643 bp, Zea Mays
atggatggcccatgaaaggcgagcctgcctcgtcggccgtcgttccttttggcatttcacaaacgcagagacgtttctcctcgactccgcctcccccgctcctcaccgccgcgccgcctcgtccattgccgccgccgcatcaattgacccccggaccacgcgaatggccgctgaagactcaaaagatatcctaaagaagcgtctcccaaagaaaatcagagaagtccctgactgctattttctccctcgtcgatcatggccttctgcactggcaatctacggtgctgtatgtgctgctagctttggtgcagggatgcttcttgaggtttggataaacaaaaagatcaaagaggacagtggcattgtctgggagatggataaatgatgcaatgcatgctttgttgtggtgaatcccgcgttgtcatcatggacacagctagctctgaagatttctggtggaaattgacacaaccttgtttctgtatctggatctattatgcataatggcagaatgatgtcacaaacctttgagcctcattagtcgaataaactcaaattatccaaacagtataagaaactgttgttccggtgggcactgtcgcctatgcactggagaggagaacagggaaaagacttgggacag

SEQ ID NO: 82263 - DNA, 1063 bp, Zea Mays
gtaccggtggaattgctagagaatgggagagaatcaagggattgagcaagttcttggtaagttggttgaattgctgtcagcaagaagggacgaagctccatcttcaagtaaggaaaatattgtccatatagaaccagttcagaagctagagctgatgccaaatgaggttaaactggagggggtaaagaattatttggcttggtctaggagagccttgcgattgttgaaagcaaaaagactcgagggctatgttgatggaactgtcgttgagcccaaagacaagccaagtgctgaatggaaggattgggatgctataaactctttggtagcagcatggatgttaagttctatgatcccagcaattgctagcactattgatacaattataagtgctgcagaaatgtggaaagcgcttgaagaaatgtattcgggagctggaaatgttatgttgatggtggagactgaagatcgcctccataatatcaaacagggggagcgaactgtggcggagtatgttcaggaattgcagtgtttgtgggctgatgttgaccattatgatcctattgagctaccacactcagagtgtgttgtttgggcaaagaaatgggtggaaaaaagacgtgtgcttcaatttttaaggggtctaaacccagagtttgagggaagacgagcctccatgtttcatcaatccactcttcctagcctacaagaggcaatagctgctatatcccaggaggagtcacgactcaaagtgatgagggaaagtcctccagtgtcatctcaccctgtgttttcagctatgagaactaaagacgctagagagtgttacaattgtggtgatattggacacattgctcgtaattgtactaaacctttcaagtttaaccgcgggagaggaagaggggctgctagaggtggtagaggttgtggaggtagaagttgggcaagagctaatgcaacaactacaaaagaagaccttgagatctttatggagaatgaagctgaaacaaagtcgactgagcaacataaaattcctggaaataaaaatcaggagtcctacact

SEQ ID NO: 82264 - DNA, 1612 bp, Zea Mays
ttggtctcttccattcatcatgaagttcgtagctgaataacgggcgttggtgcattgcgcgatccgtgacattttaaaaaaaataaaaacaatggaaacccgtatcagttgataaggaatgaaatatggaacactgtacggttgtttttgcccatcctatttcctctttttgttcctttttgaatcaatcctgctttgtccatcttaagtttgttataagttatgtcgtgatgacttgtggtactggattttgtggcattaattgttaagctctagttgccactgcacctggatcaattgactatgtgatttgttcatatatgttagctccaatcccatgcttatgctcttatttgtagcatttcttcatatatctcaggcggtaattggtatgtttgtaaattttatgtatgaaggagaagaaacatgttattgatatgtaagacaagttgtcacatttaaatttaatatcttttatacattcacttacttacttgtaataataaaccacgattcactcggtaaaattgtaatcttcgtcttcgaaggagttatcccggagggattactgctttaagacgaagactgactgtctcttttaatattgtgttgccttgttttcaattgtgtatagcaattgagaacaagtaaccaacatttatgctcttatttgtaacatttcttcacatatctcaggcggtaattggggtgttgtaacatttgtttttatatcccaggcagtaaccgggatggtgcatatatgaggaattctaaatatatgccattgcttatgttcatgtttgaatatgttaccctatgtgtcaccccaaaacccatatgttcttagaatatgttgaaaacttgtacatagttatatcctgaagaattgaatgtattgacacccccttgcaaaaaaaagagaatatgttgttattgcgtgattatctgtctattttacatctgctatttgcggagttttggataactttggtttcagaatggcactgaagtctcaagatatcttgaaattgaatatgcattgctattatgtgactgtcctacatgttggttcctggaattctggttaccatttatacatactgtttcagaatggccgctgaagactcaaaagatatcctaaagaagcgtctcccaaagaaaatcagagaagtccctgactgctattttctccctcgtcgatcatggccttctgcactggcaatctacggtgctgtatgtgctgctagctttggtgcagggatgcttcttgaggtttggataaacaaaaagatcaaagaggacagtggcattgtctgggagatggataaatgatgcaatgcatgctttgttgtggtgaatcccgcgttgtcatcatggacacagctagctctgaagatttctggtggaaattgacacaaccttgtttctgtatctggatctattatgcataatggcagaatgatgtcacaaacctttgagcctcattagtcgaataaactcaaattatccaaacagtataagaaactgttgttccggtgggcactgtcgcctatgcactgcggtacatcaaattatcgtgcattcacctgtatgttaagcagaaactttattg

SEQ ID NO: 82265 - DNA, 1395 bp, Zea Mays
atggatggcccatgaaaggcgagcctgcctcgtcggccgtcgttccttttggcatttcacaaacgcagagacgtttctcctcgactccgcctcccccgctcctcaccgccgcgccgcctcgtccattgccgccgccgcatcaattgacccccggaccacgcggcggtaattggtatgtttgtaaattttatgtatgaaggagaagaaacatgttattgatatgtaagacaagttgtcacatttaaatttaatatcttttatacattcacttacttacttgtaataataaaccacgattcactcggtaaaattgtaatcttcgtcttcgaaggagttatcccggagggattactgctttaagacgaagactgactgtctcttttaatattgtgttgccttgttttcaattgtgtatagcaattgagaacaagtaaccaacatttatgctcttatttgtaacatttcttcacatatctcaggcggtaattggggtgttgtaacatttgtttttatatcccaggcagtaaccgggatggtgcatatatgaggaattctaaatatatgccattgcttatgttcatgtttgaatatgttaccctatgtgtcaccccaaaacccatatgttcttagaatatgttgaaaacttgtacatagttatatcctgaagaattgaatgtattgacacccccttgcaaaaaaaagagaatatgttgttattgcgtgattatctgtctattttacatctgctatttgcggagttttggataactttggtttcagaatggcactgaagtctcaagatatcttgaaattgaatatgcattgctattatgtgactgtcctacatgttggttcctggaattctggttaccatttatacatactgtttcagaatggccgctgaagactcaaaagatatcctaaagaagcgtctcccaaagaaaatcagagaagtccctgactgctattttctccctcgtcgatcatggccttctgcactggcaatctacggtgctgtatgtgctgctagctttggtgcagggatgcttcttgaggtttggataaacaaaaagatcaaagaggacagtggcattgtctgggagatggataaatgatgcaatgcatgctttgttgtggtgaatcccgcgttgtcatcatggacacagctagctctgaagatttctggtggaaattgacacaaccttgtttctgtatctggatctattatgcataatggcagaatgatgtcacaaacctttgagcctcattagtcgaataaactcaaattatccaaacagtataagaaactgttgttccggtgggcactgtcgcctatgcactgcggtacatcaaattatcgtgcattcacctgtatgttaagcagaaactttattg

SEQ ID NO: 82266 - DNA, 830 bp, Zea Mays
atggatggcccatgaaaggcgagcctgcctcgtcggccgtcgttccttttggcatttcacaaacgcagagacgtttctcctcgactccgcctcccccgctcctcaccgccgcgccgcctcgtccattgccgccgccgcatcaattgacccccggaccacgcggtatctggaacccgtctccatctccacttcttctcgcttatactctctgtttgttgtgttccgctgctactcgcttccccatcggttgcccactacacttctagtggaccggattgtcctgtctgcctaacaagtgatggttctgtttcgctccgagaacgacctaatggccgctgaagactcaaaagatatcctaaagaagcgtctcccaaagaaaatcagagaagtccctgactgctattttctccctcgtcgatcatggccttctgcactggcaatctacggtgctgtatgtgctgctagctttggtgcagggatgcttcttgaggtttggataaacaaaaagatcaaagaggacagtggcattgtctgggagatggataaatgatgcaatgcatgctttgttgtggtgaatcccgcgttgtcatcatggacacagctagctctgaagatttctggtggaaattgacacaaccttgtttctgtatctggatctattatgcataatggcagaatgatgtcacaaacctttgagcctcattagtcgaataaactcaaattatccaaacagtataagaaactgttgttccggtgggcactgtcgcctatgcactgcggtacatcaaattatcgtgcattcacctgtatgttaagcagaaactttattg

SEQ ID NO: 82267 - DNA, 3035 bp, Zea Mays
gtcctgtcaacgatccagatcgtcctgtcgccctcgtccttccaatccgggtatagggtttttagcgccgcctcccacctccaggtccccctctcttccgcggttccgccatcgcgtcgcgaacggcggccagaaaaaagaaaaagaaaaaaaaaacagctcgccgcaccaatctcccctaccatatcgatcgaccctgcaaggtttaatccaacagaattccaccggaaatttggtgaagtgctaatcgcttgcggcttgcctgcccggtctcgtggctttgtgctgctcccgctgtggtgaggaaccctaggatggcgggggtttcgatggcggcggcgcctgagggggtgctgcaccgccggattgagtttcatcttgcacggagaccgcatggctctgtggcggtgggcggcggcgggttccggatggagacgctgaacccggacgccgctggtaaggtggggcccggggaggcggtcgggagcagcgagggggatgcgaggaggccggagaagggagacagtggcgggatcgatccggagctcagcgtcgcaaggatctacctcgggagaattggtgctggattggaaaatcttgggaatacctgctatctcaactcagttctgcaatgcttgacgtacacggagccgttcgctgcctatttgcagagcgggaagcacacgtcctcatgtcgcacatccggattttgtgcattatgtgctcttcagatacatgtcaagactgctctagaatcaactggaaaaatagtgacaccatttcgtattgtcaagaacttgcgctgcatttctcgcactttccgaaattcaagacaagaagatgcacacgagttaatggttaatttgcttgaatccatgcataaatgctgtttaccttctggggtatcgactgagtctcaaagtgcttatgacaaaagcttagttcacaaaatatttggtggccgccttagaagtcaggtcaaatgcacacgttgcttacattgctccaataaatttgatcctttcttggatctcagtcttgagattgccaaggccacgactttggtgcgggcacttgaaaattttaccgaggatgagctactagacgagggtcaaaaggaatacgagtgtgaacgctgcaggcagaaagttgtagcaaagaaacgacttacaattgataaagcccccaatgtcttgacaattcatctgaagcgcttcagccctttcaatcctcgtgagaagattgacaaaaaagtggacttccaatcaattcttgatttgaaaccatttgttagtgactctaaaggaacagattttaaatacagcctttatggtgtcctagtccatacaggttggagcactcaatcaggccattactattgctacgttcgtacatccagcgggatgtggcacaatcttgatgataaagaggtgcgccaagttcgtgaagcagacgtattgaagcagaaggcttatatgttattttatgtacgtaacagtattgggaagtcggtggtgtgcaaagataataatgctgctaatttgctcaagaagaaaacctctgaaaaaatctcaagtttgaatggtattgcacaaaccaatgtaagagcacaaaatttgaatggtgtgtctccatttggtgataagacgcacggcacaatcattggctactctacaatttccagcaagactaaaacaatccactgttcaaagaatgaggtcaaagctgaagatgctccagcctctcaaaacaatgctctaccttccacacaagcccccatagctcgaaatgatgttggtatcttgccaactaaaccaatgcagtttgctgtaaaaaatgaggagaaaacctcatcccaccaacctgcgccatttacaaatacttgtggtgaacaaacagttgttgggaggcccttgcaggaaatggaacctaaggctggtgcaggggaaaatacttctgttgtctctgctgttgctaatgatgccgctacattgtccaaggcagacaaactaacttctcagcctcaaacagctccatcttccaagccaactgccaatgtaaaggacacagctactgagtttgctacactgtctttatcaaagaaggattctgttgtttcaaatggtgctgtgcttagcattggatgtctcacatccggtgagaaagcaatgaacttatcagaatctgtggatcaagctaatgaaatcacaaaggcacttcctacgagtcagaacaatactgcaccagtaattgctcaagcagattgtggagtagagatcagctctggtgtcatcatgcacgttgctgtgtctgcttcatgcaatggaactacagagaaaaaggtgaattcgaagtcaaagaagtttgtgaggtatcctgttgtgaacatgtggttagggtccagacatctaaagccagggaagaaagcgaaccgcaagagaagtaaaatgataagacgtgttgtagcctgcaaggacgcggcaaatttatcttgtttgagtgagcagctgacgtcaacatcgtccactgcatgctctgaaaccgtagaatgtacctccagccatcagaaacggtcacatgctagtgcaaggtccaaagatgacgcccagtcctcgcaaaacaagcagaaggtcgacggagctcgtgtcggtgctggcacaagtgcaccttcttgcagtgccggcgttccaaagtctgatccgaacccttccacagatgctaaggttgtagcgacccagcctgccagtattcgcgcaacggacctgatggaagctaccgttccgcgctgggatgacgtagacatgccaaacataaaggtcgctgagccgcagtccaaacgcaagagcggtggctacatcttagatgagtgggacgaggagtacgaccgagggaagacgaagaaggtgcggaggtcaaagcaagactttggcgggccaaacccgttccaggaggaggcggactacgtatcgcagcggaggacgaagcagaaatcctaccgaggtgatcccacccgttaatggcgagcggggcagtac

SEQ ID NO: 82268 - DNA, 2482 bp, Zea Mays
cgcctggatgattaggcgatgccttaaggaccattattatctccatatcagaaacctttatatattgctgaactgagctttctgtttcaatgttgttcatgcaagttagtcaatttgttggtttaggaatttagaaagtgttcctgtagatttattcatggttacctgtcattgatgtcacttactatcctgttttgatacattacttttgtttattttgatgaaaaagaaccattggctagattagcaacaaatgagagaagaattgcctcatgtgttgagctacattgtgtcatgtgctactttcactttttgccctttggctctttggcagactatagtctttcctgaatcccgatactgattcttatgggcatcaactacaggtgcgccaagttcgtgaagcagacgtattgaagcagaaggcttatatgttattttatgtacgtaacagtattgggaagtcggtggtgtgcaaagataataatgctgctaatttgctcaagaagaaaacctctgaaaaaatctcaagtttgaatggtattgcacaaaccaatgtaagagcacaaaatttgaatggtgtgtctccatttggtgataagacgcacggcacaatcattggctactctacaatttccagcaagactaaaacaatccactgttcaaagaatgaggtcaaagctgaagatgctccagcctctcaaaacaatgctctaccttccacacaagcccccatagctcgaaatgatgttggtatcttgccaactaaaccaatgcagtttgctgtaaaaaatgaggagaaaacctcatcccaccaacctgcgccatttacaaatacttgtggtgaacaaacagttgttgggaggcccttgcaggaaatggaacctaaggctggtgcaggggaaaatacttctgttgtctctgctgttgctaatgatgccgctacattgtccaaggcagacaaactaacttctcagcctcaaacagctccatcttccaagccaactgccaatgattctgttgtttcaaatggtgctgtgcttagcattggatgtctcacatccggtgagaaagcaatgaacttatcagaatctgtggatcaagctaatgaaatcacaaaggcacttcctacgagtcagaacaatactgcaccagtaattgctcaagcagattgtggagtagagatcagctctggtgtcatcatgcacgttgctgtgtctgcttcatgcaatggaactacagagaaaaaggtgaattcgaagtcaaagaagtttgtgaggtatcctgttgtgaacatgtggttagggtccagacatctaaagccagggaagaaagcgaaccgcaagagaagtaaaatgataagacgtgttgtagcctgcaaggacgcggcaaatttatcttgtttgagtgagcagctgacgtcaacatcgtccactgcatgctctgaaaccgtagaatgtacctccagccatcagaaacggtcacatgctagtgcaaggtccaaagatgacgcccagtcctcgcaaaacaagcagaaggtcgacggagctcgtgtcggtgctggcacaagtgcaccttcttgcagtgccggcgttccaaagtctgatccgaacccttccacagatgctaaggttgtagcgacccagcctgccagtattcgcgcaacggacctgatggaagctaccgttccgcgctgggatgacgtagacatgccaaacataaaggtcgctgagccgcagtccaaacgcaagagcggtggctacatcttagatgagtgggacgaggagtacgaccgagggaagacgaagaaggtgcggaggtcaaagcaagactttggcgggccaaacccgttccaggaggaggcggactacgtatcgcagcggaggacgaagcagaaatcctaccgaggcaagtcttggaacaagcgggcctaacacggtagagaggggggagttgagagaatacgagagagagagagagagagagagaatccccggacgcacatgctgtttgttgttacgttttagcacccattggtgagggagatttacgtttaaaaaccatatccgtcgtcggtacggtagtccccattagttgtcgacgatgtgacgttttgggcagttttcgtagaacatttgaaacatttgttcggttgtaacggagtgctgtttagttgagttggggggaacaaaattggcgagactattttgctgcattctgctctgctgtttttagttactgatgaagaataaaacgatggtggtgatcagttttatgattcagtgcttgccaatgcgatctttatccttttgggaaggaaaaaaaaaatccatctttgcaatttggaatgtaattctcctcctttttctttttgactgtgctgtaactgtaagtgcagtagaaggccgcaaggcaaggaaaccagaccggtggcgcggtgttgtagttgtagctggcgatcccacttgtttttattgttttt

SEQ ID NO: 82269 - DNA, 2401 bp, Zea Mays
cgcctggatgattaggcgatgccttaaggaccattattatctccatatcagaaacctttatatattgctgaactgagctttctgtttcaatgttgttcatgcaagttagtcaatttgttggtttaggaatttagaaagtgttcctgtagatttattcatggttacctgtcattgatgtcacttactatcctgttttgatacattacttttgtttattttgatgaaaaagaaccattggctagattagcaacaaatgagagaagaattgcctcatgtgttgagctacattgtgtcatgtgctactttcactttttgccctttggctctttggcagactatagtctttcctgaatcccgatactgattcttatgggcatcaactacaggtgcgccaagttcgtgaagcagacgtattgaagcagaaggcttatatgttattttatgtacgtaacagtattgggaagtcggtggtgtgcaaagataataatgctgctaatttgctcaagaagaaaacctctgaaaaaatctcaagtttgaatggtattgcacaaaccaatgtaagagcacaaaatttgaatggtgtgtctccatttggtgataagacgcacggcacaatcattggctactctacaatttccagcaagactaaaacaatccactgttcaaagaatgaggtcaaagctgaagatgctccagcctctcaaaacaatgctctaccttccacacaagcccccatagctcgaaatgatgttggtatcttgccaactaaaccaatgcagtttgctgtaaaaaatgaggagaaaacctcatcccaccaacctgcgccatttacaaatacttgtggtgaacaaacagttgttgggaggcccttgcaggaaatggaacctaaggctggtgcaggggaaaatacttctgttgtctctgctgttgctaatgatgccgctacattgtccaaggcagacaaactaacttctcagcctcaaacagctccatcttccaagccaactgccaatgtaaaggacacagctactgagtttgctacactgtctttatcaaagaaggattctgttgtttcaaatggtgctgtgcttagcattggatgtctcacatccggtgagaaagcaatgaacttatcagaatctgtggatcaagctaatgaaatcacaaaggcacttcctacgagtcagaacaatactgcaccagtaattgctcaagcagattgtggagtagagatcagctctggtgtcatcatgcacgttgctgtgtctgcttcatgcaatggaactacagagaaaaaggtgaattcgaagtcaaagaagtttgtgaggtatcctgttgtgaacatgtggttagggtccagacatctaaagccagggaagaaagcgaaccgcaagagaagtaaaatgataagacgtgttgtagcctgcaaggacgcggcaaatttatcttgtttgagtgagcagctgacgtcaacatcgtccactgcatgctctgaaaccgtagaatgtacctccagccatcagaaacggtcacatgctagtgcaaggtccaaagatgacgcccagtcctcgcaaaacaagcagaaggtcgacggagctcgtgtcggtgctggcacaagtgcaccttcttgcagtgccggcgttccaaagtctgatccgaacccttccacagatgctaaggttgtagcgacccagcctgccagtattcgcgcaacggacctgatggaagctaccgttccgcgctgggatgacgtagacatgccaaacccgttccaggaggaggcggactacgtatcgcagcggaggacgaagcagaaatcctaccgaggcaagtcttggaacaagcgggcctaacacggtagagaggggggagttgagagaatacgagagagagagagagagagagagaatccccggacgcacatgctgtttgttgttacgttttagcacccattggtgagggagatttacgtttaaaaaccatatccgtcgtcggtacggtagtccccattagttgtcgacgatgtgacgttttgggcagttttcgtagaacatttgaaacatttgttcggttgtaacggagtgctgtttagttgagttggggggaacaaaattggcgagactattttgctgcattctgctctgctgtttttagttactgatgaagaataaaacgatggtggtgatcagttttatgattcagtgcttgccaatgcgatctttatccttttgggaaggaaaaaaaaaatccatctttgcaatttggaatgtaattctcctcctttttctttttgactgtgctgtaactgtaagtgcagtagaaggccgcaaggcaaggaaaccagaccggtggcgcggtgttgtagttgtagctggcgatcccacttgtttttattgttttt

SEQ ID NO: 82270 - DNA, 2149 bp, Zea Mays
gtctagtgcgccaagttcgtgaagcagacgtattgaagcagaaggcttatatgttattttatgtacgtaacagtattgggaagtcggtggtgtgcaaagataataatgctgctaatttgctcaagaagaaaacctctgaaaaaatctcaagtttgaatggtattgcacaaaccaatgtaagagcacaaaatttgaatggtgtgtctccatttggtgataagacgcacggcacaatcattggctactctacaatttccagcaagactaaaacaatccactgttcaaagaatgaggtcaaagctgaagatgctccagcctctcaaaacaatgctctaccttccacacaagcccccatagctcgaaatgatgttggtatcttgccaactaaaccaatgcagtttgctgtaaaaaatgaggagaaaacctcatcccaccaacctgcgccatttacaaatacttgtggtgaacaaacagttgttgggaggcccttgcaggaaatggaacctaaggctggtgcaggggaaaatacttctgttgtctctgctgttgctaatgatgccgctacattgtccaaggcagacaaactaacttctcagcctcaaacagctccatcttccaagccaactgccaatgtaaaggacacagctactgagtttgctacactgtctttatcaaagaaggattctgttgtttcaaatggtgctgtgcttagcattggatgtctcacatccggtgagaaagcaatgaacttatcagaatctgtggatcaagctaatgaaatcacaaaggcacttcctacgagtcagaacaatactgcaccagtaattgctcaagcagattgtggagtagagatcagctctggtgtcatcatgcacgttgctgtgtctgcttcatgcaatggaactacagagaaaaaggtgaattcgaagtcaaagaagtttgtgaggtatcctgttgtgaacatgtggttagggtccagacatctaaagccagggaagaaagcgaaccgcaagagaagtaaaatgataagacgtgttgtagcctgcaaggacgcggcaaatttatcttgtttgagtgagcagctgacgtcaacatcgtccactgcatgctctgaaaccgtagaatgtacctccagccatcagaaacggtcacatgctagtgcaaggtccaaagatgacgcccagtcctcgcaaaacaagcagaaggtcgacggagctcgtgtcggtgctggcacaagtgcaccttcttgcagtgccggcgttccaaagtctgatccgaacccttccacagatgctaaggttgtagcgacccagcctgccagtattcgcgcaacggacctgatggaagctaccgttccgcgctgggatgacgtagacatgccaaacataaaggtcgctgagccgcagtccaaacgcaagagcggtggctacatcttagatgagtgggacgaggagtacgaccgagggaagacgaagaaggtgcggaggtcaaagcaagactttggcgggccaaacccgttccaggaggaggcggactacgtatcgcagcggaggacgaagcagaaatcctaccgaggcaagtcttggaacaagcgggcctaacacggtagagaggggggagttgagagaatacgagagagagagagagagagagagaatccccggacgcacatgctgtttgttgttacgttttagcacccattggtgagggagatttacgtttaaaaaccatatccgtcgtcggtacggtagtccccattagttgtcgacgatgtgacgttttgggcagttttcgtagaacatttgaaacatttgttcggttgtaacggagtgctgtttagttgagttggggggaacaaaattggcgagactattttgctgcattctgctctgctgtttttagttactgatgaagaataaaacgatggtggtgatcagttttatgattcagtgcttgccaatgcgatctttatccttttgggaaggaaaaaaaaaatccatctttgcaatttggaatgtaattctcctcctttttctttttgactgtgctgtaactgtaagtgcagtagaaggccgcaaggcaaggaaaccagaccggtggcgcggtgttgtagttgtagctggcgatcccacttgtttttattgttttt

SEQ ID NO: 82271 - DNA, 3538 bp, Zea Mays
gtcctgtcaacgatccagatcgtcctgtcgccctcgtccttccaatccgggtatagggtttttagcgccgcctcccacctccaggtccccctctcttccgcggttccgccatcgcgtcgcgaacggcggccagaaaaaagaaaaagaaaaaaaaaacagctcgccgcaccaatctcccctaccatatcgatcgaccctgcaaggtttaatccaacagaattccaccggaaatttggtgaagtgctaatcgcttgcggcttgcctgcccggtctcgtggctttgtgctgctcccgctgtggtgaggaaccctaggatggcgggggtttcgatggcggcggcgcctgagggggtgctgcaccgccggattgagtttcatcttgcacggagaccgcatggctctgtggcggtgggcggcggcgggttccggatggagacgctgaacccggacgccgctggtaaggtggggcccggggaggcggtcgggagcagcgagggggatgcgaggaggccggagaagggagacagtggcgggatcgatccggagctcagcgtcgcaaggatctacctcgggagaattggtgctggattggaaaatcttgggaatacctgctatctcaactcagttctgcaatgcttgacgtacacggagccgttcgctgcctatttgcagagcgggaagcacacgtcctcatgtcgcacatccggattttgtgcattatgtgctcttcagatacatgtcaagactgctctagaatcaactggaaaaatagtgacaccatttcgtattgtcaagaacttgcgctatgcacacgagttaatggttaatttgcttgaatccatgcataaatgctgtttaccttctggggtatcgactgagtctcaaagtgcttatgacaaaagcttagttcacaaaatatttggtggccgccttagaagtcaggtcaaatgcacacgttgcttacattgctccaataaatttgatcctttcttggatctcagtcttgagattgccaaggccacgactttggtgcgggcacttgaaaattttaccgaggatgagctactagacgagggtcaaaaggaatacgagtgtgaacgctgcaggcagaaagttgtagcaaagaaacgacttacaattgataaagcccccaatgtcttgacaattcatctgaagcgcttcagccctttcaatcctcgtgagaagattgacaaaaaagtggacttccaatcaattcttgatttgaaaccatttgttagtgactctaaaggaacagattttaaatacagcctttatggtgtcctagtccatacaggttggagcactcaatcaggccattactattgctacgttcgtacatccagcgggatgtggcacaatcttgatgataaagaggtgcgccaagttcgtgaagcagacgtattgaagcagaaggcttatatgttattttatgtacgtaacagtattgggaagtcggtggtgtgcaaagataataatgctgctaatttgctcaagaagaaaacctctgaaaaaatctcaagtttgaatggtattgcacaaaccaatgtaagagcacaaaatttgaatggtgtgtctccatttggtgataagacgcacggcacaatcattggctactctacaatttccagcaagactaaaacaatccactgttcaaagaatgaggtcaaagctgaagatgctccagcctctcaaaacaatgctctaccttccacacaagcccccatagctcgaaatgatgttggtatcttgccaactaaaccaatgcagtttgctgtaaaaaatgaggagaaaacctcatcccaccaacctgcgccatttacaaatacttgtggtgaacaaacagttgttgggaggcccttgcaggaaatggaacctaaggctggtgcaggggaaaatacttctgttgtctctgctgttgctaatgatgccgctacattgtccaaggcagacaaactaacttctcagcctcaaacagctccatcttccaagccaactgccaatgtaaaggacacagctactgagtttgctacactgtctttatcaaagaaggattctgttgtttcaaatggtgctgtgcttagcattggatgtctcacatccggtgagaaagcaatgaacttatcagaatctgtggatcaagctaatgaaatcacaaaggcacttcctacgagtcagaacaatactgcaccagtaattgctcaagcagattgtggagtagagatcagctctggtgtcatcatgcacgttgctgtgtctgcttcatgcaatggaactacagagaaaaaggtgaattcgaagtcaaagaagtttgtgaggtatcctgttgtgaacatgtggttagggtccagacatctaaagccagggaagaaagcgaaccgcaagagaagtaaaatgataagacgtgttgtagcctgcaaggacgcggcaaatttatcttgtttgagtgagcagctgacgtcaacatcgtccactgcatgctctgaaaccgtagaatgtacctccagccatcagaaacggtcacatgctagtgcaaggtccaaagatgacgcccagtcctcgcaaaacaagcagaaggtcgacggagctcgtgtcggtgctggcacaagtgcaccttcttgcagtgccggcgttccaaagtctgatccgaacccttccacagatgctaaggttgtagcgacccagcctgccagtattcgcgcaacggacctgatggaagctaccgttccgcgctgggatgacgtagacatgccaaacataaaggtcgctgagccgcagtccaaacgcaagagcggtggctacatcttagatgagtgggacgaggagtacgaccgagggaagacgaagaaggtgcggaggtcaaagcaagactttggcgggccaaacccgttccaggaggaggcggactacgtatcgcagcggaggacgaagcagaaatcctaccgaggcaagtcttggaacaagcgggcctaacacggtagagaggggggagttgagagaatacgagagagagagagagagagagagaatccccggacgcacatgctgtttgttgttacgttttagcacccattggtgagggagatttacgtttaaaaaccatatccgtcgtcggtacggtagtccccattagttgtcgacgatgtgacgttttgggcagttttcgtagaacatttgaaacatttgttcggttgtaacggagtgctgtttagttgagttggggggaacaaaattggcgagactattttgctgcattctgctctgctgtttttagttactgatgaagaataaaacgatggtggtgatcagttttatgattcagtgcttgccaatgcgatctttatccttttgggaaggaaaaaaaaaatccatctttgcaatttggaatgtaattctcctcctttttctttttgactgtgctgtaactgtaagtgcagtagaaggccgcaaggcaaggaaaccagaccggtggcgcggtgttgtagttgtagctggcgatcccacttgtttttattgttttt

SEQ ID NO: 82272 - DNA, 3537 bp, Zea Mays
gtcctgtcaacgatccagatcgtcctgtcgccctcgtccttccaatccgggtatagggtttttagcgccgcctcccacctccaggtccccctctcttccgcggttccgccatcgcgtcgcgaacggcggccagaaaaaagaaaaagaaaaaaaaaacagctcgccgcaccaatctcccctaccatatcgatcgaccctgcaaggtttaatccaacagaattccaccggaaatttggtgaagtgctaatcgcttgcggcttgcctgcccggtctcgtggctttgtgctgctcccgctgtggtgaggaaccctaggatggcgggggtttcgatggcggcggcgcctgagggggtgctgcaccgccggattgagtttcatcttgcacggagaccgcatggctctgtggcggtgggcggcggcgggttccggatggagacgctgaacccggacgccgctggtaaggtggggcccggggaggcggtcgggagcagcgagggggatgcgaggaggccggagaagggagacagtggcgggatcgatccggagctcagcgtcgcaaggatctacctcgggagaattggtgctggattggaaaatcttgggaatacctgctatctcaactcagttctgcaatgcttgacgtacacggagccgttcgctgcctatttgcagagcgggaagcacacgtcctcatgtcgcacatccggattttgtgcattatgtgctcttcagatacatgtcaagactgctctagaatcaactggaaaaatagtgacaccatttcgtattgtcaagaacttgcgctgcatttctcgcactttccgaaattcaagacaagaagatgcacacgagttaatggttaatttgcttgaatccatgcataaatgctgtttaccttctggggtatcgactgagtctcaaagtgcttatgacaaaagcttagttcacaaaatatttggtggccgccttagaagtcaggtcaaatgcacacgttgcttacattgctccaataaatttgatcctttcttggatctcagtcttgagattgccaaggccacgactttggtgcgggcacttgaaaattttaccgaggatgagctactagacgagggtcaaaaggaatacgagtgtgaacgctgcaggcagaaagttgtagcaaagaaacgacttacaattgataaagcccccaatgtcttgacaattcatctgaagcgcttcagccctttcaatcctcgtgagaagattgacaaaaaagtggacttccaatcaattcttgatttgaaaccatttgttagtgactctaaatccatacaggttggagcactcaatcaggccattactattgctacgttcgtacatccagcgggatgtggcacaatcttgatgataaagaggtgcgccaagttcgtgaagcagacgtattgaagcagaaggcttatatgttattttatgtacgtaacagtattgggaagtcggtggtgtgcaaagataataatgctgctaatttgctcaagaagaaaacctctgaaaaaatctcaagtttgaatggtattgcacaaaccaatgtaagagcacaaaatttgaatggtgtgtctccatttggtgataagacgcacggcacaatcattggctactctacaatttccagcaagactaaaacaatccactgttcaaagaatgaggtcaaagctgaagatgctccagcctctcaaaacaatgctctaccttccacacaagcccccatagctcgaaatgatgttggtatcttgccaactaaaccaatgcagtttgctgtaaaaaatgaggagaaaacctcatcccaccaacctgcgccatttacaaatacttgtggtgaacaaacagttgttgggaggcccttgcaggaaatggaacctaaggctggtgcaggggaaaatacttctgttgtctctgctgttgctaatgatgccgctacattgtccaaggcagacaaactaacttctcagcctcaaacagctccatcttccaagccaactgccaatgtaaaggacacagctactgagtttgctacactgtctttatcaaagaaggattctgttgtttcaaatggtgctgtgcttagcattggatgtctcacatccggtgagaaagcaatgaacttatcagaatctgtggatcaagctaatgaaatcacaaaggcacttcctacgagtcagaacaatactgcaccagtaattgctcaagcagattgtggagtagagatcagctctggtgtcatcatgcacgttgctgtgtctgcttcatgcaatggaactacagagaaaaaggtgaattcgaagtcaaagaagtttgtgaggtatcctgttgtgaacatgtggttagggtccagacatctaaagccagggaagaaagcgaaccgcaagagaagtaaaatgataagacgtgttgtagcctgcaaggacgcggcaaatttatcttgtttgagtgagcagctgacgtcaacatcgtccactgcatgctctgaaaccgtagaatgtacctccagccatcagaaacggtcacatgctagtgcaaggtccaaagatgacgcccagtcctcgcaaaacaagcagaaggtcgacggagctcgtgtcggtgctggcacaagtgcaccttcttgcagtgccggcgttccaaagtctgatccgaacccttccacagatgctaaggttgtagcgacccagcctgccagtattcgcgcaacggacctgatggaagctaccgttccgcgctgggatgacgtagacatgccaaacataaaggtcgctgagccgcagtccaaacgcaagagcggtggctacatcttagatgagtgggacgaggagtacgaccgagggaagacgaagaaggtgcggaggtcaaagcaagactttggcgggccaaacccgttccaggaggaggcggactacgtatcgcagcggaggacgaagcagaaatcctaccgaggcaagtcttggaacaagcgggcctaacacggtagagaggggggagttgagagaatacgagagagagagagagagagagagaatccccggacgcacatgctgtttgttgttacgttttagcacccattggtgagggagatttacgtttaaaaaccatatccgtcgtcggtacggtagtccccattagttgtcgacgatgtgacgttttgggcagttttcgtagaacatttgaaacatttgttcggttgtaacggagtgctgtttagttgagttggggggaacaaaattggcgagactattttgctgcattctgctctgctgtttttagttactgatgaagaataaaacgatggtggtgatcagttttatgattcagtgcttgccaatgcgatctttatccttttgggaaggaaaaaaaaaatccatctttgcaatttggaatgtaattctcctcctttttctttttgactgtgctgtaactgtaagtgcagtagaaggccgcaaggcaaggaaaccagaccggtggcgcggtgttgtagttgtagctggcgatcccacttgtttttattgttttt

SEQ ID NO: 82273 - DNA, 3506 bp, Zea Mays
gtcctgtcaacgatccagatcgtcctgtcgccctcgtccttccaatccgggtatagggtttttagcgccgcctcccacctccaggtccccctctcttccgcggttccgccatcgcgtcgcgaacggcggccagaaaaaagaaaaagaaaaaaaaaacagctcgccgcaccaatctcccctaccatatcgatcgaccctgcaaggtttaatccaacagaattccaccggaaatttggtgaagtgctaatcgcttgcggcttgcctgcccggtctcgtggctttgtgctgctcccgctgtggtgaggaaccctaggatggcgggggtttcgatggcggcggcgcctgagggggtgctgcaccgccggattgagtttcatcttgcacggagaccgcatggctctgtggcggtgggcggcggcgggttccggatggagacgctgaacccggacgccgctggtaaggtggggcccggggaggcggtcgggagcagcgagggggatgcgaggaggccggagaagggagacagtggcgggatcgatccggagctcagcgtcgcaaggatctacctcgggagaattggtgctggattggaaaatcttgggaatacctgctatctcaactcagttctgcaatgcttgacgtacacggagccgttcgctgcctatttgcagagcgggaagcacacgtcctcatgtcgcacatccggattttgtgcattatgtgctcttcagatacatgtcaagactgctctagaatcaactggaaaaatagtgacaccatttcgtattgtcaagaacttgcgctgcatttctcgcactttccgaaattcaagacaagaagatgcacacgagttaatggttaatttgcttgaatccatgcataaatgctgtttaccttctggggtatcgactgagtctcaaagtgcttatgacaaaagcttagttcacaaaatatttggtggccgccttagaagtcaggtcaaatgcacacgttgcttacattgctccaataaatttgatcctttcttggatctcagtcttgagattgccaaggccacgactttggtgcgggcacttgaaaattttaccgaggatgagctactagacgagggtcaaaaggaatacgagtgtgaacgctgcaggcagaaagttgtagcaaagaaacgacttacaattgataaagcccccaatgtcttgacaattcatctgaagcgcttcagccctttcaatcctcgtgagaagattgacaaaaaagtggacttccaatcaattcttgatttgaaaccatttgttagtgactctaaaggaacagattttaaatacagcctttatggtgtcctagtccatacaggttggagcactcaatcaggccattactattgctacgttcgtacatccagcgggatgtggcacaatcttgatgataaagagtattgggaagtcggtggtgtgcaaagataataatgctgctaatttgctcaagaagaaaacctctgaaaaaatctcaagtttgaatggtattgcacaaaccaatgtaagagcacaaaatttgaatggtgtgtctccatttggtgataagacgcacggcacaatcattggctactctacaatttccagcaagactaaaacaatccactgttcaaagaatgaggtcaaagctgaagatgctccagcctctcaaaacaatgctctaccttccacacaagcccccatagctcgaaatgatgttggtatcttgccaactaaaccaatgcagtttgctgtaaaaaatgaggagaaaacctcatcccaccaacctgcgccatttacaaatacttgtggtgaacaaacagttgttgggaggcccttgcaggaaatggaacctaaggctggtgcaggggaaaatacttctgttgtctctgctgttgctaatgatgccgctacattgtccaaggcagacaaactaacttctcagcctcaaacagctccatcttccaagccaactgccaatgtaaaggacacagctactgagtttgctacactgtctttatcaaagaaggattctgttgtttcaaatggtgctgtgcttagcattggatgtctcacatccggtgagaaagcaatgaacttatcagaatctgtggatcaagctaatgaaatcacaaaggcacttcctacgagtcagaacaatactgcaccagtaattgctcaagcagattgtggagtagagatcagctctggtgtcatcatgcacgttgctgtgtctgcttcatgcaatggaactacagagaaaaaggtgaattcgaagtcaaagaagtttgtgaggtatcctgttgtgaacatgtggttagggtccagacatctaaagccagggaagaaagcgaaccgcaagagaagtaaaatgataagacgtgttgtagcctgcaaggacgcggcaaatttatcttgtttgagtgagcagctgacgtcaacatcgtccactgcatgctctgaaaccgtagaatgtacctccagccatcagaaacggtcacatgctagtgcaaggtccaaagatgacgcccagtcctcgcaaaacaagcagaaggtcgacggagctcgtgtcggtgctggcacaagtgcaccttcttgcagtgccggcgttccaaagtctgatccgaacccttccacagatgctaaggttgtagcgacccagcctgccagtattcgcgcaacggacctgatggaagctaccgttccgcgctgggatgacgtagacatgccaaacataaaggtcgctgagccgcagtccaaacgcaagagcggtggctacatcttagatgagtgggacgaggagtacgaccgagggaagacgaagaaggtgcggaggtcaaagcaagactttggcgggccaaacccgttccaggaggaggcggactacgtatcgcagcggaggacgaagcagaaatcctaccgaggcaagtcttggaacaagcgggcctaacacggtagagaggggggagttgagagaatacgagagagagagagagagagagagaatccccggacgcacatgctgtttgttgttacgttttagcacccattggtgagggagatttacgtttaaaaaccatatccgtcgtcggtacggtagtccccattagttgtcgacgatgtgacgttttgggcagttttcgtagaacatttgaaacatttgttcggttgtaacggagtgctgtttagttgagttggggggaacaaaattggcgagactattttgctgcattctgctctgctgtttttagttactgatgaagaataaaacgatggtggtgatcagttttatgattcagtgcttgccaatgcgatctttatccttttgggaaggaaaaaaaaaatccatctttgcaatttggaatgtaattctcctcctttttctttttgactgtgctgtaactgtaagtgcagtagaaggccgcaaggcaaggaaaccagaccggtggcgcggtgttgtagttgtagctggcgatcccacttgtttttattgttttt

SEQ ID NO: 82274 - DNA, 3301 bp, Zea Mays
gtcctgtcaacgatccagatcgtcctgtcgccctcgtccttccaatccgggtatagggtttttagcgccgcctcccacctccaggtccccctctcttccgcggttccgccatcgcgtcgcgaacggcggccagaaaaaagaaaaagaaaaaaaaaacagctcgccgcaccaatctcccctaccatatcgatcgaccctgcaaggtttaatccaacagaattccaccggaaatttggtgaagtgctaatcgctttggcgggatcgatccggagctcagcgtcgcaaggatctacctcgggagaattggtgctggattggaaaatcttgggaatacctgctatctcaactcagttctgcaatgcttgacgtacacggagccgttcgctgcctatttgcagagcgggaagcacacgtcctcatgtcgcacatccggattttgtgcattatgtgctcttcagatacatgtcaagactgctctagaatcaactggaaaaatagtgacaccatttcgtattgtcaagaacttgcgctgcatttctcgcactttccgaaattcaagacaagaagatgcacacgagttaatggttaatttgcttgaatccatgcataaatgctgtttaccttctggggtatcgactgagtctcaaagtgcttatgacaaaagcttagttcacaaaatatttggtggccgccttagaagtcaggtcaaatgcacacgttgcttacattgctccaataaatttgatcctttcttggatctcagtcttgagattgccaaggccacgactttggtgcgggcacttgaaaattttaccgaggatgagctactagacgagggtcaaaaggaatacgagtgtgaacgctgcaggcagaaagttgtagcaaagaaacgacttacaattgataaagcccccaatgtcttgacaattcatctgaagcgcttcagccctttcaatcctcgtgagaagattgacaaaaaagtggacttccaatcaattcttgatttgaaaccatttgttagtgactctaaaggaacagattttaaatacagcctttatggtgtcctagtccatacaggttggagcactcaatcaggccattactattgctacgttcgtacatccagcgggatgtggcacaatcttgatgataaagaggtgcgccaagttcgtgaagcagacgtattgaagcagaaggcttatatgttattttatgtacgtaacagtattgggaagtcggtggtgtgcaaagataataatgctgctaatttgctcaagaagaaaacctctgaaaaaatctcaagtttgaatggtattgcacaaaccaatgtaagagcacaaaatttgaatggtgtgtctccatttggtgataagacgcacggcacaatcattggctactctacaatttccagcaagactaaaacaatccactgttcaaagaatgaggtcaaagctgaagatgctccagcctctcaaaacaatgctctaccttccacacaagcccccatagctcgaaatgatgttggtatcttgccaactaaaccaatgcagtttgctgtaaaaaatgaggagaaaacctcatcccaccaacctgcgccatttacaaatacttgtggtgaacaaacagttgttgggaggcccttgcaggaaatggaacctaaggctggtgcaggggaaaatacttctgttgtctctgctgttgctaatgatgccgctacattgtccaaggcagacaaactaacttctcagcctcaaacagctccatcttccaagccaactgccaatgtaaaggacacagctactgagtttgctacactgtctttatcaaagaaggattctgttgtttcaaatggtgctgtgcttagcattggatgtctcacatccggtgagaaagcaatgaacttatcagaatctgtggatcaagctaatgaaatcacaaaggcacttcctacgagtcagaacaatactgcaccagtaattgctcaagcagattgtggagtagagatcagctctggtgtcatcatgcacgttgctgtgtctgcttcatgcaatggaactacagagaaaaaggtgaattcgaagtcaaagaagtttgtgaggtatcctgttgtgaacatgtggttagggtccagacatctaaagccagggaagaaagcgaaccgcaagagaagtaaaatgataagacgtgttgtagcctgcaaggacgcggcaaatttatcttgtttgagtgagcagctgacgtcaacatcgtccactgcatgctctgaaaccgtagaatgtacctccagccatcagaaacggtcacatgctagtgcaaggtccaaagatgacgcccagtcctcgcaaaacaagcagaaggtcgacggagctcgtgtcggtgctggcacaagtgcaccttcttgcagtgccggcgttccaaagtctgatccgaacccttccacagatgctaaggttgtagcgacccagcctgccagtattcgcgcaacggacctgatggaagctaccgttccgcgctgggatgacgtagacatgccaaacataaaggtcgctgagccgcagtccaaacgcaagagcggtggctacatcttagatgagtgggacgaggagtacgaccgagggaagacgaagaaggtgcggaggtcaaagcaagactttggcgggccaaacccgttccaggaggaggcggactacgtatcgcagcggaggacgaagcagaaatcctaccgaggcaagtcttggaacaagcgggcctaacacggtagagaggggggagttgagagaatacgagagagagagagagagagagagaatccccggacgcacatgctgtttgttgttacgttttagcacccattggtgagggagatttacgtttaaaaaccatatccgtcgtcggtacggtagtccccattagttgtcgacgatgtgacgttttgggcagttttcgtagaacatttgaaacatttgttcggttgtaacggagtgctgtttagttgagttggggggaacaaaattggcgagactattttgctgcattctgctctgctgtttttagttactgatgaagaataaaacgatggtggtgatcagttttatgattcagtgcttgccaatgcgatctttatccttttgggaaggaaaaaaaaaatccatctttgcaatttggaatgtaattctcctcctttttctttttgactgtgctgtaactgtaagtgcagtagaaggccgcaaggcaaggaaaccagaccggtggcgcggtgttgtagttgtagctggcgatcccacttgtttttattgttttt

SEQ ID NO: 82275 - DNA, 3494 bp, Zea Mays
gtcctgtcaacgatccagatcgtcctgtcgccctcgtccttccaatccgggtatagggtttttagcgccgcctcccacctccaggtccccctctcttccgcggttccgccatcgcgtcgcgaacggcggccagaaaaaagaaaaagaaaaaaaaaacagctcgccgcaccaatctcccctaccatatcgatcgaccctgcaaggtttaatccaacagaattccaccggaaatttggtgaagtgctaatcgcttgcggcttgcctgcccggtctcgtggctttgtgctgctcccgctgtggtgaggaaccctaggatggcgggggtttcgatggcggcggcgcctgagggggtgctgcaccgccggattgagtttcatcttgcacggagaccgcatggctctgtggcggtgggcggcggcgggttccggatggagacgctgaacccggacgccgctggtaaggtggggcccggggaggcggtcgggagcagcgagggggatgcgaggaggccggagaagggagacagtggcgggatcgatccggagctcagcgtcgcaaggatctacctcgggagaattggtgctggattggaaaatcttgggaatacctgctatctcaactcagttctgcaatgcttgacgtacacggagccgttcgctgcctatttgcagagcgggaagcacacgtcctcatgtcgcacatccggattttgtgcattatgtgctcttcagatacatgtcaagactgctctagaatcaactggaaaaatagtgacaccatttcgtattgtcaagaacttgcgctgcatttctcgcactttccgaaattcaagacaagaagatgcacacgagttaatggttaatttgcttgaatccatgcataaatgctgtttaccttctggggtatcgactgagtctcaaagtgcttatgacaaaagcttagttcacaaaatatttggtggccgccttagaagtcaggtcaaatgcacacgttgcttacattgctccaataaatttgatcctttcttggatctcagtcttgagattgccaaggccacgactttggtgcgggcacttgaaaattttaccgaggatgagctactagacgagggtcaaaaggaatacgagtgtgaacgctgcaggcagaaagttgtagcaaagaaacgacttacaattgataaagcccccaatgtcttgacaattcatctgaagcgcttcagccctttcaatcctcgtgagaagattgacaaaaaagtggacttccaatcaattcttgatttgaaaccatttgttagtgactctaaaggaacagattttaaatacagcctttatggtgtcctagtccatacaggtgcgccaagttcgtgaagcagacgtattgaagcagaaggcttatatgttattttatgtacgtaacagtattgggaagtcggtggtgtgcaaagataataatgctgctaatttgctcaagaagaaaacctctgaaaaaatctcaagtttgaatggtattgcacaaaccaatgtaagagcacaaaatttgaatggtgtgtctccatttggtgataagacgcacggcacaatcattggctactctacaatttccagcaagactaaaacaatccactgttcaaagaatgaggtcaaagctgaagatgctccagcctctcaaaacaatgctctaccttccacacaagcccccatagctcgaaatgatgttggtatcttgccaactaaaccaatgcagtttgctgtaaaaaatgaggagaaaacctcatcccaccaacctgcgccatttacaaatacttgtggtgaacaaacagttgttgggaggcccttgcaggaaatggaacctaaggctggtgcaggggaaaatacttctgttgtctctgctgttgctaatgatgccgctacattgtccaaggcagacaaactaacttctcagcctcaaacagctccatcttccaagccaactgccaatgtaaaggacacagctactgagtttgctacactgtctttatcaaagaaggattctgttgtttcaaatggtgctgtgcttagcattggatgtctcacatccggtgagaaagcaatgaacttatcagaatctgtggatcaagctaatgaaatcacaaaggcacttcctacgagtcagaacaatactgcaccagtaattgctcaagcagattgtggagtagagatcagctctggtgtcatcatgcacgttgctgtgtctgcttcatgcaatggaactacagagaaaaaggtgaattcgaagtcaaagaagtttgtgaggtatcctgttgtgaacatgtggttagggtccagacatctaaagccagggaagaaagcgaaccgcaagagaagtaaaatgataagacgtgttgtagcctgcaaggacgcggcaaatttatcttgtttgagtgagcagctgacgtcaacatcgtccactgcatgctctgaaaccgtagaatgtacctccagccatcagaaacggtcacatgctagtgcaaggtccaaagatgacgcccagtcctcgcaaaacaagcagaaggtcgacggagctcgtgtcggtgctggcacaagtgcaccttcttgcagtgccggcgttccaaagtctgatccgaacccttccacagatgctaaggttgtagcgacccagcctgccagtattcgcgcaacggacctgatggaagctaccgttccgcgctgggatgacgtagacatgccaaacataaaggtcgctgagccgcagtccaaacgcaagagcggtggctacatcttagatgagtgggacgaggagtacgaccgagggaagacgaagaaggtgcggaggtcaaagcaagactttggcgggccaaacccgttccaggaggaggcggactacgtatcgcagcggaggacgaagcagaaatcctaccgaggcaagtcttggaacaagcgggcctaacacggtagagaggggggagttgagagaatacgagagagagagagagagagagagaatccccggacgcacatgctgtttgttgttacgttttagcacccattggtgagggagatttacgtttaaaaaccatatccgtcgtcggtacggtagtccccattagttgtcgacgatgtgacgttttgggcagttttcgtagaacatttgaaacatttgttcggttgtaacggagtgctgtttagttgagttggggggaacaaaattggcgagactattttgctgcattctgctctgctgtttttagttactgatgaagaataaaacgatggtggtgatcagttttatgattcagtgcttgccaatgcgatctttatccttttgggaaggaaaaaaaaaatccatctttgcaatttggaatgtaattctcctcctttttctttttgactgtgctgtaactgtaagtgcagtagaaggccgcaaggcaaggaaaccagaccggtggcgcggtgttgtagttgtagctggcgatcccacttgtttttattgttttt

SEQ ID NO: 82276 - DNA, 404 bp, Zea Mays
ggggggtctataaaccaagcgccatgccttcccctagttcatccgctcggggtgtcacgcagttaaccaacgccagagaaggagtgcgttgggagagagagcagagcgcagcgatgaggagagcagtgagggccgccgctttggggacttcttcaacaacgccatatgggctcgggaatcaggccggtgaccttcgcggggtcgccgtggattcgtctgggaccgcgacgggtgagtccgagaactggggcaccgctaatcgctcgccggacgtctggcgcgctcaccaaatcactgttcgccgtggtccggtctctgcgccacccgattgccgacgagcaagccaccgtggaatctgaggttcagcaagtagagatagctgagcaggagctcattgaaggcaa

SEQ ID NO: 82277 - DNA, 688 bp, Zea Mays
tgttgttgcgtaaacgtatctgtgaaagtacatgttttgggtgtgtgggcagctccatcatccatggatcagcctccaggatgtcttcgtcgaactttgggggactagacggcgtgctgctcgagggcgtgtgcgtgtctgataggaacacatccgagttgttgtcagaccattctgcggcggtggcggcggcatcagcatcaccagcttctgcatctcgggggatttctggattgggttcgactttggtgtcatccacttcgtgttcctcctgtgcagatgtatcattggagagttgacctccttgaaagttcggtccagaaccagaagcctcaggttctggagaagaatgcacactggcaagagaagaatggttttcagcaggttctatgtgatgaatctggacagttctgctgctgtttccagctgatgcgctgctggttcctgtttcctctagagatggctgaaggcatcaccaaccttggaaaggctttctttctcctcgctagataaccctgatttgtgaactgctgtgcctatttccatatcagaaaatataacctacaattatcaggaaaacattatgtgtaagtaactgtatacaaaggtgaaatggcacaggcaatttaacacaataaaatgcaaaaattatccaattacctcaactctgaagtccacaggaaaccgg

SEQ ID NO: 82278 - DNA, 529 bp, Zea Mays
ctattaatgagtgcaatagaaatactccgatgtatcattggagagttgacctccttgaaagttcggtccagaaccagaagcctcaggttctggagaagaatgcacactggcaagagaagaatggttttcagcaggttctatgtgatgaatctggacagttctgctgctgtttccagctgatgcgctgctggttcctgtttcctctagaggtattttttcgaagccatcgtgttctgtctgtaatcccttctgttttgaatcttcgtttgtgatgtgaacgcttttgcttgaccattccagatggctgaaggcatcaccaaccttggaaaggctttctttctcctcgctagataaccctgatttgtgaactgctgtgcctatttccatatcagaaaatataacctacaattatcaggaaaacattatgtgtaagtaactgtatacaaaggtgaaatggcacaggcaatttaacacaataaaatgcaaaaattatccaattacctcaactctgaagtccacaggaaaccgg

SEQ ID NO: 82279 - DNA, 3097 bp, Zea Mays
gcgctgggttcgttcctgacctccgcccgccgctgccctcccccgcctcgtcgacaaatcacgccgcgccttttcttttcttttcttttctttctcagtttcaggtgttgttttgccactagctgctgcctgcctgctgccgccgccttttttccggctttcgcttttccgctctctgcaccagcctcaccctcccaaccgcgtctccgtccgctttctcttccgtcggggccggccgcacctcggacccatcaggtgctgctgtgctgggcgagttctcccccccttccttgcttttgtctggcattcgctcgctctagtttcgcgcaacccggccgccgccgcctcgggtttctcgcctgtggctttgagccgagaggttggggactcggtttccttcctgctctgagttgggtttcgcgcggctcggactttggccggcgggcgaataaaccggccggatgcttctgggcgctgcggccgcgaggatggaggagaagcgtgtgatcacggggagggagcgggaccagttccccgtcgggatgcgggtcctcgcggtcgacgacgaccccgtctgcctcaaggttctcgagaccctgctgcggcgctgccagtatcatgtaataacgaccaaccaggccatcaccgcgctgaagctgctaagggagaacagggacatgttcgatctggtcatcagcgacgtgcacatgcccgacatggacggattcaagctccttgagcttgtagggcttgagatggacctacctgtcatcatgttgtcagtgaacggggagacgaaatccgtgatgaaggggataacccatggcgcctgcgactatctcctgaaacccgtccgcatcgaagagctaaggaacatatggcagcacgtcgtcaggaggaagttcagcaagcgagagcgcagcaaccttgacgtctacaaagatttcaacaggctgccaggcgcggatccatgccacagccacggccacggccacggccagaccactgccggggcttccgaccagagcgggaggatcggcaggaagaggaaggaaatgcacagcgacgaggaggacgacggcgaggagaacgatttccaggagggcgacgagccctccgcggctaagaagccgagagtcgtctggtcgattgagctgcaccggaaattcgtcgcggccgtcaaccagcttgggattgataaagctgttccgaaaaggattcttgagcttatgaatgtggagaaactcaccagggaaaatgtcgcgagccatctacagaaatacaggctctatctgaaacggttaagtgctgtggcatcacagcaagctagcattgtcgccgcatttggaggtagagacccctttctccacatgggagcctttgaaggccttcagagctaccaacctttcgccccctgtgctgctctatcgtccttcatcccacaccacggctcgcttggtagaactaccgcggcagcattcggggtcccggagcttgctcctgccatcacagttcaagctgctgccagcaatggcatgataagccactgtgctggcgacgcaagcaagtttcagctctccggtatacaagaaaaccagcaaccaaatctgggacaaggctcggccacctctcttgggctgccccagctccaacagaagtggatccagcaagaaactggcgacttgtctgctgtcttctctgggagtgcactggctaacactctgtctggtgcactccagagagttgcgagcagtccattgccaccgcaagaacttttggagggcgtacaaaccaaagttagtgcccagccaccaataacaatggcatctgtgagttcagaacttgttgagaggactgttggagtttcggctaatttgcaggactccggtatatccccgcagggcactcttccaataaatgatggatttactgctgacaagttacagctgcaagatccattcgacagcaatggtggaacaaatttttcagtaaacatgcctgtttgtccctctggtagccttacagcatccagcaacgccaagggtggtgctagttcgtgcagtccagtgctgctcgctcctgatactgggagacattcaaactacttgcagtttggagttgcaggcaactctggacatgacatgaacgatattaaacaggaccatctgcatcaaggattgagcactggaggtttcaatcacgattttggcacctgtatgactgaacaaacagatccaaatgtgccgtatcttatgccacaaatgaagcctaacaccttgtcatcagaggataaactgaagcagaggaatatttatgatttggggattccaaagctccatggtggttttagctctagtagctgcaattttgatggtcttctcaattccatgatcaaagcggtatggacctttagctgccacagttatttctgtctgtttttagaaagaaaactcctacaacttttctacatgatttttttaaaaaaaattaacttgtactattatgttcaatgcttttttggtagtctttactcttagttttgtaagttacaaaaccttccctaaacttcaggcattggaaccatacctatctgacattctgtcccactaggaattcttgaaatgctacactcttgccaaaaaaaaaatgtagagccaaaacgaccccacaaaacatgtatgatccttcaaatccaatttgttgaaggcttgtttttattctaatgcaggaaaaggatgatctctcattcacggatagcgacctggggtgcgacttctttccactcggtgcttgcatatgagacctcttaacaacccctcgtgcagattggccctcgacgggatgggatgggactacggcctacgggagaggttgtaaagtacactgcttaggagcattggccagtttatgctgcctaatgtgttactatgcttggtactgtgcacactagaaatgctagggatacaggtagctacggacatgccttgtaatctacatttcctcctcttcgaatgggaaatgaaagtgattatggttaggtaaaaaggagcaagtataatgctccaaattaacatcatcttcatcttaaaattttacc

SEQ ID NO: 82280 - DNA, 3112 bp, Zea Mays
ctccgcgcgctctcgctcgccctgctacctccgcccgcggcttcctctcccacaagagccaactgtcgccgtcgccggtgcctgcctagtgccgccagccagccagtgctgttcccgcgtcctgggcagcttgcgttgccgttgcgtgcgttcccggccaccaccacctggactggactggacggtcgctgtcgcctctcgcctcgcctggccccgtccccacgtcccgttttcggtgtcgctgtcttttgggctctacccgggcccgtcgctctctccctacctcccttttcgctttcccaactcctgcctgccccggcgctcagcaccgaagcaatcatggaggcgcgctgggttcgttcctgacctccgcccgccgctgccctcccccgcctcgtcgacaaatcacgccgcgccttttcttttcttttcttttctttctcagtttcaggtgttgttttgccactagctgctgcctgcctgctgccgccgccttttttccggctttcgcttttccgctctctgcaccagcctcaccctcccaaccgcgtctccgtccgctttctcttccgtcggggccggccgcacctcggacccatcaggtgctgctgtgctgggcgagttctcccccccttccttgcttttgtctggcattcgctcgctctagtttcgcgcaacccggccgccgccgcctcgggtttctcgcctgtggctttgagccgagaggttggggactcggtttccttcctgctctgagttgggtttcgcgcggctcggactttggccggcgggcgaataaaccggccggatgcttctgggcgctgcggccgcgaggatggaggagaagcgtgtgatcacggggagggagcgggaccagttccccgtcgggatgcgggtcctcgcggtcgacgacgaccccgtctgcctcaaggttctcgagaccctgctgcggcgctgccagtatcatgtaataacgaccaaccaggccatcaccgcgctgaagctgctaagggagaacagggacatgttcgatctggtcatcagcgacgtgcacatgcccgacatggacggattcaagctccttgagcttgtagggcttgagatggacctacctgtcatcatgttgtcagtgaacggggagacgaaatccgtgatgaaggggataacccatggcgcctgcgactatctcctgaaacccgtccgcatcgaagagctaaggaacatatggcagcacgtcgtcaggaggaagttcagcaagcgagagcgcagcaaccttgacgtctacaaagatttcaacaggctgccaggcgcggatccatgccacagccacggccacggccacggccagaccactgccggggcttccgaccagagcgggaggatcggcaggaagaggaaggaaatgcacagcgacgaggaggacgacggcgaggagaacgatttccaggagggcgacgagccctccgcggctaagaagccgagagtcgtctggtcgattgagctgcaccggaaattcgtcgcggccgtcaaccagcttgggattgatactgttccgaaaaggattcttgagcttatgaatgtggagaaactcaccagggaaaatgtcgcgagccatctacagaaatacaggctctatctgaaacggttaagtgctgtggcatcacagcaagctagcattgtcgccgcatttggaggtagagacccctttctccacatgggagcctttgaaggccttcagagctaccaacctttcgccccctgtgctgctctatcgtccttcatcccacaccacggctcgcttggtagaactaccgcggcagcattcggggtcccggagcttgctcctgccatcacagttcaagctgctgccagcaatggcatgataagccactgtgctggcgacgcaagcaagtttcagctctccggtatacaagaaaaccagcaaccaaatctgggacaaggctcggccacctctcttgggctgccccagctccaacagaagtggatccagcaagaaactggcgacttgtctgctgtcttctctgggagtgcactggctaacactctgtctggtgcactccagagagttgcgagcagtccattgccaccgcaagaacttttggagggcgtacaaaccaaagttagtgcccagccaccaataacaatggcatctgtgagttcagaacttgttgagaggactgttggagtttcggctaatttgcaggactccggtatatccccgcagggcactcttccaataaatgatggatttactgctgacaagttacagctgcaagatccattcgacagcaatggtggaacaaatttttcagtaaacatgcctgtttgtccctctggtagccttacagcatccagcaacgccaagggtggtgctagttcgtgcagtccagtgctgctcgctcctgatactgggagacattcaaactacttgcagtttggagttgcaggcaactctggacatgacatgaacgatattaaacaggaccatctgcatcaaggattgagcactggaggtttcaatcacgattttggcacctgtatgactgaacaaacagatccaaatgtgccgtatcttatgccacaaatgaagcctaacaccttgtcatcagaggataaactgaagcagaggaatatttatgatttggggattccaaagctccatggtggttttagctctagtagctgcaattttgatggtcttctcaattccatgatcaaagcggaaaaggatgatctctcattcacggatagcgacctggggtgcgacttctttccactcggtgcttgcatatgagacctcttaacaacccctcgtgcagattggccctcgacgggatgggatgggactacggcctacgggagaggttgtaaagtacactgcttaggagcattggccagtttatgctgcctaatgtgttactatgcttggtactgtgcacactagaaatgctagggatacaggtagctacggacatgccttgtaatctacatttcctcctcttcgaatgggaaatgaaagtgattatggttaggtaaaaaggagcaagtataatgctccaaattaacatcatcttcatcttaaaattttacc

SEQ ID NO: 82281 - DNA, 1576 bp, Zea Mays
ggggcaaataaaggattaactcaaaagaaaatggtcttgcggtcttgctctccttcctcgtggtcggcggccggtgcagctgtagccacgcgcgcctcggcaaaccctccgcctcctcgcccatcctcccctccatcccgtcccagccgcagggccatggactctgctgccggcgcaggccgccaccgcgttcgaatcgcagtcgtcggcgacgtgccttgcagcacaatgattgggcccttgaggaagattcaaaggcgcttcgatttcttcagccggatttagtgctttttacaggcgattatggaaatgagaatgttgaacttgtcagaagcatttcagatcttcagttaccaaaggcggcaattcttggcaatcatgattgctggcacacacatcaattctcagagaagtaagagtcatgatctcatcctgaaaggagaaagtactaaagtaatttaatttctttttatgtcaaaatgtacttggttggtattcaggaaggtcgatcgtgttcggcttcagctcgcaagccttggtgagcagcatgttggatacaaatgtttggacttcccatcaattaagctgagcgttgttggtggacggccattttcttgtgggggtgataggctacttagaccaaggcttctctcaaaatggttgttatggtgtcaatgatatggctggaagtgcaaagaagatatacgatgctgctgcaggtgcaccagagggacattctgttgtattgcttgcacataatggaccaacaggtctaggttcaagaatggatgatatctgtgggcgggattgggtacctggtggcggtgaccatggcgatccagatcttgagcgagccatctccgatttgcaaagggaagccagagtttccatcccgctggtcgtttttgggcacatgcacaagagcctggcctacgggagaggcttgaggaagatgatcgcctttggagccaaccacatcatatatctgaacggagcagttgtgcctagagtgaaatttgcccaaacaactcctgggcacgagcaaaatcaacccgaaggatcgggatccagagctccaacgttgcgcgcgttcaccattgccgatctctatgaagggcgtgtggagaagatctctgaggtctgggtactggtgagtggcgccaggaccgaggtcgaggaggaaatcgtcttgtacaagcatcctcgagagcagcatatgtgatggttatgagaccattatcttaccaaaaaaagatgtggagttgtgagacgaaaatgtgactgttgtgaatgccgtaaatgtgggggcgatgctgaagttgtgtgttataaagtgccttgtattccaactgaaaggagcacttcattatagagagcctgttacggcttctacctctggcactctgtgactgttattagtaagtaataattgtagctgattgacggaagagagatcttttgaaaaagaaaaatgtgtctccattctaaggatggattcgggtgtctggagatccgaattatttgtattcggataaagtgctaatatagatatccgtattcatattcgattttaata

SEQ ID NO: 82282 - DNA, 1505 bp, Zea Mays
ggggcaaataaaggattaactcaaaagaaaatggtcttgcggtcttgctctccttcctcgtggtcggcggccggtgcagctgtagccacgcgcgcctcggcaaaccctccgcctcctcgcccatcctcccctccatcccgtcccagccgcagggccatggactctgctgccggcgcaggccgccaccgcgttcgaatcgcagtcgtcggcgacgtgcacaatgattgggcccttgaggaagattcaaaggcgcttcgatttcttcagccggatttagtgctttttacaggcgattatggaaatgagaatgttgaacttgtcagaagcatttcagatcttcagttaccaaaggcggcaattcttggcaatcatgattgctggcacacacatcaattctcagagaagaaggtcgatcgtgttcggcttcagctcgcaagccttggtgagcagcatgttggatacaaatgtttggacttcccatcaattaagctgagcgttgttggtggacggccattttcttgtgggggtgataggctacttagaccaaggcttctctcaaaatgttatggtgtcaatgatatggctggaagtgcaaagaagatatacgatgctgctgcaggtgcaccagagggacattctgttgtattgcttgcacataatggaccaacaggtcaagatttgattgaacaaatttcagaggtctaggttcaagaatggatgatatctgtgggcgggattgggtacctggtggcggtgaccatggcgatccagatcttgagcgagccatctccgatttgcaaagggaagccagagtttccatcccgctggtcgtttttgggcacatgcacaagagcctggcctacgggagaggcttgaggaagatgatcgcctttggagccaaccacatcatatatctgaacggagcagttgtgcctagagtgaaatttgcccaaacaactcctgggcacgagcaaaatcaacccgaaggatcgggatccagagctccaacgttgcgcgcgttcaccattgccgatctctatgaagggcgtgtggagaagatctctgaggtctgggtactggtgagtggcgccaggaccgaggtcgaggaggaaatcgtcttgtacaagcatcctcgagagcagcatatgtgatggttatgagaccattatcttaccaaaaaaagatgtggagttgtgagacgaaaatgtgactgttgtgaatgccgtaaatgtgggggcgatgctgaagttgtgtgttataaagtgccttgtattccaactgaaaggagcacttcattatagagagcctgttacggcttctacctctggcactctgtgactgttattagtaagtaataattgtagctgattgacggaagagagatcttttgaaaaagaaaaatgtgtctccattctaaggatggattcgggtgtctggagatccgaattatttgtattcggataaagtgctaatatagatatccgtattcatattcgattttaata

SEQ ID NO: 82283 - DNA, 1555 bp, Zea Mays
ggggcaaataaaggattaactcaaaagaaaatggtcttgcggtcttgctctccttcctcgtggtcggcggccggtgcagctgtagccacgcgcgcctcggcaaaccctccgcctcctcgcccatcctcccctccatcccgtcccagccgcagggccatggactctgctgccggcgcaggccgccaccgcgttcgaatcgcagtcgtcggcgacgtgcacaatgattgggcccttgaggaagattcaaaggcgcttcgatttcttcagccggatttagtgctttttacaggcgattatggaaatgagaatgttgaacttgtcagaagcatttcagatcttcagttaccaaaggcggcaattcttggcaatcatgattgctggcacacacatcaattctcagagaagtaagagtcatgatctcatcctgaaaggagaaagtactaaagtaatttaatttctttttatgtcaaaatgtacttggttggtattcaggaaggtcgatcgtgttcggcttcagctcgcaagcatgttggatacaaatgtttggacttcccatcaattaagctgagcgttgttggtggacggccattttcttgtgggggtgataggctacttagaccaaggcttctctcaaaatggttgttatggtgtcaatgatatggctggaagtgcaaagaagatatacgatgctgctgcaggtgcaccagagggacattctgttgtattgcttgcacataatggaccaacaggtctaggttcaagaatggatgatatctgtgggcgggattgggtacctggtggcggtgaccatggcgatccagatcttgagcgagccatctccgatttgcaaagggaagccagagtttccatcccgctggtcgtttttgggcacatgcacaagagcctggcctacgggagaggcttgaggaagatgatcgcctttggagccaaccacatcatatatctgaacggagcagttgtgcctagagtgaaatttgcccaaacaactcctgggcacgagcaaaatcaacccgaaggatcgggatccagagctccaacgttgcgcgcgttcaccattgccgatctctatgaagggcgtgtggagaagatctctgaggtctgggtactggtgagtggcgccaggaccgaggtcgaggaggaaatcgtcttgtacaagcatcctcgagagcagcatatgtgatggttatgagaccattatcttaccaaaaaaagatgtggagttgtgagacgaaaatgtgactgttgtgaatgccgtaaatgtgggggcgatgctgaagttgtgtgttataaagtgccttgtattccaactgaaaggagcacttcattatagagagcctgttacggcttctacctctggcactctgtgactgttattagtaagtaataattgtagctgattgacggaagagagatcttttgaaaaagaaaaatgtgtctccattctaaggatggattcgggtgtctggagatccgaattatttgtattcggataaagtgctaatatagatatccgtattcatattcgattttaata

SEQ ID NO: 82284 - DNA, 1584 bp, Zea Mays
ggggcaaataaaggattaactcaaaagaaaatggtcttgcggtcttgctctccttcctcgtggtcggcggccggtgcagctgtagccacgcgcgcctcggcaaaccctccgcctcctcgcccatcctcccctccatcccgtcccagccgcagggccatggactctgctgccggcgcaggccgccaccgcgttcgaatcgcagtcgtcggcgacgtgccttgcagcacaatgattgggcccttgaggaagattcaaaggcgcttcgatttcttcagccggatttagtgctttttacaggcgattatggaaatgagaatgttgaacttgtcagaagcatttcagatcttcagttaccaaaggcggcaattcttggcaatcatgattgctggcacacacatcaattctcagagaagaaggtcgatcgtgttcggcttcagctcgcaagccttggtgagcagcatgttggatacaaatgtttggacttcccatcaattaagctgagcgttgttggtggacggccattttcttgtgggggtgataggctacttagaccaaggcttctctcaaaatgttatggtgtcaatgatatggctggaagtgcaaagaagatatacgatgctgctgcaggtgcaccagagggacattctgttgtattgcttgcacataatggaccaacaggtcaagatttgattgaacaaatttcagaggtagttcatgaaacaaatgaaaaaaaaggttgggagtcataacatacatgtacaacgctatggttacgcaggtctaggttcaagaatggatgatatctgtgggcgggattgggtacctggtggcggtgaccatggcgatccagatcttgagcgagccatctccgatttgcaaagggaagccagagtttccatcccgctggtcgtttttgggcacatgcacaagagcctggcctacgggagaggcttgaggaagatgatcgcctttggagccaaccacatcatatatctgaacggagcagttgtgcctagagtgaaatttgcccaaacaactcctgggcacgagcaaaatcaacccgaaggatcgggatccagagctccaacgttgcgcgcgttcaccattgccgatctctatgaagggcgtgtggagaagatctctgaggtctgggtactggtgagtggcgccaggaccgaggtcgaggaggaaatcgtcttgtacaagcatcctcgagagcagcatatgtgatggttatgagaccattatcttaccaaaaaaagatgtggagttgtgagacgaaaatgtgactgttgtgaatgccgtaaatgtgggggcgatgctgaagttgtgtgttataaagtgccttgtattccaactgaaaggagcacttcattatagagagcctgttacggcttctacctctggcactctgtgactgttattagtaagtaataattgtagctgattgacggaagagagatcttttgaaaaagaaaaatgtgtctccattctaaggatggattcgggtgtctggagatccgaattatttgtattcggataaagtgctaatatagatatccgtattcatattcgattttaata

SEQ ID NO: 82285 - DNA, 1447 bp, Zea Mays
ggggcaaataaaggattaactcaaaagaaaatggtcttgcggtcttgctctccttcctcgtggtcggcggccggtgcagctgtagccacgcgcgcctcggcaaaccctccgcctcctcgcccatcctcccctccatcccgtcccagccgcagggccatggactctgctgccggcgcaggccgccaccgcgttcgaatcgcagtcgtcggcgacgtgcacaatgattgggcccttgaggaagattcaaaggcgcttcgatttcttcagccggatttagtgctttttacaggcgattatggaaatgagaatgttgaacttgtcagaagcatttcagatcttcagttaccaaaggcggcaattcttggcaatcatgattgctggcacacacatcaattctcagagaaccttggtgagcagcatgttggatacaaatgtttggacttcccatcaattaagctgagcgttgttggtggacggccattttcttgtgggggtgataggctacttagaccaaggcttctctcaaaatggttgttatggtgtcaatgatatggctggaagtgcaaagaagatatacgatgctgctgcaggtgcaccagagggacattctgttgtattgcttgcacataatggaccaacaggtctaggttcaagaatggatgatatctgtgggcgggattgggtacctggtggcggtgaccatggcgatccagatcttgagcgagccatctccgatttgcaaagggaagccagagtttccatcccgctggtcgtttttgggcacatgcacaagagcctggcctacgggagaggcttgaggaagatgatcgcctttggagccaaccacatcatatatctgaacggagcagttgtgcctagagtgaaatttgcccaaacaactcctgggcacgagcaaaatcaacccgaaggatcgggatccagagctccaacgttgcgcgcgttcaccattgccgatctctatgaagggcgtgtggagaagatctctgaggtctgggtactggtgagtggcgccaggaccgaggtcgaggaggaaatcgtcttgtacaagcatcctcgagagcagcatatgtgatggttatgagaccattatcttaccaaaaaaagatgtggagttgtgagacgaaaatgtgactgttgtgaatgccgtaaatgtgggggcgatgctgaagttgtgtgttataaagtgccttgtattccaactgaaaggagcacttcattatagagagcctgttacggcttctacctctggcactctgtgactgttattagtaagtaataattgtagctgattgacggaagagagatcttttgaaaaagaaaaatgtgtctccattctaaggatggattcgggtgtctggagatccgaattatttgtattcggataaagtgctaatatagatatccgtattcatattcgattttaata

SEQ ID NO: 82286 - DNA, 1443 bp, Zea Mays
ggggcaaataaaggattaactcaaaagaaaatggtcttgcggtcttgctctccttcctcgtggtcggcggccggtgcagctgtagccacgcgcgcctcggcaaaccctccgcctcctcgcccatcctcccctccatcccgtcccagccgcagggccatggactctgctgccggcgcaggccgccaccgcgttcgaatcgcagtcgtcggcgacgtgcacaatgattgggcccttgaggaagattcaaaggcgcttcgatttcttcagccggatttagtgctttttacaggcgattatggaaatgagaatgttgaacttgtcagaagcatttcagatcttcagttaccaaaggcggcaattcttggcaatcatgattgctggcacacacatcaattctcagagaaccttggtgagcagcatgttggatacaaatgtttggacttcccatcaattaagctgagcgttgttggtggacggccattttcttgtgggggtgataggctacttagaccaaggcttctctcaaaatgttatggtgtcaatgatatggctggaagtgcaaagaagatatacgatgctgctgcaggtgcaccagagggacattctgttgtattgcttgcacataatggaccaacaggtctaggttcaagaatggatgatatctgtgggcgggattgggtacctggtggcggtgaccatggcgatccagatcttgagcgagccatctccgatttgcaaagggaagccagagtttccatcccgctggtcgtttttgggcacatgcacaagagcctggcctacgggagaggcttgaggaagatgatcgcctttggagccaaccacatcatatatctgaacggagcagttgtgcctagagtgaaatttgcccaaacaactcctgggcacgagcaaaatcaacccgaaggatcgggatccagagctccaacgttgcgcgcgttcaccattgccgatctctatgaagggcgtgtggagaagatctctgaggtctgggtactggtgagtggcgccaggaccgaggtcgaggaggaaatcgtcttgtacaagcatcctcgagagcagcatatgtgatggttatgagaccattatcttaccaaaaaaagatgtggagttgtgagacgaaaatgtgactgttgtgaatgccgtaaatgtgggggcgatgctgaagttgtgtgttataaagtgccttgtattccaactgaaaggagcacttcattatagagagcctgttacggcttctacctctggcactctgtgactgttattagtaagtaataattgtagctgattgacggaagagagatcttttgaaaaagaaaaatgtgtctccattctaaggatggattcgggtgtctggagatccgaattatttgtattcggataaagtgctaatatagatatccgtattcatattcgattttaata

SEQ ID NO: 82287 - DNA, 1943 bp, Zea Mays
ggggcaaataaaggattaactcaaaagaaaatggtcttgcggtcttgctctccttcctcgtggtcggcggccggtgcagctgtagccacgcgcgcctcggcaaaccctccgcctcctcgcccatcctcccctccatcccgtcccagccgcagggccatggactctgctgccggcgcaggccgccaccgcgttcgaatcgcagtcgtcggcgacgtgcacaatgattgggcccttgaggaagattcaaaggcgcttcgatttcttcagccggatttagtgctttttacaggcgattatggaaatgagaatgttgaacttgtcagaagcatttcagatcttcagttaccaaaggcggcaattcttggcaatcatgattgctggcacacacatcaattctcagagaagaaggtcgatcgtgttcggcttcagctcgcaaggtaagatattcctgttttttgcaataagctatgcatttaattgtttattgcaatatttgctacgatagcagggtttgtttaggaaggaaattttgttgaagtagatgttgcaccttgtagattgcataattgatgttgtgctctttagctgtaccacacttgatcattgtcactttaagagtttcagctttattgtctagtaatttcttttctctttagaagagtgaaattcgaataatactgaacccaatcggatgttagttgagtaaaactgtacaccaaccttctagaactaagttaaaagccgattcttggcctaactacttgatggcactcaactaggttatagccagtagagagatcttggggttaactatcttcgctcttcactagattaatataccttttaagctggaaaatgatcaatagtacttacatttcatttccttttttcttattaatatcagccttggtgagcagcatgttggatacaaatgtttggacttcccatcaattaagctgagcgttgttggtggacggccattttcttgtgggggtgataggctacttagaccaaggcttctctcaaaatgttatggtgtcaatgatatggctggaagtgcaaagaagatatacgatgctgctgcaggtgcaccagagggacattctgttgtattgcttgcacataatggaccaacaggtctaggttcaagaatggatgatatctgtgggcgggattgggtacctggtggcggtgaccatggcgatccagatcttgagcgagccatctccgatttgcaaagggaagccagagtttccatcccgctggtcgtttttgggcacatgcacaagagcctggcctacgggagaggcttgaggaagatgatcgcctttggagccaaccacatcatatatctgaacggagcagttgtgcctagagtgaaatttgcccaaacaactcctgggcacgagcaaaatcaacccgaaggatcgggatccagagctccaacgttgcgcgcgttcaccattgccgatctctatgaagggcgtgtggagaagatctctgaggtctgggtactggtgagtggcgccaggaccgaggtcgaggaggaaatcgtcttgtacaagcatcctcgagagcagcatatgtgatggttatgagaccattatcttaccaaaaaaagatgtggagttgtgagacgaaaatgtgactgttgtgaatgccgtaaatgtgggggcgatgctgaagttgtgtgttataaagtgccttgtattccaactgaaaggagcacttcattatagagagcctgttacggcttctacctctggcactctgtgactgttattagtaagtaataattgtagctgattgacggaagagagatcttttgaaaaagaaaaatgtgtctccattctaaggatggattcgggtgtctggagatccgaattatttgtattcggataaagtgctaatatagatatccgtattcatattcgattttaata

SEQ ID NO: 82288 - DNA, 1956 bp, Zea Mays
ctaaaaacaggggcaaataaaggattaactcaaaagaaaatggtcttgcggtcttgctctccttcctcgtggtcggcggccggtgcagctgtagccacgcgcgcctcggcaaaccctccgcctcctcgcccatcctcccctccatcccgtcccagccgcagggccatggactctgctgccggcgcaggccgccaccgcgttcgaatcgcagtcgtcggcgacgtgcacaatgattgggcccttgaggaagattcaaaggcgcttcgatttcttcagccggatttagtgctttttacaggcgattatggaaatgagaatgttgaacttgtcagaagcatttcagatcttcagttaccaaaggcggcaattcttggcaatcatgattgctggcacacacatcaattctcagagaagaaggtcgatcgtgttcggcttcagctcgcaaggtaagatattcctgttttttgcaataagctatgcatttaattgtttattgcaatatttgctacgatagcagggtttgtttaggaaggaaattttgttgaagtagatgttgcaccttgtagattgcataattgatgttgtgctctttagctgtaccacacttgatcattgtcactttaagagtttcagctttattgtctagtaatttcttttctctttagaagagtgaaattcgaataatactgaacccaatcggatgttagttgagtaaaactgtacaccaaccttctagaactaagttaaaagccgattcttggcctaactacttgatggcactcaactaggttatagccagtagagagatcttggggttaactatcttcgctcttcactagattaatataccttttaagctggaaaatgatcaatagtacttacatttcatttccttttttcttattaatatcagccttggtgagcagcatgttggatacaaatgtttggacttcccatcaattaagctgagcgttgttggtggacggccattttcttgtgggggtgataggctacttagaccaaggcttctctcaaaatggttgttatggtgtcaatgatatggctggaagtgcaaagaagatatacgatgctgctgcaggtgcaccagagggacattctgttgtattgcttgcacataatggaccaacaggtctaggttcaagaatggatgatatctgtgggcgggattgggtacctggtggcggtgaccatggcgatccagatcttgagcgagccatctccgatttgcaaagggaagccagagtttccatcccgctggtcgtttttgggcacatgcacaagagcctggcctacgggagaggcttgaggaagatgatcgcctttggagccaaccacatcatatatctgaacggagcagttgtgcctagagtgaaatttgcccaaacaactcctgggcacgagcaaaatcaacccgaaggatcgggatccagagctccaacgttgcgcgcgttcaccattgccgatctctatgaagggcgtgtggagaagatctctgaggtctgggtactggtgagtggcgccaggaccgaggtcgaggaggaaatcgtcttgtacaagcatcctcgagagcagcatatgtgatggttatgagaccattatcttaccaaaaaaagatgtggagttgtgagacgaaaatgtgactgttgtgaatgccgtaaatgtgggggcgatgctgaagttgtgtgttataaagtgccttgtattccaactgaaaggagcacttcattatagagagcctgttacggcttctacctctggcactctgtgactgttattagtaagtaataattgtagctgattgacggaagagagatcttttgaaaaagaaaaatgtgtctccattctaaggatggattcgggtgtctggagatccgaattatttgtattcggataaagtgctaatatagatatccgtattcatattcgattttaata

SEQ ID NO: 82289 - DNA, 1489 bp, Zea Mays
ctaaaaacaggggcaaataaaggattaactcaaaagaaaatggtcttgcggtcttgctctccttcctcgtggtcggcggccggtgcagctgtagccacgcgcgcctcggcaaaccctccgcctcctcgcccatcctcccctccatcccgtcccagccgcagggccatggactctgctgccggcgcaggccgccaccgcgttcgaatcgcagtcgtcggcgacgtgcacaatgattgggcccttgaggaagattcaaaggcgcttcgatttcttcagccggatttagtgctttttacaggcgattatggaaatgagaatgttgaacttgtcagaagcatttcagatcttcagttaccaaaggcggcaattcttggcaatcatgattgctggcacacacatcaattctcagagaagaaggtcgatcgtgttcggcttcagctcgcaagccttggtgagcagcatgttggatacaaatgtttggacttcccatcaattaagctgagcgttgttggtggacggccattttcttgtgggggtgataggctacttagaccaaggcttctctcaaaatggttgttatggtgtcaatgatatggctggaagtgcaaagaagatatacgatgctgctgcaggtgcaccagagggacattctgttgtattgcttgcacataatggaccaacaggtctaggttcaagaatggatgatatctgtgggcgggattgggtacctggtggcggtgaccatggcgatccagatcttgagcgagccatctccgatttgcaaagggaagccagagtttccatcccgctggtcgtttttgggcacatgcacaagagcctggcctacgggagaggcttgaggaagatgatcgcctttggagccaaccacatcatatatctgaacggagcagttgtgcctagagtgaaatttgcccaaacaactcctgggcacgagcaaaatcaacccgaaggatcgggatccagagctccaacgttgcgcgcgttcaccattgccgatctctatgaagggcgtgtggagaagatctctgaggtctgggtactggtgagtggcgccaggaccgaggtcgaggaggaaatcgtcttgtacaagcatcctcgagagcagcatatgtgatggttatgagaccattatcttaccaaaaaaagatgtggagttgtgagacgaaaatgtgactgttgtgaatgccgtaaatgtgggggcgatgctgaagttgtgtgttataaagtgccttgtattccaactgaaaggagcacttcattatagagagcctgttacggcttctacctctggcactctgtgactgttattagtaagtaataattgtagctgattgacggaagagagatcttttgaaaaagaaaaatgtgtctccattctaaggatggattcgggtgtctggagatccgaattatttgtattcggataaagtgctaatatagatatccgtattcatattcgattttaata

SEQ ID NO: 82290 - DNA, 1085 bp, Zea Mays
gaagaatcatcgaatgcagtgatgcgatgcgcccctccttggttcccggcccagacattcccgtggaagtagaagcaaacatcgattgcaacggcgcatcctggatctcgtcattgatcccagtcagtcccagcagaacgagcaggagaaggcgacgctcagcgcggggttcttgctgtttctacagcccctaggtacgggcgcggcgcagtcaccaaggcgggcttgcggcctcgcgggtgcggggcgcgagcgcgaccccggccgcgaccttgtctatactcgccagccgggcgggcgggcgagctgtggcatccgcgcacaacaaagctagctacgtactcgtgaaattcgcggcgcagcgcaagcgcgcgggagccagcgtgccggcgaggcgcaccgatgggctcctcggcggcgggctccaccccgacggcgcggcagcagcgcggcgcgggagtggatgcgggcgcggcgccgtcgtcgtcgagccccgtcttcctcaacgtgtacgacgtcacccccgccaacggctacgcccggtggctcggcctcggcgtctaccactccggcgtgcaagttcacggggtggagtacgcgtacggcgcgcacgacggcgcgagcagcgggatcttcgaggtggtgccgcggcggtgccccgggtacgcgttccgggagtcggtggccgtgggcgcgacggagctgagccgcggcgaggtgcgcgcgctgatggcggagctggccgccgagttccccggggacgcctacaacctggtgtcccgcaactgcaaccacttctgcgacgccgcgtgccggcgcctcgtcgcgcgcgcccgcatcccgcgctgggtcaaccgcctcgccaagatcggggtcgccttcacctgcgtcatcccgggcaacggccgcgccgcgcgcccgccctccgccgcgagccggagccggagccggtccgcgccgccgcggccgcggaccttcttccggaccttctccgtcggcccgcgcaggaacatgacggcgccctccccgccggcacacgcctcggcgtcaacgtcgtcggggtccaccacagctggacgacgagg

SEQ ID NO: 82291 - DNA, 1420 bp, Zea Mays
atcatcgaatgcagtgatgcgatgcgcccctccttggttcccggcccagacattcccgtggaagtagaagcaaacatcgattgcaacggcgcatcctggatctcgtcattgatcccagtcagtcccagcagaacgagcaggagaaggcgacgctcagcgcggggttcttgctgtttctacagcccctaggtacgggcgcggcgcagtcaccaaggcgggcttgcggcctcgcgggtgcggggcgcgagcgcgaccccggccgcgaccttgtctatactcgccagccgggcgggcgggcgagctgtggcatccgcgcacaacaaagctagctacgtactcgtgaaattcgcggcgcagcgcaagcgcgcgggagccagcgtgccggcgaggcgcaccgatgggctcctcggcggcgggctccaccccgacggcgcggcagcagcgcggcgcgggagtggatgcgggcgcggcgccgtcgtcgtcgagccccgtcttcctcaacgtgtacgacgtcacccccgccaacggctacgcccggtggctcggcctcggcgtctaccactccggcgtgcaagttcacggggtggagtacgcgtacggcgcgcacgacggcgcgagcagcgggatcttcgaggtggtgccgcggcggtgccccgggtacgcgttccgggagtcggtggccgtgggcgcgacggagctgagccgcggcgaggtgcgcgcgctgatggcggagctggccgccgagttccccggggacgcctacaacctggtgtcccgcaactgcaaccacttctgcgacgccgcgtgccggcgcctcgtcgcgcgcgcccgcatcccgcgctgggtcaaccgcctcgccaagatcggggtcgccttcacctgcgtcatcccgggcaacggccgcgccgcgcgcccgccctccgccgcgagccggagccggagccggtccgcgccgccgcggccgcggaccttcttccggaccttctccgtcggcccgcgcaggaacatgacggcgccctccccgccggcacacgcctcggcgtcaacgtcgtcggggtccaccacaggacatgataatggtgaatcgggcgagggcgaatgaacttgaggggaaaattctactttgcgattagagcaacgcatcgcgaaatgcatcagtcgtggctcttgacttttttttgtcagtcacagcaccacaaattaatttgtgcttgcggagtcaagggcaatccaaaaaaacaaagctaatgatgacgcactgctacagaccgaattaaatatgcagaagagaatcagaacaaatcgccatgttttgaattcgtcgcccttttacggaccgagtcgccagccatagacgagcacaccggatcaaaactttgctcgcagattgattgttgatccagtttgacttgcctctccg

SEQ ID NO: 82292 - DNA, 432 bp, Zea Mays
attcactctgccaatcgtgcctacacacgagcggcccaattgctttgctgctacatgagcggttccacaaaatcctccacgctcagagctcagcatattacgtttccatttttcctcccatctttcctaactacttcgcctctccatcctggcggcgactcacgacctccccatcaacttctccgtctaggacaaagatggctccaggggggaagggatcacgatgcagaatggaactctcagcagtgtagagagattcctgcaaataaagttaggactacatcgccagtgtcattatgactgatgatcaatggagggatttggtacaaatgtggtctaccccaaaccataaggaattatgttgaaaagtttagctccctgtaaagtattctacagaagttgtttccaatgtggtgttggtttcaagtaaat

SEQ ID NO: 82293 - DNA, 427 bp, Zea Mays
attcactctgccaatcgtgcctacacacgagcggcccaattgctttgctgctacatgagcggttccacaaaatcctccacgctcagagctcagcatattacgtttccatttttcctcccatctttcctaactacttcgcctctccatcctggcggcgactcacgacctccccatcaacttctccgtctaggacaaagatggctccaggggggaagggatcacgatgcagaatggaactctcagcagagagattcctgcaaataaagttaggactacatcgccagtgtcattatgactgatgatcaatggagggatttggtacaaatgtggtctaccccaaaccataaggaattatgttgaaaagtttagctccctgtaaagtattctacagaagttgtttccaatgtggtgttggtttcaagtaaat

SEQ ID NO: 82294 - DNA, 624 bp, Zea Mays
ctggagaagaaaaaacacatgagattctgggcaaacttgaagaacctacctccagtgcaaatctaatttcaacaccagctgttgagaaggtttttttcgagcttaaaacaagctgtactgaccttcacagtgttgtgggggatctgcttccagctgcaaaggcagttgtagatgatatattggctgcaaggatggagaaaggcgttagtttgaaagctgaagaagtaagaggtcaacgaacaacttgtggcactgcaggcccatgtgctcttaacgataaagacaggggttcaagtataggtaaaacctcgcagccttatgaattggaacccaacagcacagacctttcagtgggaggagtcaggtcctgagtgttcagaatcatcgttacgtagaccgcccttgccgatagtaccagtttctcctttggcaccacgagtaaagaagaatgggcgtaggaaggcaaggaggtggtgcttgttagaagaagaaacactaagaaagggtgttgaacagtatggtaggggcaattggaaggaaattttagataacaatcctgatgtttttatcggcagaacaccggtggacttgaaggataagtggaggaatatgattatccgataa

SEQ ID NO: 82295 - DNA, 4524 bp, Zea Mays
ccgcagtcgagcggagcggagccaacctcctgcagtgccaggcgcgtccggggccgaggggcgacggccaaccgaacgggagagtgtcaagtcaagtgggcggattgcgggaaggaaggaaaacctcccgcgcgactcgcgcctccgccctcctcgtcctcgtcctcgtcctccattccaacccctgcgtttcggattctgttgcgccctctccagagcctcggcgagcggtggaaactctaggtggcggcgacggcgatggcgtcggcgagcaggggcaccggggtggcgccggcgggcgagcccggcagcccgagggcgtggggcggcgaggacgaggcgtgcagggcgaggaaagtgaagctgatgtgcagctacgggggccggatcgcgccgagacccggggacggggcgctgcggtacgtgggcggccagacgcggctcatctccgccccgcgcgccgcctccttcgcggacctgctgcggaaggtggaggcggtggacgaggcctcggcctcctctggcggcggggtggtcctcaggtaccagctccccggggatgacctcgactcgctcatctccgtgtccggcccggaggactacgacaacatgatggaggagtacgagaagctggccgccgcggcgcccgacggctccgccaagctccgggtcttcctcttcccggcctccggggccgacgcggggccccatctcgccgccgtggtggacgagtccgggcagcggtacatcgacgccatcaactgcgtctccacggaggccattgccacggccacggccatgcggcggaaggacggcgtcgccagcgccggctcctccgcgcacaactccgaggcggccgagtacagcggtctagtcgaaagtacgtcgccgcgggcggtgccgccgcctgcttccgttgcgactgagtattcgtattcaggtggagcgcattacctccgtgctttcccggagtcggttgggctcactgcagtctcggcgtcacctctggcgatgggcatcccggctcaaaaccccatcctggttaggacagagcagtcgacgttgccgcctcatcaggttgctgctgtttatgcagcagcaacacagcatcagccgcctcaagtgaccacttatgtgcaggagcagcagcagcagcagcctcaaggcacccattacgtaccacaacagcagcctcagtctgctgcttatgtgcagcagatgccgcagtcgtatatagagccgcagcaggtacactacatcaacgcccaacaatttggtgtgcatggggtgccacaatctgtcaactatgtgcctgtgcaaatgagccaattcatgcccaacattcctgtgacgggctctatggcgaccactgctgctcaagtgggaaagttgaagcccgcttccgcaggtgtagaacctgttccagagaccacgcagttcacaaggccagtgcaagctcaggttgatcagagttaccgggtggtgcacactccactgtcacagcttcctcctttgtcttctgtgcatctgcagacaaatgatgcgcagaggcagaaatttggtgcccaacaagcgatgacaagcgcagtaagcatgccagtggtgaccagctcaggcacaattcctgttgtggttagctcggccactgttccatcattgaggtatgatggttgcacaatgtgccaaaaagcattgccacatgcccattcggataatactatccgggagcagggaagttcttgtgcaatgggcaaccttgaggcagctccaatgttttacagcccacatcaaggcaccgcatccaacaaatctaatccaggtgcaagttcaggaacactcacgaactatgtggcagaaccaagagctgggaacacagcagtgatggcacaatttgattcgactcttcctgccagaaaacctgcagtccaggcgactgcatatgcggatacagttgtgccggttcaacccaccattattgctttcccagtgtctagtgcacctgctccaaaaggagtatttgtgggtcattctccttcggctggggctgaagatcatgtcaggtaccagcagcaaccattctcttatagcatgcaaccgccgctagttccagtgaatgtcccacaaggcattggtgccagtgcatacaaagattcaaatcatgcagcagtggaaccgcttagagaatatgcccgtgatcttcctcatgactatgctagagctattgatgctcgtatgcatgcagttcatttgggtcctattgcaccaccagaatctagtgtgcaaggaaatccttctattcctcatgttgtcattgatcatgccaaagttgggaagccacctgtaaataatgatgttacttctttctgcaaatctcaagctggagggtatcatatggggatcacaaatgcctttactgctcctgttttaacccaagaggacaacattgccaggcacagtgagcagccaccttgtgattttgatgttggtgcacaaaatgtccaacctgacataatccagcgaccaccactcaatctgcctgtccagagcaaccttagagttccgattgaaccacctgtttctaatgaaaagttcaccgttcaaccatctaactctggtgctcagcttcctgctgggcctcctctacagcatcctaaggaaatgcccaatcacttggatccttggaaagcagtgggcaatgcttctttagtgcctccaagaccaagcaagttaactaaggaacctgttgtttctggaggtcaatatgctgatggtcatatgcctgatatgaacacacatgctgccttactctttgaagaagacccaagtttaaaggatatccacacagttaaattgaacaaaggatttgggaaagctaatattaagcgacaattacaagatgttgctgaaggggtagcagcatcagttcttcagccatcctttcctgaaaaaccagctgcattctctggggatcacatcgattcacatggagcagtaattgatgtgaaagttcagggtgaagggaataatcagtcagacaaaacaagccaggggattcaagttttagatgacatcgataaacttcagataataaagaacagtgaccttgaggaattgcgtgaactgggttctggaaccattggtactgtgtaccatggaaagtggagaggctcagatgttgctataaagagaatcaacgagcgatgttttgctgggaaggcatctgagcaagagcgtatgaggactgatttctggaatgaggcagacaagcttgcatctttgcaccatccaaacgtagtagcattgtacggtgttgttctagatggacctggtggatctgttgcaacggtaacggagtacatggctaatggctcactccgacaagcattgcaaagacatgaaaagatctttgatcggcgtagacgtctattaattgcaatggatgttgcttttggaatggaatatctccatgggaagaatatagtgcatttcgacttgaacagtgacaatctgcttgtcaacctaaggtatcctcaacgaccaatatgcaaggttggtgatttgggattatcaaaggtcaaatgccagacacttatctctggtggagtgagaggaacactaccttggatggcccctgagttgttgaatggcagcagcagcctcgtctctgaaaaggttgacgttttctcgtttggcatcgtgatgtgggagctactcacgggtgaagagccttacgccgaactgcactacggtgccattataggtgggatcgtgaataacacgctgcgacctccggtgcccgagtcctgtgacccccagtggaggtcactgatggagcagtgctggtcagccgaaccctcggcgaggccgagcttcaccgaggtaggcacgaatctgcgcgccatggcggccgctcctaccaaggcacaacaatcgaaatagacggttttagccttctgcctcctgcgccaccttctttttagcaggctgtttcagtcttcaaaccgaggaggtgccgtccctagcctagcctggctttttttttttgtacatgaataagttgaagaaagataggagaatgtcgtggcatgcttatagagtcgatggatggttgatgcttcctgtcttgcttttggaacgaatcgtggaaatatatagtacaacgtagtgtaaagattgagccgtgagcgtgtagatcaatcggtacgtgagggagttaaaggagtgtttggcgggcgagtgatgctcgtgcgctctcgtccataacggcccggtgttcgtcgtttattcctcggttacgtccgggatatcttttttgggttctttctggcccgtgttgatgtgccattgaatattgcccggtgccatggaaaagcggtgctgttctcagttctcaccaagaggtgcaggagaaaccagagtttaggctgtctccagcaacgttccctaaatttcgtcccctaaaggaatattctctgtactttacagaacactctaaaagattctgtcccctatatattctgtgtc

SEQ ID NO: 82296 - DNA, 4533 bp, Zea Mays
cgccaattcagctcggcgattcgtttcggtgccgccgcagtcgagcggagcggagccaacctcctgcagtgccaggcgcgtccggggccgaggggcgacggccaaccgaacgggagagtgtcaagtcaagtgggcggattgcgggaaggaaggaaaacctcccgcgcgactcgcgcctccgccctcctcgtcctcgtcctcgtcctccattccaacccctgcgtttcggattctgttgcgccctctccagagcctcggcgagcggtggaaactctaggtggcggcgacggcgatggcgtcggcgagcaggggcaccggggtggcgccggcgggcgagcccggcagcccgagggcgtggggcggcgaggacgaggcgtgcagggcgaggaaagtgaagctgatgtgcagctacgggggccggatcgcgccgagacccggggacggggcgctgcggtacgtgggcggccagacgcggctcatctccgccccgcgcgccgcctccttcgcggacctgctgcggaaggtggaggcggtggacgaggcctcggcctcctctggcggcggggtggtcctcaggtaccagctccccggggatgacctcgactcgctcatctccgtgtccggcccggaggactacgacaacatgatggaggagtacgagaagctggccgccgcggcgcccgacggctccgccaagctccgggtcttcctcttcccggcctccggggccgacgcggggccccatctcgccgccgtggtggacgagtccgggcagcggtacatcgacgccatcaactgcgtctccacggaggccattgccacggccacggccatgcggcggaaggacggcgtcgccagcgccggctcctccgcgcacaactccgaggcggccgagtacagcggtctagtcgaaagtacgtcgccgcgggcggtgccgccgcctgcttccgttgcgactgagtattcgtattcaggtggagcgcattacctccgtgctttcccggagtcggttgggctcactgcagtctcggcgtcacctctggcgatgggcatcccggctcaaaaccccatcctggttaggacagagcagtcgacgttgccgcctcatcaggttgctgctgtttatgcagcagcaacacagcatcagccgcctcaagtgaccacttatgtgcaggagcagcagcagcagcagcctcaaggcacccattacgtaccacaacagcagcctcagtctgctgcttatgtgcagcagatgccgcagtcgtatatagagccgcagcaggtacactacatcaacgcccaacaatttggtgtgcatggggtgccacaatctgtcaactatgtgcctgtgcaaatgagccaattcatgcccaacattcctgtgacgggctctatggcgaccactgctgctcaagtgggaaagttgaagcccgcttccgcaggtgtagaacctgttccagagaccacgcagttcacaaggccagtgcaagctcaggttgatcagagttaccgggtggtgcacactccactgtcacagcttcctcctttgtcttctgtgcatctgcagacaaatgatgcgcagaggcagaaatttggtgcccaacaagcgatgacaagcgcagtaagcatgccagtggtgaccagctcaggcacaattcctgttgtggttagctcggccactgttccatcattgaggtatgatggttgcacaatgtgccaaaaagcattgccacatgcccattcggataatactatccgggagcagggaagttcttgtgcaatgggcaaccttgaggcagctccaatgttttacagcccacatcaaggcaccgcatccaacaaatctaatccaggtgcaagttcaggaacactcacgaactatgtggcagaaccaagagctgggaacacagcagtgatggcacaatttgattcgactcttcctgccagaaaacctgcagtccaggcgactgcatatgcggatacagttgtgccggttcaacccaccattattgctttcccagtgtctagtgcacctgctccaaaaggagtatttgtgggtcattctccttcggctggggctgaagatcatgtcaggtaccagcagcaaccattctcttatagcatgcaaccgccgctagttccagtgaatgtcccacaaggcattggtgccagtgcatacaaagattcaaatcatgcagcagtggaaccgcttagagaatatgcccgtgatcttcctcatgactatgctagagctattgatgctcgtatgcatgcagttcatttgggtcctattgcaccaccagaatctagtgtgcaaggaaatccttctattcctcatgttgtcattgatcatgccaaagttgggaagccacctgtaaataatgatgttacttctttctgcaaatctcaagctggagggtatcatatggggatcacaaatgcctttactgctcctgttttaacccaagaggacaacattgccaggcacagtgagcagccaccttgtgattttgatgttggtgcacaaaatgtccaacctgacataatccagcgaccaccactcaatctgcctgtccagagcaaccttagagttccgattgaaccacctgtttctaatgaaaagttcaccgttcaaccatctaactctggtgctcagcttcctgctgggcctcctctacagcatcctaaggaaatgcccaatcacttggatccttggaaagcagtgggcaatgcttctttagtgcctccaagaccaagcaagttaactaaggaacctgttgtttctggaggtcaatatgctgatggtcatatgcctgatatgaacacacatgctgccttactctttgaagaagacccaagtttaaaggatatccacacagttaaattgaacaaaggatttgggaaagctaatattaagcgacaattacaagatgttgctgaaggggtagcagcatcagttcttcagccatcctttcctgaaaaaccagctgcattctctggggatcacatcgattcacatggagcagtaattgatgtgaaagttcagggtgaagggaataatcagtcagacaaaacaagccaggggattcaagttttagatgacatcgataaacttcagataataaagaacagtgaccttgaggaattgcgtgaactgggttctggaaccattggtactgtgtaccatggaaagtggagaggctcagatgttgctataaagagaatcaacgagcgatgttttgctgggaaggcatctgagcaagagcgtatgacaagcttgcatctttgcaccatccaaacgtagtagcattgtacggtgttgttctagatggacctggtggatctgttgcaacggtaacggagtacatggctaatggctcactccgacaagcattgcaaagacatgaaaagatctttgatcggcgtagacgtctattaattgcaatggatgttgcttttggaatggaatatctccatgggaagaatatagtgcatttcgacttgaacagtgacaatctgcttgtcaacctaaggtatcctcaacgaccaatatgcaaggttggtgatttgggattatcaaaggtcaaatgccagacacttatctctggtggagtgagaggaacactaccttggatggcccctgagttgttgaatggcagcagcagcctcgtctctgaaaaggttgacgttttctcgtttggcatcgtgatgtgggagctactcacgggtgaagagccttacgccgaactgcactacggtgccattataggtgggatcgtgaataacacgctgcgacctccggtgcccgagtcctgtgacccccagtggaggtcactgatggagcagtgctggtcagccgaaccctcggcgaggccgagcttcaccgaggtaggcacgaatctgcgcgccatggcggccgctcctaccaaggcacaacaatcgaaatagacggttttagccttctgcctcctgcgccaccttctttttagcaggctgtttcagtcttcaaaccgaggaggtgccgtccctagcctagcctggctttttttttttgtacatgaataagttgaagaaagataggagaatgtcgtggcatgcttatagagtcgatggatggttgatgcttcctgtcttgcttttggaacgaatcgtggaaatatatagtacaacgtagtgtaaagattgagccgtgagcgtgtagatcaatcggtacgtgagggagttaaaggagtgtttggcgggcgagtgatgctcgtgcgctctcgtccataacggcccggtgttcgtcgtttattcctcggttacgtccgggatatcttttttgggttctttctggcccgtgttgatgtgccattgaatattgcccggtgccatggaaaagcggtgctgttctcagttctcaccaagaggtgcaggagaaaccagagtttaggctgtctccagcaacgttccctaaatttcgtcccctaaaggaatattctctgtactttacagaacactctaaaagattctgtcccctatatattctgtgtc

SEQ ID NO: 82297 - DNA, 4578 bp, Zea Mays
gaaactgcagtgtgtaacttatctcctggaccgcccgaccgccgccaattcagctcggcgattcgtttcggtgccgccgcagtcgagcggagcggagccaacctcctgcagtgccaggcgcgtccggggccgaggggcgacggccaaccgaacgggagagtgtcaagtcaagtgggcggattgcgggaaggaaggaaaacctcccgcgcgactcgcgcctccgccctcctcgtcctcgtcctcgtcctccattccaacccctgcgtttcggattctgttgcgccctctccagagcctcggcgagcggtggaaactctaggtggcggcgacggcgatggcgtcggcgagcaggggcaccggggtggcgccggcgggcgagcccggcagcccgagggcgtggggcggcgaggacgaggcgtgcagggcgaggaaagtgaagctgatgtgcagctacgggggccggatcgcgccgagacccggggacggggcgctgcggtacgtgggcggccagacgcggctcatctccgccccgcgcgccgcctccttcgcggacctgctgcggaaggtggaggcggtggacgaggcctcggcctcctctggcggcggggtggtcctcaggtaccagctccccggggatgacctcgactcgctcatctccgtgtccggcccggaggactacgacaacatgatggaggagtacgagaagctggccgccgcggcgcccgacggctccgccaagctccgggtcttcctcttcccggcctccggggccgacgcggggccccatctcgccgccgtggtggacgagtccgggcagcggtacatcgacgccatcaactgcgtctccacggaggccattgccacggccacggccatgcggcggaaggacggcgtcgccagcgccggctcctccgcgcacaactccgaggcggccgagtacagcggtctagtcgaaagtacgtcgccgcgggcggtgccgccgcctgcttccgttgcgactgagtattcgtattcaggtggagcgcattacctccgtgctttcccggagtcggttgggctcactgcagtctcggcgtcacctctggcgatgggcatcccggctcaaaaccccatcctggttaggacagagcagtcgacgttgccgcctcatcaggttgctgctgtttatgcagcagcaacacagcatcagccgcctcaagtgaccacttatgtgcaggagcagcagcagcagcagcctcaaggcacccattacgtaccacaacagcagcctcagtctgctgcttatgtgcagcagatgccgcagtcgtatatagagccgcagcaggtacactacatcaacgcccaacaatttggtgtgcatggggtgccacaatctgtcaactatgtgcctgtgcaaatgagccaattcatgcccaacattcctgtgacgggctctatggcgaccactgctgctcaagtgggaaagttgaagcccgcttccgcaggtgtagaacctgttccagagaccacgcagttcacaaggccagtgcaagctcaggttgatcagagttaccgggtggtgcacactccactgtcacagcttcctcctttgtcttctgtgcatctgcagacaaatgatgcgcagaggcagaaatttggtgcccaacaagcgatgacaagcgcagtaagcatgccagtggtgaccagctcaggcacaattcctgttgtggttagctcggccactgttccatcattgaggtatgatggttgcacaatgtgccaaaaagcattgccacatgcccattcggataatactatccgggagcagggaagttcttgtgcaatgggcaaccttgaggcagctccaatgttttacagcccacatcaaggcaccgcatccaacaaatctaatccaggtgcaagttcaggaacactcacgaactatgtggcagaaccaagagctgggaacacagcagtgatggcacaatttgattcgactcttcctgccagaaaacctgcagtccaggcgactgcatatgcggatacagttgtgccggttcaacccaccattattgctttcccagtgtctagtgcacctgctccaaaaggagtatttgtgggtcattctccttcggctggggctgaagatcatgtcaggtaccagcagcaaccattctcttatagcatgcaaccgccgctagttccagtgaatgtcccacaaggcattggtgccagtgcatacaaagattcaaatcatgcagcagtggaaccgcttagagaatatgcccgtgatcttcctcatgactatgctagagctattgatgctcgtatgcatgcagttcatttgggtcctattgcaccaccagaatctagtgtgcaaggaaatccttctattcctcatgttgtcattgatcatgccaaagttgggaagccacctgtaaataatgatgttacttctttctgcaaatctcaagctggagggtatcatatggggatcacaaatgcctttactgctcctgttttaacccaagaggacaacattgccaggcacagtgagcagccaccttgtgattttgatgttggtgcacaaaatgtccaacctgacataatccagcgaccaccactcaatctgcctgtccagagcaaccttagagttccgattgaaccacctgtttctaatgaaaagttcaccgttcaaccatctaactctggtgctcagcttcctgctgggcctcctctacagcatcctaaggaaatgcccaatcacttggatccttggaaagcagtgggcaatgcttctttagtgcctccaagaccaagcaagttaactaaggaacctgttgtttctggaggtcaatatgctgatggtcatatgcctgatatgaacacacatgctgccttactctttgaagaagacccaagtttaaaggatatccacacagttaaattgaacaaaggatttgggaaagctaatattaagcgacaattacaagatgttgctgaaggggtagcagcatcagttcttcagccatcctttcctgaaaaaccagctgcattctctggggatcacatcgattcacatggagcagtaattgatgtgaaagttcagggtgaagggaataatcagtcagacaaaacaagccaggggattcaagttttagatgacatcgataaacttcagataataaagaacagtgaccttgaggaattgcgtgaactgggttctggaaccattggtactgtgtaccatggaaagtggagaggctcagatgttgctataaagagaatcaacgagcgatgttttgctgggaaggcatctgagcaagagcgtatgaggactgatttctggaatgaggcagacaagcttgcatctttgcaccatccaaacgtagtagcattgtacggtgttgttctagatggacctggtggatctgttgcaacggtaacggagtacatggctaatggctcactccgacaagcattgcaaagacatgaaaacaggatctttgatcggcgtagacgtctattaattgcaatggatgttgcttttggaatggaatatctccatgggaagaatatagtgcatttcgacttgaacagtgacaatctgcttgtcaacctaaggttggtgatttgggattatcaaaggtcaaatgccagacacttatctctggtggagtgagaggaacactaccttggatggcccctgagttgttgaatggcagcagcagcctcgtctctgaaaaggttgacgttttctcgtttggcatcgtgatgtgggagctactcacgggtgaagagccttacgccgaactgcactacggtgccattataggtgggatcgtgaataacacgctgcgacctccggtgcccgagtcctgtgacccccagtggaggtcactgatggagcagtgctggtcagccgaaccctcggcgaggccgagcttcaccgaggtaggcacgaatctgcgcgccatggcggccgctcctaccaaggcacaacaatcgaaatagacggttttagccttctgcctcctgcgccaccttctttttagcaggctgtttcagtcttcaaaccgaggaggtgccgtccctagcctagcctggctttttttttttgtacatgaataagttgaagaaagataggagaatgtcgtggcatgcttatagagtcgatggatggttgatgcttcctgtcttgcttttggaacgaatcgtggaaatatatagtacaacgtagtgtaaagattgagccgtgagcgtgtagatcaatcggtacgtgagggagttaaaggagtgtttggcgggcgagtgatgctcgtgcgctctcgtccataacggcccggtgttcgtcgtttattcctcggttacgtccgggatatcttttttgggttctttctggcccgtgttgatgtgccattgaatattgcccggtgccatggaaaagcggtgctgttctcagttctcaccaagaggtgcaggagaaaccagagtttaggctgtctccagcaacgttccctaaatttcgtcccctaaaggaatattctctgtactttacagaacactctaaaagattctgtcccctatatattctgtgtc

SEQ ID NO: 82298 - DNA, 4655 bp, Zea Mays
ctgcgcggttggtcagtgagtcacggccaaagcaagcacgcctctcagacacgaaactgcagtgtgtaacttatctcctggaccgcccgaccgccgccaattcagctcggcgattcgtttcggtgccgccgcagtcgagcggagcggagccaacctcctgcagtgccaggcgcgtccggggccgaggggcgacggccaaccgaacgggagagtgtcaagtcaagtgggcggattgcgggaaggaaggaaaacctcccgcgcgactcgcgcctccgccctcctcgtcctcgtcctcgtcctccattccaacccctgcgtttcggattctgttgcgccctctccagagcctcggcgagcggtggaaactctaggtggcggcgacggcgatggcgtcggcgagcaggggcaccggggtggcgccggcgggcgagcccggcagcccgagggcgtggggcggcgaggacgaggcgtgcagggcgaggaaagtgaagctgatgtgcagctacgggggccggatcgcgccgagacccggggacggggcgctgcggtacgtgggcggccagacgcggctcatctccgccccgcgcgccgcctccttcgcggacctgctgcggaaggtggaggcggtggacgaggcctcggcctcctctggcggcggggtggtcctcaggtaccagctccccggggatgacctcgactcgctcatctccgtgtccggcccggaggactacgacaacatgatggaggagtacgagaagctggccgccgcggcgcccgacggctccgccaagctccgggtcttcctcttcccggcctccggggccgacgcggggccccatctcgccgccgtggtggacgagtccgggcagcggtacatcgacgccatcaactgcgtctccacggaggccattgccacggccacggccatgcggcggaaggacggcgtcgccagcgccggctcctccgcgcacaactccgaggcggccgagtacagcggtctagtcgaaagtacgtcgccgcgggcggtgccgccgcctgcttccgttgcgactgagtattcgtattcaggtggagcgcattacctccgtgctttcccggagtcggttgggctcactgcagtctcggcgtcacctctggcgatgggcatcccggctcaaaaccccatcctggttaggacagagcagtcgacgttgccgcctcatcaggttgctgctgtttatgcagcagcaacacagcatcagccgcctcaagtgaccacttatgtgcaggagcagcagcagcagcagcctcaaggcacccattacgtaccacaacagcagcctcagtctgctgcttatgtgcagcagatgccgcagtcgtatatagagccgcagcaggtacactacatcaacgcccaacaatttggtgtgcatggggtgccacaatctgtcaactatgtgcctgtgcaaatgagccaattcatgcccaacattcctgtgacgggctctatggcgaccactgctgctcaagtgggaaagttgaagcccgcttccgcaggtgtagaacctgttccagagaccacgcagttcacaaggccagtgcaagctcaggttgatcagagttaccgggtggtgcacactccactgtcacagcttcctcctttgtcttctgtgcatctgcagacaaatgatgcgcagaggcagaaatttggtgcccaacaagcgatgacaagcgcagtaagcatgccagtggtgaccagctcaggcacaattcctgttgtggttagctcggccactgttccatcattgaggtatgatggttgcacaatgtgccaaaaagcattgccacatgcccattcggataatactatccgggagcagggaagttcttgtgcaatgggcaaccttgaggcagctccaatgttttacagcccacatcaaggcaccgcatccaacaaatctaatccaggtgcaagttcaggaacactcacgaactatgtggcagaaccaagagctgggaacacagcagtgatggcacaatttgattcgactcttcctgccagaaaacctgcagtccaggcgactgcatatgcggatacagttgtgccggttcaacccaccattattgctttcccagtgtctagtgcacctgctccaaaaggagtatttgtgggtcattctccttcggctggggctgaagatcatgtcaggtaccagcagcaaccattctcttatagcatgcaaccgccgctagttccagtgaatgtcccacaaggcattggtgccagtgcatacaaagattcaaatcatgcagcagtggaaccgcttagagaatatgcccgtgatcttcctcatgactatgctagagctattgatgctcgtatgcatgcagttcatttgggtcctattgcaccaccagaatctagtgtgcaaggaaatccttctattcctcatgttgtcattgatcatgccaaagttgggaagccacctgtaaataatgatgttacttctttctgcaaatctcaagctggagggtatcatatggggatcacaaatgcctttactgctcctgttttaacccaagaggacaacattgccaggcacagtgagcagccaccttgtgattttgatgttggtgcacaaaatgtccaacctgacataatccagcgaccaccactcaatctgcctgtccagagcaaccttagagttccgattgaaccacctgtttctaatgaaaagttcaccgttcaaccatctaactctggtgctcagcttcctgctgggcctcctctacagcatcctaaggaaatgcccaatcacttggatccttggaaagcagtgggcaatgcttctttagtgcctccaagaccaagcaagttaactaaggaacctgttgtttctggaggtcaatatgctgatggtcatatgcctgatatgaacacacatgctgccttactctttgaagaagacccaagtttaaaggatatccacacagttaaattgaacaaaggatttgggaaagctaatattaagcgacaattacaagatgttgctgaaggggtagcagcatcagttcttcagccatcctttcctgaaaaaccagctgcattctctggggatcacatcgattcacatggagcagtaattgatgtgaaagttcagggtgaagggaataatcagtcagacaaaacaagccaggggattcaagttttagatgacatcgataaacttcagataataaagaacagtgaccttgaggaattgcgtgaactgggttctggaaccattggtactgtgtaccatggaaagtggagaggctcagatgttgctataaagagaatcaacgagcgatgttttgctgggaaggcatctgagcaagagcgtatgaggactgatttctggaatgaggcagacaagcttgcatctttgcaccatccaaacgtagtagcattgtacggtgttgttctagatggacctggtggatctgttgcaacggtaacggagtacatggctaatggctcactccgacaagcattgcaaagacatgaaaacaggatctttgatcggcgtagacgtctattaattgcaatggatgttgcttttggaatggaatatctccatgggaagaatatagtgcatttcgacttgaacagtgacaatctgcttgtcaacctaaggtatcctcaacgaccaatatgcaaggttggtgatttgggattatcaaaggtcaaatgccagacacttatctctggtggagtgagaggaacactaccttggatggcccctgagttgttgaatggcagcagcagcctcgtctctgaaaaggttgacgttttctcgtttggcatcgtgatgtgggagctactcacgggtgaagagccttacgccgaactgcactacggtgccattataggtgggatcgtgaataacacgctgcgacctccggtgcccgagtcctgtgacccccagtggaggtcactgatggagcagtgctggtcagccgaaccctcggcgaggccgagcttcaccgaggtaggcacgaatctgcgcgccatggcggccgctcctaccaaggcacaacaatcgaaatagacggttttagccttctgcctcctgcgccaccttctttttagcaggctgtttcagtcttcaaaccgaggaggtgccgtccctagcctagcctggctttttttttttgtacatgaataagttgaagaaagataggagaatgtcgtggcatgcttatagagtcgatggatggttgatgcttcctgtcttgcttttggaacgaatcgtggaaatatatagtacaacgtagtgtaaagattgagccgtgagcgtgtagatcaatcggtacgtgagggagttaaaggagtgtttggcgggcgagtgatgctcgtgcgctctcgtccataacggcccggtgttcgtcgtttattcctcggttacgtccgggatatcttttttgggttctttctggcccgtgttgatgtgccattgaatattgcccggtgccatggaaaagcggtgctgttctcagttctcaccaagaggtgcaggagaaaccagagtttaggctgtctccagcaacgttccctaaatttcgtcccctaaaggaatattctctgtactttacagaacactctaaaagattctgtcccctatatattctgtgtc

SEQ ID NO: 82299 - DNA, 4797 bp, Zea Mays
gccaggcccatgacacagtacgacggtggctgcgcggttggtcagtgagtcacggccaaagcaagcacgcctctcagacacgaaactgcagtgtgtaacttatctcctggaccgcccgaccgccgccaattcagctcggcgattcgtttcggtgccgccgcagtcgagcggagcggagccaacctcctgcagtgccaggcgcgtccggggccgaggggcgacggccaaccgaacgggagagtgtcaagtcaagtgggcggattgcgggaaggaaggaaaacctcccgcgcgactcgcgcctccgccctcctcgtcctcgtcctcgtcctccattccaacccctgcgtttcggattctgttgcgccctctccagagcctcggcgagcggtggaaactctaggtggcggcgacggcgatggcgtcggcgagcaggggcaccggggtggcgccggcgggcgagcccggcagcccgagggcgtggggcggcgaggacgaggcgtgcagggcgaggaaagtgaagctgatgtgcagctacgggggccggatcgcgccgagacccggggacggggcgctgcggtacgtgggcggccagacgcggctcatctccgccccgcgcgccgcctccttcgcggacctgctgcggaaggtggaggcggtggacgaggcctcggcctcctctggcggcggggtggtcctcaggtaccagctccccggggatgacctcgactcgctcatctccgtgtccggcccggaggactacgacaacatgatggaggagtacgagaagctggccgccgcggcgcccgacggctccgccaagctccgggtcttcctcttcccggcctccggggccgacgcggggccccatctcgccgccgtggtggacgagtccgggcagcggtacatcgacgccatcaactgcgtctccacggaggccattgccacggccacggccatgcggcggaaggacggcgtcgccagcgccggctcctccgcgcacaactccgaggcggccgagtacagcggtctagtcgaaagtacgtcgccgcgggcggtgccgccgcctgcttccgttgcgactgagtattcgtattcaggtggagcgcattacctccgtgctttcccggagtcggttgggctcactgcagtctcggcgtcacctctggcgatgggcatcccggctcaaaaccccatcctggttaggacagagcagtcgacgttgccgcctcatcaggttgctgctgtttatgcagcagcaacacagcatcagccgcctcaagtgaccacttatgtgcaggagcagcagcagcagcagcctcaaggcacccattacgtaccacaacagcagcctcagtctgctgcttatgtgcagcagatgccgcagtcgtatatagagccgcagcaggtacactacatcaacgcccaacaatttggtgtgcatggggtgccacaatctgtcaactatgtgcctgtgcaaatgagccaattcatgcccaacattcctgtgacgggctctatggcgaccactgctgctcaagtgggaaagttgaagcccgcttccgcaggtgtagaacctgttccagagaccacgcagttcacaaggccagtgcaagctcaggttgatcagagttaccgggtggtgcacactccactgtcacagcttcctcctttgtcttctgtgcatctgcagacaaatgatgcgcagaggcagaaatttggtgcccaacaagcgatgacaagcgcagtaagcatgccagtggtgaccagctcaggcacaattcctgttgtggttagctcggccactgttccatcattgaggtatgatggttgcacaatgtgccaaaaagcattgccacatgcccattcggataatactatccgggagcagggaagttcttgtgcaatgggcaaccttgaggcagctccaatgttttacagcccacatcaaggcaccgcatccaacaaatctaatccaggtgcaagttcaggaacactcacgaactatgtggcagaaccaagagctgggaacacagcagtgatggcacaatttgattcgactcttcctgccagaaaacctgcagtccaggcgactgcatatgcggatacagttgtgccggttcaacccaccattattgctttcccagtgtctagtgcacctgctccaaaaggagtatttgtgggtcattctccttcggctggggctgaagatcatgtcaggtaccagcagcaaccattctcttatagcatgcaaccgccgctagttccagtgaatgtcccacaaggcattggtgccagtgcatacaaagattcaaatcatgcagcagtggaaccgcttagagaatatgcccgtgatcttcctcatgactatgctagagctattgatgctcgtatgcatgcagttcatttgggtcctattgcaccaccagaatctagtgtgcaaggaaatccttctattcctcatgttgtcattgatcatgccaaagttgggaagccacctgtaaataatgatgttacttctttctgcaaatctcaagctggagggtatcatatggggatcacaaatgcctttactgctcctgttttaacccaagaggacaacattgccaggcacagtgagcagccaccttgtgattttgatgttggtgcacaaaatgtccaacctgacataatccagcgaccaccactcaatctgcctgtccagagcaaccttagagttccgattgaaccacctgtttctaatgaaaagttcaccgttcaaccatctaactctggtgctcagcttcctgctgggcctcctctacagcatcctaaggaaatgcccaatcacttggtttgtgctctccccaatcgtagcagtaaatttcaattgcaggctactgttggaattgatcgtgttgaagctacacaagaaccagcatacactgattcacttttctcaaatcaggatccttggaaagcagtgggcaatgcttctttagtgcctccaagaccaagcaagttaactaaggaacctgttgtttctggaggtcaatatgctgatggtcatatgcctgatatgaacacacatgctgccttactctttgaagaagacccaagtttaaaggatatccacacagttaaattgaacaaaggatttgggaaagctaatattaagcgacaattacaagatgttgctgaaggggtagcagcatcagttcttcagccatcctttcctgaaaaaccagctgcattctctggggatcacatcgattcacatggagcagtaattgatgtgaaagttcaggggattcaagttttagatgacatcgataaacttcagataataaagaacagtgaccttgaggaattgcgtgaactgggttctggaaccattggtactgtgtaccatggaaagtggagaggctcagatgttgctataaagagaatcaacgagcgatgttttgctgggaaggcatctgagcaagagcgtatggtatgaaatgttttcttttagattgaatccatcatgtgctatcttttcttttgtatgtagaggactgatttctggaatgaggcagacaagcttgcatctttgcaccatccaaacgtagtagcattgtacggtgttgttctagatggacctggtggatctgttgcaacggtaacggagtacatggctaatggctcactccgacaagcattgcaaagacatgaaaacaggatctttgatcggcgtagacgtctattaattgcaatggatgttgcttttggaatggaatatctccatgggaagaatatagtgcatttcgacttgaacagtgacaatctgcttgtcaacctaaggttggtgatttgggattatcaaaggtcaaatgccagacacttatctctggtggagtgagaggaacactaccttggatggcccctgagttgttgaatggcagcagcagcctcgtctctgaaaaggttgacgttttctcgtttggcatcgtgatgtgggagctactcacgggtgaagagccttacgccgaactgcactacggtgccattataggtgggatcgtgaataacacgctgcgacctccggtgcccgagtcctgtgacccccagtggaggtcactgatggagcagtgctggtcagccgaaccctcggcgaggccgagcttcaccgaggtaggcacgaatctgcgcgccatggcggccgctcctaccaaggcacaacaatcgaaatagacggttttagccttctgcctcctgcgccaccttctttttagcaggctgtttcagtcttcaaaccgaggaggtgccgtccctagcctagcctggctttttttttttgtacatgaataagttgaagaaagataggagaatgtcgtggcatgcttatagagtcgatggatggttgatgcttcctgtcttgcttttggaacgaatcgtggaaatatatagtacaacgtagtgtaaagattgagccgtgagcgtgtagatcaatcggtacgtgagggagttaaaggagtgtttggcgggcgagtgatgctcgtgcgctctcgtccataacggcccggtgttcgtcgtttattcctcggttacgtccgggatatcttttttgggttctttctggcccgtgttgatgtgccattgaatattgcccggtgccatggaaaagcggtgctgttctcagttctcaccaagaggtgcaggagaaaccagagtttaggctgtctccagcaacgttccctaaatttcgtcccctaaaggaatattctctgtactttacagaacactctaaaagattctgtcccctatatattctgtgtc

SEQ ID NO: 82300 - DNA, 278 bp, Zea Mays
ctgcaaaaggaacttcaatagatcagcattacgaggcacaacaacaagaattccactggatcgagctgttgaacggggtaccagaaggtggatttggtagtagcactgaacagtgggcaggaacgccttctatgtggatcctcttctcacgtgctcctcgacgcacgagcgcgaactcggaatctgggattggatcctctcctcctgctccacgcagagttgacaaaagaccccaaactttgctgcactaattctgtgtcacccctgctgggcttagg

SEQ ID NO: 82301 - DNA, 927 bp, Zea Mays
gctaccaaaccctaacttatgctatttggttacctgcatccggatctgatctagtagttactagtgcaacctagtggtgtgttcgggaacgtttccgagggcgggcggcggcccccagtggcgaagatgatccgactaccgacgtacgcagcaggaggcgtccgttgccatcttcttctcctttgagtatatgatactagcaacatccacagtatcaacattcgtgaagtatatattctatgttagtgacatgctaatggaaggtcaatgggagaaaaaggcagtgtatacattttacttggttcgtgagctatatgtgacttttcgcaacttcagaattcgcattgcagattatgtgcgctacagaaagatcacttccaacatgaatgaacgctttccagatgctacatcagaagagctcgatgtgagtgatgctacatgtattatttgccgtgaggaaatggctacagcaaagaaactgctcgatgggcatctgttccatgtgcattgtctaagagaaacaggagaacaggctgaagaagaggttcctctacggcttctccatgggagcttcagctccacaggaaggattctctctactgggacggtgccgtgctgcttgccccaatgtgcaagtagtgtcgaaggagcacaagatgatgtgtgagcacaaagtggccagcaagaatggagtcatggaacatcggcaggaggggtgcgacagcggcaaccgatgtatcccttggacaatctggttttgacatgatgcaaatcaatgtgctgtacattgtattctgcacttgcacagattgtttggctaattacaggattatctcaatgttttggtttggatttaaagtacacttatgtatgaaatatttattggtactcatctatattatattaattatattattattaaatata

SEQ ID NO: 82302 - DNA, 975 bp, Zea Mays
caatctccaggcctaggaaaaacaaccccggaccgcgtgcgtttcgcttccgcccctgctgtttctgtttcttggcgttcaccccctctttctctcgtggcgacgacgacgaccgtcgccttcccctacgcgctaggtgccagggtccgtcgggtccttcgctggcgacgggcaactaccaggcaacctagtggtgtgttcgggaacgtttccgagggcgggcggcggcccccagtggcgaagatgatccgactaccgacgtacgcagcaggaggcgtccgttgccatcttcttctcctttgagtatatgatactagcaacatccacagtatcaacattcgtgaagtatatattctataattcgcattgcagattatgtgcgctacagaaagatcacttccaacatgaatgaacgctttccagatgctacatcagaagagctcgatgtgagtgatgctacatgtattatttgccgtgaggaaatggctacagcaaagaaactgctcgatgggcatctgttccatgtgcattgtctaagagaaacaggagaacaggctgaagaagaggttcctctacggcttctccatgggagcttcagctccacaggaaggattctctctactgggacggtgccgtgctgcttgccccaatgtgcaagggttattgtatattaacaaccaacagtagtgtcgaaggagcacaagatgatgtgtgagcacaaagtggccagcaagaatggagtcatggaacatcggcaggaggggtgcgacagcggcaaccgatgtatcccttggacaatctggttttgacatgatgcaaatcaatgtgctgtacattgtattctgcacttgcacagattgtttggctaattacaggattatctcaatgttttggtttggatttaaagtacacttatgtatgaaatatttattggtactcatctatattatattaattatattattattaaatata

SEQ ID NO: 82303 - DNA, 920 bp, Zea Mays
caatctccaggcctaggaaaaacaaccccggaccgcgtgcgtttcgcttccgcccctgctgtttctgtttcttggcgttcaccccctctttctctcgtggcgacgacgacgaccgtcgccttcccctacgcgctaggtgccagggtccgtcgggtccttcgctggcgacgggcaactaccaggcaacctagtggtgtgttcgggaacgtttccgagggcgggcggcggcccccagtggcgaagatgatccgactaccgacgtacgcagcaggaggcgtccgttgccatcttcttctcctttgaaattcgcattgcagattatgtgcgctacagaaagatcacttccaacatgaatgaacgctttccagatgctacatcagaagagctcgatgtgagtgatgctacatgtattatttgccgtgaggaaatggctacagcaaagaaactgctcgatgggcatctgttccatgtgcattgtctaagagaaacaggagaacaggctgaagaagaggttcctctacggcttctccatgggagcttcagctccacaggaaggattctctctactgggacggtgccgtgctgcttgccccaatgtgcaagggttattgtatattaacaaccaacagtagtgtcgaaggagcacaagatgatgtgtgagcacaaagtggccagcaagaatggagtcatggaacatcggcaggaggggtgcgacagcggcaaccgatgtatcccttggacaatctggttttgacatgatgcaaatcaatgtgctgtacattgtattctgcacttgcacagattgtttggctaattacaggattatctcaatgttttggtttggatttaaagtacacttatgtatgaaatatttattggtactcatctatattatattaattatattattattaaatata

SEQ ID NO: 82304 - DNA, 709 bp, Zea Mays
caatctccaggcctaggaaaaacaaccccggaccgcgtgcgtttcgcttccgcccctgctgtttctgtttcttggcgttcaccccctctttctctcgtggcgacgacgacgaccgtcgccttcccctacgcgctaggtgccagggtccgtcgggtccttcgctggcgacgggcaactaccaggcaacctagtggtgtgttcgggaacgtttccgagggcgggcggcggcccccagtggcgaagatgatccgactaccgacgtacgcagcaggaggcgtccgttgccatcttcttctcctttgagtatatgatactagcaacatccacagtatcaacattcgtgaagtatatattctatgttagtgacatgctaatggaaggtcaatgggagaaaaaggcagtgtatacattttacttggttcgtgagctatatgtgacttttcgcaacttcagaattcgcattgcagattatgtgcgctacagaaagatcacttccaacatgaatgaacgctttccagatgctacatcagaagagctcgatgtagaaacaggagaacaggctgaagaagaggttcctctacggcttctccatgggagcttcagctccacaggaaggattctctctactgggacggtgccgtgctgcttgccccaatgtgcaaggccacattttgcaattaaccatgaagatctgacactgttatttcca

SEQ ID NO: 82305 - DNA, 703 bp, Zea Mays
cggcccaacgcgaagagcaggtacgtgattatcatcactacctgggtgcatatgaccaggacgcttcgtgggagtgtccttgacctgcggaagaagattgcaagttgaccctaggaatgcggtggtgccacaattttgaatctcaacaaagtcatgtatagcactcacaacataacaaacaagagaaagctgttccctacatgtttctacacataaaattcatggtttttttttcttactgtttgtcttcagaaaacggacccggttgcaagccttactgctttgtcaggctctcatgttctctactcacagtttttacccaacctattgctattggccagcacgagagaaattcaaaacctgagactgcaatgcagttttctaatagttcgaaagggagctaacatggttactacatttgggacgcgaggagctataaagacacaatggttcgctaccagatagtatctctcagtagtcagtgcccactaggccaaaaaaagcaatgtgaaattgatagagctattaaaagccaagaatggccccatcacatgaaagcaattatttcaaaagagtaaatagatgagtgaatacaagatattctgttacctgacaagatactcggaaacagcaccacctcccagccggccaaagaagttgcagaaactgaagacagagagtgagatggttgtgtcgacagcac

SEQ ID NO: 82306 - DNA, 4222 bp, Zea Mays
atttattttctgatactgcaaatataaactggacaggagcaacatcgtttcttttcaccgagtaccaatatgttggtatcttcatggctatcttcgctgttgtgatcttcctcttccttggttcggttgagggattcagcacgaagagccagccctgcacatatagcaaggacaagtactgcaagcctgcgctgttcactgcactctttagcactgtgtccttcttgcttggagccatcacctctctggtctctggtttccttggcatgaagattgccacatatgcgaatgccagaactaccctggaagctaggaagggtgttggcaaggcttttatcactgctttccgctctggcgctgttatgggtttcctgcttgcatcaagtgggcttgtggttctgtacatcacaattaatgtatttaagttgtattacggtgatgactgggagggtctttttgagtccatcactggctatggtcttggtgggtcgtccatggctctcttcggaagagttggtggaggtatctacacaaaggctgctgatgttggtgccgatcttgttggaaaggtcgagaggaacattcctgaggatgatcctaggaacccagctgtgattgctgataatgtcggtgacaatgttggtgacattgctggaatgggatctgatctctttgggtcatacgcagagtcttcttgtgctgcccttgttgttgcgtctatttcatctttcggaatcgaccatgatttcactgggatgtgctacccactccttgttagctctgttggtatcattgtctgcttgatcaccaccctttttgctactgatttctttgaagtcaaggctgtgaaagaaattgagcctgcacttaagaagcagctcatcatctccaccgtcctgatgacttttggtattgctctaatcagctggttggcccttccagctaagttcaccatctacaacttcggtactcagaaggaggtttccaactggggtttgttcttctgtgtttcaattggtctgtgggctggtttgattattggttttgtcacagaatactacactagcaatgcatacagtcctgtgcaagatgttgcggattcgtgcagaactggtgctgccactaatgtcatttttggtcttgctcttggatacaagtctgttatcatcccgattttcgctattgctgttagcatctatgtcagtttctccattgctgcgatgtacggcattgcagttgccgctcttggtatgctgagcacaatcgcaactggtcttgctattgatgcttatggtcccatcagtgacaatgctggtggtattgctgagatggctggaatgagccacagaatccgtgagagaactgatgctcttgatgctgctggcaacacaactgctgctattggaaaggggtttgccattggttcagctgctcttgtgtccctggcgctttttggtgcctttgtcagcagagctggagtgaaggtcgtcgacgtcctctcccccaaggttttcattggtttgattgttggagccatgcttccgtactggttctctgccatgaccatgaagagtgttggaagcgctgccctgaagatggtggaggaggtccgcaggcagttcaacaccattcctgggttgatggagggaacagccaagcccgactacgcaacctgtgtgaagatctccactgatgcttccatcaaggagatgattcctccgggcgctctggtcatgctgactcccctcatcgttggaaccctctttggcgtcgagactctctccggcgttcttgctggtgccctggtttctggagtgcagatcgccatctctgcttccaacaccggcggtgcatgggacaatgccaagaagtacatcgaggctggtgccagcgagcacgcgaggaccctcggtcccaagggatccgactgccacaaggccgctgtgatcggtgacaccattggtgaccccctgaaggacacctccggcccgtccctcaacatcctcatcaagctcatggccgtggagtccctcgtgtttgcccccttctttgccacccagggtggcctgctcttcaagtacctgtaaaagggacaacaccaagcacacagcagaagtatacgatctcccgaccgaccgtggacaatatcgaataactcctgccaaatcgccagttccttttgtgtactgtgcgctagccgccgcctagctgcactgctgtatttttgtttcaggattgctgctgctgttcgcattcaatctttgggcctcccggagccgccggaggcgcgttttactgttagccttactactcttactccctgtagctccacgtagaagaaaccgatgtcctgcgtctggcaatttttcttagtcccttgatgatggcgatgatgctgaaacctttttttgaacaatgatacatgatgattgttgcgttgtactggtggtaaatcacggtccgtattggcctgttctgttggtgcccatttccaatcatccaatgtcgtgctctgcgttatacgattgctgtttgtactgtcatagctgctgccgacaaggtcataaagaaccttaaacttgaagccagatcgagttctcttcttttctcggtgctccacaatattctggtatttctttggttctaggcaaagtaattcttagatgctttccgttattttttttgctctttttgaaaagctgatgctttccttgagctcaccaaatttcgttagtaccgctcttacgtcgatttcactggtgtttccaaccatgaacagaaagacaaacgggaacgagtttttccctttcccatcgctgatcatcataaatttcttcgaccttttacaattccaatcgtaaaaagaaaacaaactcacccccattgcattgcatcccttttctttcgacagatgccttgcacctcacttcacctcatctcaccagatggaaagcttagctgtccatcatcaccaatcacgccaaacccattatgaatctacccatctaaaccgctactctaccggtctaccctacacgccggggcactgaaatgcggaacgcgagcgaacacgatggagtagggcgtgacggcgatgggccgcgccgcgtccacctcgaccgcctccagggcggggatgttccccgccgcgtcggtggccaacgccctgccgttcagcatcacgacctggctcgtcaggtcgccgtccttgggggtgaggtggtactcgtgtctcacggcgcccgccgccgcctcgccgccgccggcgaagccggggacgtgcacgtgccggaacttcctgccgccgccgtgcttcctcgcgtcgtgcctgtgcctgtgcgcgtgcgccgcggcagccccttgggccgtcaccgagacccgcgcggtggcgttgccgctcaggttgatcagcagcagagtgattcctggctggacgcaacatcgagagagcgtgaattctctaggagatgaaaaaaaagggcggctgaattgcttactgaatctctcgcgcagtgcgcgtacgcgcggatcttgttcgtgccgctgaatgttactgctagaactttggtccccatgaggcgatgccacagtagagcactgcagagaaaatcgggaggagttgtgtcatttgaaacaagacaagtccatttcgtcggtgttacaaggctaggtttttttcgtcaagtgtttatacgtactaaacttgttcttacctgtaatagtcagggttaggctggaacgtcgtggtgtttagcaggccgtagttgccgccgaccaaactctgcctgcagtagctcttggtgtcgaacctcgctgccatcccaagctgatctaaaaaccttgcaaaaaagaagaaaaaaaaacactcaaaacaaacacatatccaagaacagccacagaaccccgacacaccggacagctcgtcagcgtaccagaagctgaacacgaacgcgtcagtgacgaggtggcggccgctgttgtaggcgcctccggcttccccgacccacgccacagccgacgtccccgtggacttgagcagccgctggaggtcgctgaacgtgctgaccatcccgtcgagggttgacgggtcgaggatcttgtcgatcaggtgcgtgtcccttcctgcaatgtattgtttttccttcagtcagtgtctctgtatgcgtcagccaaaccatgaacgacgcaaagtagccgcgagcgtgcctggtcctagattgta

SEQ ID NO: 82307 - DNA, 2031 bp, Zea Mays
ggcgaatctcccttcttctccggtatccaccaccgcttcatctcggtaccgcgactcgtcgacatttcggcaccgccttccgccttccgccgcccagaccggcgaccggctacctgtctatgctgccttcctgcctccaggatctcccacgacggcacgaattgcctccgcccgtggttgatttcggttaggccttgccttgccgcttaattcagatgaggtgttgttgaggtcttgaggacatcacgtcgtcactagtggactatttctaaatccagtttgtcaagtgagtggacgaccccaagcctctttgctagccagtgaaatccaccaataaacaaactctggaaaaaaaatccaggagagcattccacttatggcggatgaatcatggaggattcctatgttagtgcaagaactggcggccaaggtgcagcaaccaccaagcaggtacatgcagccggagcagtatcatcctgtcagcctagacgttggtgccgagacactggagcccatccctgtgatcgacctcagccggctgtcgactgctggtggtgccgacgacgacgagagcggcaagctccggttggccctgcagacctggggggctcttcctggttgctaaccatggcatagaaaccgatttgatggacgatttaatggaagcgtcaagagagtttttccatctgccgctcgatcgaagagaagcacaagtgcagcaacttgatagacggcaggcatttccaggtggaaggatatggaaatgagacccagtgagatccgaggatcagagccttgactggatggatggatcgactgcatctcagtcagggtagaaccggaagacgagaggaatctcgtccattggcctcagcatcccaaaactttcaggggtcttttacatgagtacacattgaactgcaagagaatcaaggactgtatccttgggacaacagccaagactttagggcttggcgaagactgtttcgccagatttaactactacccgccgtgtccaaggccggatctcgtctttggcgtgaagcctcactcggacagtagtggtgtccttaccattcttctcatcgacaaagacgtcagtggactgcaagttctcagggatggcgtgtggcacaataatgtcccagctagtcctttcatgttgctgattaacgtaggagacttcatggaggctgtcggtttgacgaccttgacggacgcagataattagcaacggggtcttgaggagcccggtgcacagggcggtgagcaacgcggagaaggagaggatctcgttggccatgttccacggcctggatcccgacgaagagattgagccggcgcccgctgctcttttaagcgagaaccagccggcgcggtacaggacactgaaggccaaggagtacctgctggccgggttctatgaacattttttttgtagattcatcgagtctgtgaagatccatctaaacgaggtttgatgtctcagttccccggctgcgtgacgaaagcattgttttgtttgtctcttagttcgaatctacgtcgtttagaggcgtcttagatggtctgtcgatcccaaaacaaatcctaagacctctcctccccgacgggtccctcttaggaccgagatcctagtgctgttggtgaactccgtcgtctatacgcacgcgcggaccatctaactcgtcgggcagaaaccctaacctctgcgcaggtcgtggaccgtccgcgcttccgtagagagcgccgctaccggtactcattgcactgattggcgccagactggcgccaacacatactaatggcttattcgttttcgtggattggagtgaatgagacggatttaaatctataataagtcaaaatctctactgatttttttatttttttttttgcaatcctatccgatctcaacaacagagtctaaaatgtagttatatctcttgtgacaatgactaagggggtgtttggtttgcccctgctaaaatttagctcctatcacatcgaatgtttgaacctccgttcggg

SEQ ID NO: 82308 - DNA, 2466 bp, Zea Mays
gtctactacattatattgattgttttggtatcaccgcctaatattataatactacaatctcaatcgtcataatggggatactaaatttcagaagccagcagctcgcggcgaatctcccttcttctccggtatccaccaccgcttcatctcggtaccgcgactcgtcgacatttcggcaccgccttccgccttccgccgcccagaccggcgaccggctacctgtctatgctgccttcctgcctccaggatctcccacgacggcacgaattgcctccgcccgtggttgatttcggttaggccttgccttgccgcttaattcagatgaggtgttgttgaggtcttgaggacatcacgtcgtcactagtggactatttctgtgagtaccttccttcagaggacaaaaaaatcgaagtagctctctatcaagcagctgattgaaccctcttgctgcctagagaaatttggtactcgtaaatgtttaatttcatctgtcctattttagggcatgttcgttcgtttctgtagacgggacgggatagtggaatagtcggtcaacattcttcctattttttttttcaatctcatccaatctatacgaaataagaataatcggacaaggctatatagattttgtaatggcagggatgacttgtcgctctattttttgacagtaactgtatggatttaatgtattgaattaagacaacaactacaaattaataattgtcctttccagaaatccagtttgtcaagtgagtggacgaccccaagcctctttgctagccagtgaaatccaccaataaacaaactctggaaaaaaaatccaggagagcattccacttatggcggatgaatcatggaggattcctatgttagtgcaagaactggcggccaaggtgcagcaaccaccaagcaggtacatgcagccggagcagtatcatcctgtcagcctagacgttggtgccgagacactggagcccatccctgtgatcgacctcagccggctgtcgactgctggtggtgccgacgacgacgagagcggcaagctccggttggccctgcagacctggggggctcttcctggttgctaaccatggcatagaaaccgatttgatggacgatttaatggaagcgtcaagagagtttttccatctgccgctcgatcgaagagaagcacaagtgcagcaacttgatagacggcaggcatttccaggtggaaggatatggaaatgagacccagtgagatccgaggatcagagccttgactggatggatggatcgactgcatctcagtcagggtagaaccggaagacgagaggaatctcgtccattggcctcagcatcccaaaactttcaggggtcttttacatgagtacacattgaactgcaagagaatcaaggactgtatccttgggacaacagccaagactttagggcttggcgaagactgtttcgccagatttaactactacccgccgtgtccaaggccggatctcgtctttggcgtgaagcctcactcggacagtagtggtgtccttaccattcttctcatcgacaaagacgtcagtggactgcaagttctcagggatggcgtgtggcacaataatgtcccagctagtcctttcatgttgctgattaacgtaggagacttcatggagataattagcaacggggtcttgaggagcccggtgcacagggcggtgagcaacgcggagaaggagaggatctcgttggccatgttccacggcctggatcccgacgaagagattgagccggcgcccgctgctcttttaagcgagaaccagccggcgcggtacaggacactgaaggccaaggagtacctgctggccgggttctatgaacattttttttgtagattcatcgagtctgtgaagatccatctaaacgaggtttgatgtctcagttccccggctgcgtgacgaaagcattgttttgtttgtctcttagttcgaatctacgtcgtttagaggcgtcttagatggtctgtcgatcccaaaacaaatcctaagacctctcctccccgacgggtccctcttaggaccgagatcctagtgctgttggtgaactccgtcgtctatacgcacgcgcggaccatctaactcgtcgggcagaaaccctaacctctgcgcaggtcgtggaccgtccgcgcttccgtagagagcgccgctaccggtactcattgcactgattggcgccagactggcgccaacacatactaatggcttattcgttttcgtggattggagtgaatgagacggatttaaatctataataagtcaaaatctctactgatttttttatttttttttttgcaatcctatccgatctcaacaacagagtctaaaatgtagttatatctcttgtgacaatgactaagggggtgtttggtttgcccctgctaaaatttagctcctatcacatcgaatgtttgaacctccgttcggg

SEQ ID NO: 82309 - DNA, 1936 bp, Zea Mays
gtctactacattatattgattgttttggtatcaccgcctaatattataatactacaatctcaatcgtcataatggggatactaaatttcagaagccagcagctcgcggcgaatctcccttcttctccggtatccaccaccgcttcatctcggtaccgcgactcgtcgacatttcgaaatccagtttgtcaagtgagtggacgaccccaagcctctttgctagccagtgaaatccaccaataaacaaactctggaaaaaaaatccaggagagcattccacttatggcggatgaatcatggaggattcctatgttagtgcaagaactggcggccaaggtgcagcaaccaccaagcaggtacatgcagccggagcagtatcatcctgtcagcctagacgttggtgccgagacactggagcccatccctgtgatcgacctcagccggctgtcgactgctggtggtgccgacgacgacgagagcggcaagctccggttggccctgcagacctggggggctcttcctggttgctaaccatggcatagaaaccgatttgatggacgatttaatggaagcgtcaagagagtttttccatctgccgctcgatcgaagagaagcacaagtgcagcaacttgatagacggcaggcatttccaggtggaaggatatggaaatgagacccagtgagatccgaggatcagagccttgactggatggatggatcgactgcatctcagtcagggtagaaccggaagacgagaggaatctcgtccattggcctcagcatcccaaaactttcaggggtcttttacatgagtacacattgaactgcaagagaatcaaggactgtatccttgggacaacagccaagactttagggcttggcgaagactgtttcgccagatttaactactacccgccgtgtccaaggccggatctcgtctttggcgtgaagcctcactcggacagtagtggtgtccttaccattcttctcatcgacaaagacgtcagtggactgcaagttctcagggatggcgtgtggcacaataatgtcccagctagtcctttcatgttgctgattaacgtaggagacttcatggaggctgtcggtttgacgaccttgacggacgcagataattagcaacggggtcttgaggagcccggtgcacagggcggtgagcaacgcggagaaggagaggatctcgttggccatgttccacggcctggatcccgacgaagagattgagccggcgcccgctgctcttttaagcgagaaccagccggcgcggtacaggacactgaaggccaaggagtacctgctggccgggttctatgaacattttttttgtagattcatcgagtctgtgaagatccatctaaacgaggtttgatgtctcagttccccggctgcgtgacgaaagcattgttttgtttgtctcttagttcgaatctacgtcgtttagaggcgtcttagatggtctgtcgatcccaaaacaaatcctaagacctctcctccccgacgggtccctcttaggaccgagatcctagtgctgttggtgaactccgtcgtctatacgcacgcgcggaccatctaactcgtcgggcagaaaccctaacctctgcgcaggtcgtggaccgtccgcgcttccgtagagagcgccgctaccggtactcattgcactgattggcgccagactggcgccaacacatactaatggcttattcgttttcgtggattggagtgaatgagacggatttaaatctataataagtcaaaatctctactgatttttttatttttttttttgcaatcctatccgatctcaacaacagagtctaaaatgtagttatatctcttgtgacaatgactaagggggtgtttggtttgcccctgctaaaatttagctcctatcacatcgaatgtttgaacctccgttcggg

SEQ ID NO: 82310 - DNA, 1311 bp, Zea Mays
ctaggagtagacggatcggagacgagcactctatataccgtactagccagagcgccactcattgtgctatcgtcggttcgtcgggcgtagcggcagcgatgatattttagtcgtactcgtacagaagccacagccctctgctagctagctagctcctgctagaatggaaagtgcaggaggggaagctcggccggtgctgccgccgccgccgccgccggtgcaagagctcgccggcgcagcgaacgacgtgccagctcggtacgtcgcgcgcgcaggcaacgagcccaaggtcacggtaaccgcgccggtcccggtcatcgacctcgcccggctgtgccagccgggcggcggcgccgacgaggcctcgaagctccggctggcgctcgagtcctggggtctcttcctggtgaccaaccacggcatcgaggccactctcatggacgccatgatggacgcgtcgagggagttcttcaggcagccgctccaggagaagcagaagcacagcaacatgatcgacggcaagcacttccagctccaagggtacgggaacgaccgggtggcgtcggaggaccaggtcctggactggtgcgaccgcctttacctcttggtggagcctcaggaggacaggagccttgacctatggcccgcatgtctaagggacgttctgcacgatttcaccacagagtgcacgagagtgaaggactgcctgcttcgagaaatggcgaaggcgctagatgagctcggcgacgacgacgactacttcatcgaccagttcggcgacagggccgacacccatgccaggttttccgggacggagcctggtacgacgtgcgcaccagacctcacaccctgctcgtcaatctaggagaccaaatagagataataagcaatgggatcttcaagagcccagtgcaccgggttgtaacaaacgcggagaaagagaggctatcagtggttctgttctattctatagatcctgagagagaaatccggcccgctgacaaactgatagacgagaaccatccagcactatacaagaaggtgaaagtcaaagaatatactgctggactctacgaacatttctctcgagggaaattggttaaagagactgcaaagatatagcttgttcgctttggattaaatccatggactaatccttagagacaaaaacactgtataagtagtaaaagtcggtacgaattaaagctcaagctagtcgtatctatgtaatgaataagggtgaaacctttgcgatcctagataataaatgaaattaatttttaataaaataaagtgtatatagttcgttgc

SEQ ID NO: 82311 - DNA, 1327 bp, Zea Mays
ctaggagtagacggatcggagacgagcactctatataccgtactagccagagcgccactcattgtgctatcgtcggttcgtcgggcgtagcggcagcgatgatattttagtcgtactcgtacagaagccacagccctctgctagctagctagctcctgctagaatggaaagtgcaggaggggaagctcggccggtgctgccgccgccgccgccgccggtgcaagagctcgccggcgcagcgaacgacgtgccagctcggtacgtcgcgcgcgcaggcaacgagcccaaggtcacggtaaccgcgccggtcccggtcatcgacctcgcccggctgtgccagccgggcggcggcgccgacgaggcctcgaagctccggctggcgctcgagtcctggggtctcttcctggtgaccaaccacggcatcgaggccactctcatggacgccatgatggacgcgtcgagggagttcttcaggcagccgctccaggagaagcagaagcacagcaacatgatcgacggcaagcacttccagctccaagggtacgggaacgaccgggtggcgtcggaggaccaggtcctggactggtgcgaccgcctttacctcttggtggagcctcaggaggacaggagccttgacctatggcccgcatgtctaagggacgttctgcacgatttcaccacagagtgcacgagagtgaaggactgcctgcttcgagaaatggcgaaggcgctagatgagctcggcgacgacgacgactacttcatcgaccagttcggcgacagggccgacacccatgccagcgtcggcgggcttcaggttttccgggacggagcctggtacgacgtgcgcaccagacctcacaccctgctcgtcaatctaggagaccaaatagagataataagcaatgggatcttcaagagcccagtgcaccgggttgtaacaaacgcggagaaagagaggctatcagtggttctgttctattctatagatcctgagagagaaatccggcccgctgacaaactgatagacgagaaccatccagcactatacaagaaggtgaaagtcaaagaatatactgctggactctacgaacatttctctcgagggaaattggttaaagagactgcaaagatatagcttgttcgctttggattaaatccatggactaatccttagagacaaaaacactgtataagtagtaaaagtcggtacgaattaaagctcaagctagtcgtatctatgtaatgaataagggtgaaacctttgcgatcctagataataaatgaaattaatttttaataaaataaagtgtatatagttcgttgc

SEQ ID NO: 82312 - DNA, 1524 bp, Zea Mays
ctttccttcgtcagttccgggcttccggccttctatggagaagcttccttcagtgagtcctccctttccgtttaaggcagcaagcaggagcagacaggaggcgccgagagcccagcgtcggagatctccgccgccatggagacgctggccagcgccatgcggcgcgagaaccgccggtccaaggccccgccctcctcctctgcttcctccgccctcgcctcgggcagggtccctctcgtcatggccttcctctcctgcctcgcctggctctacgtcgccggccgtttgtggcaggacgcgcagacccgggcgatcctgtccggcctcctcgagaagagctctaccagcgtcccgaaggtgctctcggtggaggacaagcttaggaaccttgggtgcaaggcgattggaaggaaaattgttgaggcggagatggacctgaccaaggccaagagcgaggggtacctgtgggggaacaggactgcagctgtggactccgacaagaagcagcagcttcttgccgtcattggagtttacactgggtttggctcccgtctcaagaggaacgtcttccgtggctcctggatgccaagaggtgatgctctgaagaagcttgaggaaaagggtgtagctattcgttttgttattggtcggagtgcaaatcgaggtgatagcttggaccgtaatattgatgatgaaaatcggcagacaaaggacttcttgattctttaagcattttggattgggcaggaaagtcatgaagaggctgcagaagaattaccgagcaaagcaaaaattttcttcagtgctgcagttgaagcctgggatgcagaattttatgtcaaagttgaagataacattaatcttgacttagctgggttaattgagatgctcgaaggccgtcgaggtagccaaggattgtacatgggttgtatgaaatcagggatggtcataagtgaagagggccaacaatggtatgaacctgagtggtggaaatttggagattcaaaaacgtattttcgacacgcttctggttctttgtttatcctctcaaaaaatttggctcgctacatcaacataaatagtgcgtcactgcagagttatgcacacgatgatatatcagtaggttcatggatgatgggactgaatgcaacttacgtggatgatgaccggttgtgctgcagcagttccagacaagagaaaatctgttccaatgcttgagcggaaggcgtggctgctggcctgttgctgtacatcctgatgaagattttgcacacctgtcattttgtatacactgctttcgtgaaccggaaaaggctactatccagatagaaacggcttgcaccaaaatttaggaacttccatcaaaaagaaaaaaaaagaacaattttttccatccatgagtattgttggaactaatattgggtctgtttgtttcggcttctggcagcttctggccaccaaaagctgctacagactgtcaaccgctcagcttttcagccagcttctataaaattcgttagggca

SEQ ID NO: 82313 - DNA, 1463 bp, Zea Mays
ctttccttcgtcagttccgggcttccggccttctatggagaagcttccttcagtgagtcctccctttccgtttaaggcagcaagcaggagcagacaggaggcgccgagagcccagcgtcggagatctccgccgccatggagacgctggccagcgccatgcggcgcgagaaccgccggtccaaggccccgccctcctcctctgcttcctccgccctcgcctcgggcagggtccctctcgtcatggccttcctctcctgcctcgcctggctctacgtcgccggccgtttgtggcaggacgcgcagacccgggcgatcctgtccggcctcctcgagaagagctctaccagcgtcccgaaggtgctctcggtggaggacaagcttaggaaccttgggtgcaaggcgattggaaggaaaattgttgaggcggagatggacctgaccaaggccaagagcgaggggtacctgtgggggaacaggactgcagctgtggactccgacaagaagcagcagcttcttgccgtcattggagtttacactgggtttggctcccgtctcaagaggaacgtcttccgtggctcctggatgccaagagtgcaaatcgaggtgatagcttggaccgtaatattgatgatgaaaatcggcagacaaaggacttcttgattctttaagcattttggattgggcaggaaagtcatgaagaggctgcagaagaattaccgagcaaagcaaaaattttcttcagtgctgcagttgaagcctgggatgcagaattttatgtcaaagttgaagataacattaatcttgacttagctgggttaattgagatgctcgaaggccgtcgaggtagccaaggattgtacatgggttgtatgaaatcagggatggtcataagtgaagagggccaacaatggtatgaacctgagtggtggaaatttggagattcaaaaacgtattttcgacacgcttctggttctttgtttatcctctcaaaaaatttggctcgctacatcaacataaatagtgcgtcactgcagagttatgcacacgatgatatatcagtaggttcatggatgatgggactgaatgcaacttacgtggatgatgaccggttgtgctgcagcagttccagacaagagaaaatctgttccaatgcttgagcggaaggcgtggctgctggcctgttgctgtacatcctgatgaagattttgcacacctgtcattttgtatacactgctttcgtgaaccggaaaaggctactatccagatagaaacggcttgcaccaaaatttaggaacttccatcaaaaagaaaaaaaaagaacaattttttccatccatgagtattgttggaactaatattgggtctgtttgtttcggcttctggcagcttctggccaccaaaagctgctacagactgtcaaccgctcagcttttcagccagcttctataaaattcgttagggca

SEQ ID NO: 82314 - DNA, 1462 bp, Zea Mays
ctttccttcgtcagttccgggcttccggccttctatggagaagcttccttcagtgagtcctccctttccgtttaaggcagcaagcaggagcagacaggaggcgccgagagcccagcgtcggagatctccgccgccatggagacgctggccagcgccatgcggcgcgagaaccgccggtccaaggccccgccctcctcctctgcttcctccgccctcgcctcgggcagggtccctctcgtcatggccttcctctcctgcctcgcctggctctacgtcgccggccgtttgtggcaggacgcgcagacccgggcgatcctgtccggcctcctcgagaagagctctaccagcgtcccgaaggtgctctcggtggaggacaagcttaggaaccttgggtgcaaggcgattggaaggaaaattgttgaggcggagatggacctgaccaaggccaagagcgaggggtacctgtgggggaacaggactgcagctgtggactccgacaagaagcagcagcttcttgccgtcattggagtttacactgggtttggctcccgtctcaagaggaacgtcttccgtggctcctggatgccaagaggtgatgctctgaagaagcttgaggaaaagggtgtagctattcgttttgttattggtcggagtgcaaatcgaggtgatagcttggaccgtaatattgatgatgaaaatcggcagacaaaggacttcttgattcttgaaagtcatgaagaggctgcagaagaattaccgagcaaagcaaaaattttcttcagtgctgcagttgaagcctgggatgcagaattttatgtcaaagttgaagataacattaatcttgacttagctgggttaattgagatgctcgaaggccgtcgaggtagccaaggattgtacatgggttgtatgaaatcagggatggtcataagtgaagagggccaacaatggtatgaacctgagtggtggaaatttggagattcaaaaacgtattttcgacacgcttctggttctttgtttatcctctcaaaaaatttggctcgctacatcaacataaataggttcatggatgatgggactgaatgcaacttacgtggatgatgaccggttgtgctgcagcagttccagacaagagaaaatctgttccaatgcttgagcggaaggcgtggctgctggcctgttgctgtacatcctgatgaagattttgcacacctgtcattttgtatacactgctttcgtgaaccggaaaaggctactatccagatagaaacggcttgcaccaaaatttaggaacttccatcaaaaagaaaaaaaaagaacaattttttccatccatgagtattgttggaactaatattgggtctgtttgtttcggcttctggcagcttctggccaccaaaagctgctacagactgtcaaccgctcagcttttcagccagcttctataaaattcgttagggca

SEQ ID NO: 82315 - DNA, 1490 bp, Zea Mays
ctttccttcgtcagttccgggcttccggccttctatggagaagcttccttcagtgagtcctccctttccgtttaaggcagcaagcaggagcagacaggaggcgccgagagcccagcgtcggagatctccgccgccatggagacgctggccagcgccatgcggcgcgagaaccgccggtccaaggccccgccctcctcctctgcttcctccgccctcgcctcgggcagggtccctctcgtcatggccttcctctcctgcctcgcctggctctacgtcgccggccgtttgtggcaggacgcgcagacccgggcgatcctgtccggcctcctcgagaagagctctaccagcgtcccgaaggtgctctcggtggaggacaagcttaggaaccttgggtgcaaggcgattggaaggaaaattgttgaggcggagatggacctgaccaaggccaagagcgaggggtacctgtgggggaacaggactgcagctgtggactccgacaagaagcagcagcttcttgccgtcattggagtttacactgggtttggctcccgtctcaagaggaacgtcttccgtggctcctggatgccaagaggtgatgctctgaagaagcttgaggaaaagggtgtagctattcgttttgttattggtcggagtgcaaatcgaggtgatagcttggaccgtaatattgatgatgaaaatcggcagacaaaggacttcttgattcttgaaagtcatgaagaggctgcagaagaattaccgagcaaagcaaaaattttcttcagtgctgcagttgaagcctgggatgcagaattttatgtcaaagttgaagataacattaatcttgacttagctgggttaattgagatgctcgaaggccgtcgaggtagccaaggattgtacatgggttgtatgaaatcagggatggtcataagtgaagagggccaacaatggtatgaacctgagtggtggaaatttggagattcaaaaacgtattttcgacacgcttctggttctttgtttatcctctcaaaaaatttggctcgctacatcaacataaatagagttatgcacacgatgatatatcagtaggttcatggatgatgggactgaatgcaacttacgtggatgatgaccggttgtgctgcagcagttccagacaagagaaaatctgttccaatgcttgagcggaaggcgtggctgctggcctgttgctgtacatcctgatgaagattttgcacacctgtcattttgtatacactgctttcgtgaaccggaaaaggctactatccagatagaaacggcttgcaccaaaatttaggaacttccatcaaaaagaaaaaaaaagaacaattttttccatccatgagtattgttggaactaatattgggtctgtttgtttcggcttctggcagcttctggccaccaaaagctgctacagactgtcaaccgctcagcttttcagccagcttctataaaattcgttagggca

SEQ ID NO: 82316 - DNA, 1473 bp, Zea Mays
gcatctgttccggtgagtcattagaagatgctttgaggcaattatacctcattgatgcaattgatgaaaacggacaaataacggatgttggacgagttatggcagagcttcctcttgagccgtctctttcaaggactttgattgaagcaaatgaattgggatgcctatctcaggcgttaactgttgcatcgattttgtcagcagaaataacattgcgatcagttagcaaggacgtggtggatggaaagaggaaaaggcaggagctccctgatgggtctggctggggtgaccatatacaattgcttcagatatttgaaagctgggaccaaactggctatgacacaaaatggtgctctcatcatgatttgcaggtgcggggtatgaaattgagcaaagatgtgaggaaccaactatgtcagattattcaaaaaattgcaaaaggttcaactgatgtggatgcaaggaaaagccggaagaatgaccctgattatagaaagctgaggagagctctctgcgtaggatatggtaaccagctagctgagaggatgctgcatcacaatggctaccatactgttggctataggacccaacttgtacaggtgcatccatcttctgtactggaaggcgatgagtatggaaagtttccaatgtacgttatttatcatgagctgataagtacaactcgtccatacatgagaaatgtctgcgccgtcgagcaagcctgggttcagcctatattaaagaagctcgacaaattagacataaacagattaagtggtggttcgagtgcaccgggagattctgaacttctgggagacaataagcaagtgaactcgtcaaagaatgacgtgggtgtaaaacaatcagaggtggacagtaaaatccaggcagctcgagagcggtaccttgcacgaaaaggcaagaaatgacaatcgacacgtttaactgatcgctcagcatccttctggtcagcctgaagcttctctgaagatcataccgaggaaccattcgtgttattgtgggtggtgtatgcttcaacgtgcacaaacaagagaatttcttatgtaatcttttgtttgaggactctaaccttttcttttatttggcattactgtgatgtgaccttttccttgggccgaaatattttacaggcttttctgcatgggctagattcttttcccccatattcctatatggtgttgtctgttgaggtcttgtccctcctgcctagcatatgttgagtcccaagcaaggcaacaccgcaatatgatgcgatcttggaagtgatactgatatgcgctctgcttgggtttctctaacaaattttagagtcccgctctccctccctccgttccaaaatataatttgttttagattaattacacattcattaagtaacatatgaatataatttgtatgtatattcattatcatttgaatgaatgtggacaaaaaaaagtgggctagaaggaa

SEQ ID NO: 82317 - DNA, 2965 bp, Zea Mays
gaataacctgtgttggtagactaccagagatgtcttgaactattctccaccaatcattccactttatcaacagtgttagttatatttataaatcaagttcgtgattgattgtggttatgtaaagcagcgccaatacaatccatcaagtggaatgtattcacttgatgttgtccaaatcagcagagtgcaggctgatcagcgagcagggcgagctggtagaactcggcccggcaagtgctataggctatacccaatttccatatatcagaatgagtttcttgaggcaacagtccctgaaattcaacgctcttctcttgctggaagtgttctgtatctgaaatcgttaaatcttccagacatcaacatactgaagtttgattttctagatccaccatcacgtaagataaaacttcagattctttattcttatagtttcaatcattcttgtggacctgtctgtatgcacctatttgttgcctagttacttattttgtttggagttcgatggctaatttctttttttctcgaacacgcaggagagctacgtatcattatattaaaagaagaaataaacaaggtctaaaatagaccggggtacaattgacgccttacggcagcctgaacgacactaacatagactgacttatctatataactctaggctacatgagagagggaagcaacaagggaggtcaaccccttggccccggcagtctcccacagacggcgctcatccccaacatggattaggaaattagcaatattaggggaaaggccatcaaagatgcatctgttccggtgattccacaaaatttcaactgactgttttctgaagcattgcaaaattatgttattactatgaagtccagtgaagaaactacttttgtgatgactactcatgtcacttttgaattgttacacgtggttaggggaggaaacctcttggaggttgtagttctgatgggtggtatggtagggtgatgggctttgttgctggcaactcgtgatggtttttccagccttggtgaacattggcagtggctacagcttgggcaggggctggtggcagcgcaaaggagagtgagagggaactttaaggcaaaaacacttttctggttaatccatatggatacatccaaaagatgttatatatatgatccacccttcttaattcaattcaagctttcgccacaaagctctcttattctctaatactgataactttttggcggccccgaattggaggggtatggaggttgcagcatgctagccgtaccctctggttgctgcaacatgtagatgtaggtggtggctactgcctcttgggttcagctgggctgcttggcccatgggcattatgccaaaaacataaatgtgtaaaagtgtacttacagaagacataaatggccaaaagggggagctatttggtgccttgaaataaataaaataaaaaatatgttctttggcttctgcctactatttaaaatttacaaatgatttgcaggtgagtcattagaagatgctttgaggcaattatacctcattgatgcaattgatgaaaacggacaaataacggatgttggacgagttatggcagagcttcctcttgagccgtctctttcaaggactttgattgaagcaaatgaattgggatgcctatctcaggcgttaactgttgcatcgattttgtcagcagaaataacattgcgatcagttagcaaggacgtggtggatggaaagaggaaaaggcaggagctccctgatgggtctggctggggtgaccatatacaattgcttcagatatttgaaagctgggaccaaactggctatgacacaaaatggtgctctcatcatgatttgcaggtgcggggtatgaaattgagcaaagatgtgaggaaccaactatgtcagattattcaaaaaattgcaaaaggttcaactgatgtggatgcaaggaaaagccggaagaatgaccctgattatagaaagctgaggagagctctctgcgtaggatatggtaaccagctagctgagaggatgctgcatcacaatggctaccatactgttggctataggacccaacttgtacaggtgcatccatcttctgtactggaaggcgatgagtatggaaagtttccaatgtacgttatttatcatgagctgataagtacaactcgtccatacatgagaaatgtctgcgccgtcgagcaagcctgggttcagcctatattaaagaagctcgacaaattagacataaacagattaagtggtggttcgagtgcaccgggagattctgaacttctgggagacaataagcaagtgaactcgtcaaagaatgacgtgggtgtaaaacaatcagaggtggacagtaaaatccaggcagctcgagagcggtaccttgcacgaaaaggcaagaaatgacaatcgacacgtttaactgatcgctcagcatccttctggtcagcctgaagcttctctgaagatcataccgaggaaccattcgtgttattgtgggtggtgtatgcttcaacgtgcacaaacaagagaatttcttatgtaatcttttgtttgaggactctaaccttttcttttatttggcattactgtgatgtgaccttttccttgggccgaaatattttacaggcttttctgcatgggctagattcttttcccccatattcctatatggtgttgtctgttgaggtcttgtccctcctgcctagcatatgttgagtcccaagcaaggcaacaccgcaatatgatgcgatcttggaagtgatactgatatgcgctctgcttgggtttctctaacaaattttagagtcccgctctccctccctccgttccaaaatataatttgttttagattaattacacattcattaagtaacatatgaatataatttgtatgtatattcattatcatttgaatgaatgtggacaaaaaaaagtgggctagaaggaa

SEQ ID NO: 82318 - DNA, 2283 bp, Zea Mays
gtatgaatggagaattgaagtgatatgatatccttttaggtttgatgaaaagattgatcaaggaccgagcttcagatttaaaagttttaatcacctctgcgactcttgacggtttaaaagtttcaaagttcttctcaggatgccctgtgttaaacattcctggaactttattccctgtggagaaattttacagcactgatcgcccaacaaattatatagaatcttcactcagaacagctatagatatccatgccaaggaacctcctggagatgtcttaatatttatgacaggaaaggatgatattgacaagatggtatcaaaattggaggaaagaattcgaaatcttgaggagggctcctgcatcgatgctcttgtccttcctcttcatggttctttgccacctgagctgcaggttagagtatttgctccagcacctccaaactgccgacgcttcattgttgcaacaaatgttgctgaaacttcgctgactgtagatggtgtcgtgtaagaagcaaacacaatcagttcgtgattgattgtggttatgtaaagcagcgccaatacaatccatcaagtggaatgtattcacttgatgttgtccaaatcagcagagtgcaggctgatcagcgagcagggcgagctggtagaactcggcccggcaagtgctataggctatacccaatttccatatatcagaatgagtttcttgaggcaacagtccctgaaattcaacgctcttctcttgctggaagtgttctgtatctgaaatcgttaaatcttccagacatcaacatactgaagtttgattttctagatccaccatcacgtgagtcattagaagatgctttgaggcaattatacctcattgatgcaattgatgaaaacggacaaataacggatgttggacgagttatggcagagcttcctcttgagccgtctctttcaaggactttgattgaagcaaatgaattgggatgcctatctcaggcgttaactgttgcatcgattttgtcagcagaaataacattgcgatcacaaggacgtggtggatggaaagaggaaaaggcaggagctccctgatgggtctggctggggtgaccatatacaattgcttcagatatttgaaagctgggaccaaactggctatgacacaaaatggtgctctcatcatgatttgcaggtgcggggtatgaaattgagcaaagatgtgaggaaccaactatgtcagattattcaaaaaattgcaaaaggttcaactgatgtggatgcaaggaaaagccggaagaatgaccctgattatagaaagctgaggagagctctctgcgtaggatatggtaaccagctagctgagaggatgctgcatcacaatggctaccatactgttggctataggacccaacttgtacaggtgcatccatcttctgtactggaaggcgatgagtatggaaagtttccaatgtacgttatttatcatgagctgataagtacaactcgtccatacatgagaaatgtctgcgccgtcgagcaagcctgggttcagcctatattaaagaagctcgacaaattagacataaacagattaagtggtggttcgagtgcaccgggagattctgaacttctgggagacaataagcaagtgaactcgtcaaagaatgacgtgggtgtaaaacaatcagaggtggacagtaaaatccaggcagctcgagagcggtaccttgcacgaaaaggcaagaaatgacaatcgacacgtttaactgatcgctcagcatccttctggtcagcctgaagcttctctgaagatcataccgaggaaccattcgtgttattgtgggtggtgtatgcttcaacgtgcacaaacaagagaatttcttatgtaatcttttgtttgaggactctaaccttttcttttatttggcattactgtgatgtgaccttttccttgggccgaaatattttacaggcttttctgcatgggctagattcttttcccccatattcctatatggtgttgtctgttgaggtcttgtccctcctgcctagcatatgttgagtcccaagcaaggcaacaccgcaatatgatgcgatcttggaagtgatactgatatgcgctctgcttgggtttctctaacaaattttagagtcccgctctccctccctccgttccaaaatataatttgttttagattaattacacattcattaagtaacatatgaatataatttgtatgtatattcattatcatttgaatgaatgtggacaaaaaaaagtgggctagaaggaa

SEQ ID NO: 82319 - DNA, 2314 bp, Zea Mays
gacagactccaccggtggctctgctggtatgaatggagaattgaagtgatatgatatccttttaggtttgatgaaaagattgatcaaggaccgagcttcagatttaaaagttttaatcacctctgcgactcttgacggtttaaaagtttcaaagttcttctcaggatgccctgtgttaaacattcctggaactttattccctgtggagaaattttacagcactgatcgcccaacaaattatatagaatcttcactcagaacagctatagatatccatgccaaggaacctcctggagatgtcttaatatttatgacaggaaaggatgatattgacaagatggtatcaaaattggaggaaagaattcgaaatcttgaggagggctcctgcatcgatgctcttgtccttcctcttcatggttctttgccacctgagctgcaggttagagtatttgctccagcacctccaaactgccgacgcttcattgttgcaacaaatgttgctgaaacttcgctgactgtagatggtgtcgtgtaagaagcaaacacaatcagttcgtgattgattgtggttatgtaaagcagcgccaatacaatccatcaagtggaatgtattcacttgatgttgtccaaatcagcagagtgcaggctgatcagcgagcagggcgagctggtagaactcggcccggcaagtgctataggctatacccaatttccatatatcagaatgagtttcttgaggcaacagtccctgaaattcaacgctcttctcttgctggaagtgttctgtatctgaaatcgttaaatcttccagacatcaacatactgaagtttgattttctagatccaccatcacgtgagtcattagaagatgctttgaggcaattatacctcattgatgcaattgatgaaaacggacaaataacggatgttggacgagttatggcagagcttcctcttgagccgtctctttcaaggactttgattgaagcaaatgaattgggatgcctatctcaggcgttaactgttgcatcgattttgtcagcagaaataacattgcgatcagttagcaaggacgtggtggatggaaagaggaaaaggcaggagctccctgatgggtctggctggggtgaccatatacaattgcttcagatatttgaaagctgggaccaaactggctatgacacaaaatggtgctctcatcatgatttgcaggtgcggggtatgaaattgagcaaagatgtgaggaaccaactatgtcagattattcaaaaaattgcaaaaggttcaactgatgtggatgcaaggaaaagccggaagaatgaccctgattatagaaagctgaggagagctctctgcgtaggatatggtaaccagctagctgagaggatgctgcatcacaatggctaccatactgttggctataggacccaacttgtacaggtgcatccatcttctgtactggaaggcgatgagtatggaaagtttccaatgtacgttatttatcatgagctgataagtacaactcgtccatacatgagaaatgtctgcgccgtcgagcaagcctgggttcagcctatattaaagaagctcgacaaattagacataaacagattaagtggtggttcgagtgcaccgggagattctgaacttctgggagacaataagcaagtgaactcgtcaaagaatgacgtgggtgtaaaacaatcagaggtggacagtaaaatccaggcagctcgagagcggtaccttgcacgaaaaggcaagaaatgacaatcgacacgtttaactgatcgctcagcatccttctggtcagcctgaagcttctctgaagatcataccgaggaaccattcgtgttattgtgggtggtgtatgcttcaacgtgcacaaacaagagaatttcttatgtaatcttttgtttgaggactctaaccttttcttttatttggcattactgtgatgtgaccttttccttgggccgaaatattttacaggcttttctgcatgggctagattcttttcccccatattcctatatggtgttgtctgttgaggtcttgtccctcctgcctagcatatgttgagtcccaagcaaggcaacaccgcaatatgatgcgatcttggaagtgatactgatatgcgctctgcttgggtttctctaacaaattttagagtcccgctctccctccctccgttccaaaatataatttgttttagattaattacacattcattaagtaacatatgaatataatttgtatgtatattcattatcatttgaatgaatgtggacaaaaaaaagtgggctagaaggaa

SEQ ID NO: 82320 - DNA, 3950 bp, Zea Mays
atgtctattgtgccttgtgatgtgtgtgtctgtgaattctcaatggatcgtgacccatgggcaaaattccgacgcccaaacagtgagcacccagcccaatcagaggagacacgcacgcaccagcaccctggtgtggccggtgcccggcggccaaacgcgatgccatctccgtctccagccccgccgccagtgctgccgatctcggagcacgaggacgagatagtcgccgcggtggacgcgaacccagtggtggtggtcatcggcgagactggctccggcaagagcactcagctctcccagatcctccaccgccgcggatacacccgtcggggtgccatcgctgtcacccagccccgccgcgttgctgcggtttccgtttccagaagagtagctcaagagcttggtgttccacttggggatgaagttggttatgcaattcgatttgaggacagaacttcagaaagaacatgcataaaatacctcacagacggcattcttctccgtgaaagcctttcaaatcctgagttgaagcagtactcagtaatcatactggatgaagctcacgagcgtagcttaaacactgatatccttttaggtttgatgaaaagattgatcaaggaccgagcttcagatttaaaagttttaatcacctctgcgactcttgacggtttaaaagtttcaaagttcttctcaggatgccctgtgttaaacattcctggaactttattccctgtggagaaattttacagcactgatcgcccaacaaattatatagaatcttcactcagaacagctatagatatccatgccaaggaacctcctggagatgtcttaatatttatgacaggaaaggatgatattgacaagatggtatcaaaattggaggaaagaattcgaaatcttgaggagggctcctgcatcgatgctcttgtccttcctcttcatggttctttgccacctgagctgcaggttagagtatttgctccagcacctccaaactgccgacgcttcattgttgcaacaaatgttgctgaaacttcgctgactgtagatggtgtcgtgtaagaagcaaacacaatcagttcgtgattgattgtggttatgtaaagcagcgccaatacaatccatcaagtggaatgtattcacttgatgttgtccaaatcagcagagtgcaggctgatcagcgagcagggcgagctggtagaactcggcccggcaagtgctataggctatacccaatttccatatatcagaatgagtttcttgaggcaacagtccctgaaattcaacgctcttctcttgctggaagtgttctgtatctgaaatcgttaaatcttccagacatcaacatactgaagtttgattttctagatccaccatcacgtaagataaaacttcagattctttattcttatagtttcaatcattcttgtggacctgtctgtatgcacctatttgttgcctagttacttattttgtttggagttcgatggctaatttctttttttctcgaacacgcaggagagctacgtatcattatattaaaagaagaaataaacaaggtctaaaatagaccggggtacaattgacgccttacggcagcctgaacgacactaacatagactgacttatctatataactctaggctacatgagagagggaagcaacaagggaggtcaaccccttggccccggcagtctcccacagacggcgctcatccccaacatggattaggaaattagcaatattaggggaaaggccatcaaagatgcatctgttccggtgattccacaaaatttcaactgactgttttctgaagcattgcaaaattatgttattactatgaagtccagtgaagaaactacttttgtgatgactactcatgtcacttttgaattgttacacgtggttaggggaggaaacctcttggaggttgtagttctgatgggtggtatggtagggtgatgggctttgttgctggcaactcgtgatggtttttccagccttggtgaacattggcagtggctacagcttgggcaggggctggtggcagcgcaaaggagagtgagagggaactttaaggcaaaaacacttttctggttaatccatatggatacatccaaaagatgttatatatatgatccacccttcttaattcaattcaagctttcgccacaaagctctcttattctctaatactgataactttttggcggccccgaattggaggggtatggaggttgcagcatgctagccgtaccctctggttgctgcaacatgtagatgtaggtggtggctactgcctcttgggttcagctgggctgcttggcccatgggcattatgccaaaaacataaatgtgtaaaagtgtacttacagaagacataaatggccaaaagggggagctatttggtgccttgaaataaataaaataaaaaatatgttctttggcttctgcctactatttaaaatttacaaatgatttgcaggtgagtcattagaagatgctttgaggcaattatacctcattgatgcaattgatgaaaacggacaaataacggatgttggacgagttatggcagagcttcctcttgagccgtctctttcaaggactttgattgaagcaaatgaattgggatgcctatctcaggcgttaactgttgcatcgattttgtcagcagaaataacattgcgatcagttagcaaggacgtggtggatggaaagaggaaaaggcaggagctccctgatgggtctggctggggtgaccatatacaattgcttcagatatttgaaagctgggaccaaactggctatgacacaaaatggtgctctcatcatgatttgcaggtgcggggtatgaaattgagcaaagatgtgaggaaccaactatgtcagattattcaaaaaattgcaaaaggttcaactgatgtggatgcaaggaaaagccggaagaatgaccctgattatagaaagctgaggagagctctctgcgtaggatatggtaaccagctagctgagaggatgctgcatcacaatggctaccatactgttggctataggacccaacttgtacaggtgcatccatcttctgtactggaaggcgatgagtatggaaagtttccaatgtacgttatttatcatgagctgataagtacaactcgtccatacatgagaaatgtctgcgccgtcgagcaagcctgggttcagcctatattaaagaagctcgacaaattagacataaacagattaagtggtggttcgagtgcaccgggagattctgaacttctgggagacaataagcaagtgaactcgtcaaagaatgacgtgggtgtaaaacaatcagaggtggacagtaaaatccaggcagctcgagagcggtaccttgcacgaaaaggcaagaaatgacaatcgacacgtttaactgatcgctcagcatccttctggtcagcctgaagcttctctgaagatcataccgaggaaccattcgtgttattgtgggtggtgtatgcttcaacgtgcacaaacaagagaatttcttatgtaatcttttgtttgaggactctaaccttttcttttatttggcattactgtgatgtgaccttttccttgggccgaaatattttacaggcttttctgcatgggctagattcttttcccccatattcctatatggtgttgtctgttgaggtcttgtccctcctgcctagcatatgttgagtcccaagcaaggcaacaccgcaatatgatgcgatcttggaagtgatactgatatgcgctctgcttgggtttctctaacaaattttagagtcccgctctccctccctccgttccaaaatataatttgttttagattaattacacattcattaagtaacatatgaatataatttgtatgtatattcattatcatttgaatgaatgtggacaaaaaaaagtgggctagaaggaa

SEQ ID NO: 82321 - DNA, 3792 bp, Zea Mays
atgtctattgtgccttgtgatgtgtgtgtctgtgaattctcaatggatcgtgacccatgggcaaaattccgacgcccaaacagtgagcacccagcccaatcagaggagacacgcacgcaccagcaccctggtgtggccggtgcccggcggccaaacgcgatgccatctccgtctccagccccgccgccagtgctgccgatctcggagcacgaggacgagatagtcgccgcggtggacgcgaacccagtggtggtggtcatcggcgagactggctccggcaagagcactcagctctcccagatcctccaccgccgcggatacacccgtcggggtgccatcgctgtcacccagccccgccgcgttgctgcggtttccgtttccagaagagtagctcaagagcttggtgttccacttggggatgaagttggttatgcaattcgatttgaggacagaacttcagaaagaacatgcataaaatacctcacagacggcattcttctccgtgaaagcctttcaaatcctgagttgaagcagtactcagtaatcatactggatgaagctcacgagcgtagcttaaacactgatatccttttaggtttgatgaaaagattgatcaaggaccgagcttcagatttaaaagttttaatcacctctgcgactcttgacggtttaaaagtttcaaagttcttctcaggatgccctgtgttaaacattcctggaactttattccctgtggagaaattttacagcactgatcgcccaacaaattatatagaatcttcactcagaacagctatagatatccatgccaaggaacctcctggagatgtcttaatatttatgacaggaaaggatgatattgacaagatggtatcaaaattggaggaaagaattcgaaatcttgaggagggctcctgcatcgatgctcttgtccttcctcttcatggttctttgccacctgagctgcaggttagagtatttgctccagcacctccaaactgccgacgcttcattgttgcaacaaatgttgctgaaacttcgctgactgtagatggtgtcgtgttcgtgattgattgtggttatgtaaagcagcgccaatacaatccatcaagtggaatgtattcacttgatgttgtccaaatcagcagagtgcaggctgatcagcgagcagggcgagctggtagaactcggcccggcaagtgctataggctatacccaatttccatatatcagaatgagtttcttgaggcaacagtccctgaaattcaacgctcttctcttgctggaagtgttctgtatctgaaatcgttaaatcttccagacatcaacatactgaagtttgattttctagatccaccatcacgagagctacgtatcattatattaaaagaagaaataaacaaggtctaaaatagaccggggtacaattgacgccttacggcagcctgaacgacactaacatagactgacttatctatataactctaggctacatgagagagggaagcaacaagggaggtcaaccccttggccccggcagtctcccacagacggcgctcatccccaacatggattaggaaattagcaatattaggggaaaggccatcaaagatgcatctgttccggtgattccacaaaatttcaactgactgttttctgaagcattgcaaaattatgttattactatgaagtccagtgaagaaactacttttgtgatgactactcatgtcacttttgaattgttacacgtggttaggggaggaaacctcttggaggttgtagttctgatgggtggtatggtagggtgatgggctttgttgctggcaactcgtgatggtttttccagccttggtgaacattggcagtggctacagcttgggcaggggctggtggcagcgcaaaggagagtgagagggaactttaaggcaaaaacacttttctggttaatccatatggatacatccaaaagatgttatatatatgatccacccttcttaattcaattcaagctttcgccacaaagctctcttattctctaatactgataactttttggcggccccgaattggaggggtatggaggttgcagcatgctagccgtaccctctggttgctgcaacatgtagatgtaggtggtggctactgcctcttgggttcagctgggctgcttggcccatgggcattatgccaaaaacataaatgtgtaaaagtgtacttacagaagacataaatggccaaaagggggagctatttggtgccttgaaataaataaaataaaaaatatgttctttggcttctgcctactatttaaaatttacaaatgatttgcaggtgagtcattagaagatgctttgaggcaattatacctcattgatgcaattgatgaaaacggacaaataacggatgttggacgagttatggcagagcttcctcttgagccgtctctttcaaggactttgattgaagcaaatgaattgggatgcctatctcaggcgttaactgttgcatcgattttgtcagcagaaataacattgcgatcagttagcaaggacgtggtggatggaaagaggaaaaggcaggagctccctgatgggtctggctggggtgaccatatacaattgcttcagatatttgaaagctgggaccaaactggctatgacacaaaatggtgctctcatcatgatttgcaggtgcggggtatgaaattgagcaaagatgtgaggaaccaactatgtcagattattcaaaaaattgcaaaaggttcaactgatgtggatgcaaggaaaagccggaagaatgaccctgattatagaaagctgaggagagctctctgcgtaggatatggtaaccagctagctgagaggatgctgcatcacaatggctaccatactgttggctataggacccaacttgtacaggtgcatccatcttctgtactggaaggcgatgagtatggaaagtttccaatgtacgttatttatcatgagctgataagtacaactcgtccatacatgagaaatgtctgcgccgtcgagcaagcctgggttcagcctatattaaagaagctcgacaaattagacataaacagattaagtggtggttcgagtgcaccgggagattctgaacttctgggagacaataagcaagtgaactcgtcaaagaatgacgtgggtgtaaaacaatcagaggtggacagtaaaatccaggcagctcgagagcggtaccttgcacgaaaaggcaagaaatgacaatcgacacgtttaactgatcgctcagcatccttctggtcagcctgaagcttctctgaagatcataccgaggaaccattcgtgttattgtgggtggtgtatgcttcaacgtgcacaaacaagagaatttcttatgtaatcttttgtttgaggactctaaccttttcttttatttggcattactgtgatgtgaccttttccttgggccgaaatattttacaggcttttctgcatgggctagattcttttcccccatattcctatatggtgttgtctgttgaggtcttgtccctcctgcctagcatatgttgagtcccaagcaaggcaacaccgcaatatgatgcgatcttggaagtgatactgatatgcgctctgcttgggtttctctaacaaattttagagtcccgctctccctccctccgttccaaaatataatttgttttagattaattacacattcattaagtaacatatgaatataatttgtatgtatattcattatcatttgaatgaatgtggacaaaaaaaagtgggctagaaggaa

SEQ ID NO: 82322 - DNA, 2819 bp, Zea Mays
atgtctattgtgccttgtgatgtgtgtgtctgtgaattctcaatggatcgtgacccatgggcaaaattccgacgcccaaacagtgagcacccagcccaatcagaggagacacgcacgcaccagcaccctggtgtggccggtgcccggcggccaaacgcgatgccatctccgtctccagccccgccgccagtgctgccgatctcggagcacgaggacgagatagtcgccgcggtggacgcgaacccagtggtggtggtcatcggcgagactggctccggcaagagcactcagctctcccagatcctccaccgccgcggatacacccgtcggggtgccatcgctgtcacccagccccgccgcgttgctgcggtttccgtttccagaagagtagctcaagagcttggtgttccacttggggatgaagttggttatgcaattcgatttgaggacagaacttcagaaagaacatgcataaaatacctcacagacggcattcttctccgtgaaagcctttcaaatcctgagttgaagcagtactcagtaatcatactggatgaagctcacgagcgtagcttaaacactgatatccttttaggtttgatgaaaagattgatcaaggaccgagcttcagatttaaaagttttaatcacctctgcgactcttgacggtttaaaagtttcaaagttcttctcaggatgccctgtgttaaacattcctggaactttattccctgtggagaaattttacagcactgatcgcccaacaaattatatagaatcttcactcagaacagctatagatatccatgccaaggaacctcctggagatgtcttaatatttatgacaggaaaggatgatattgacaagatggtatcaaaattggaggaaagaattcgaaatcttgaggagggctcctgcatcgatgctcttgtccttcctcttcatggttctttgccacctgagctgcaggttagagtatttgctccagcacctccaaactgccgacgcttcattgttgcaacaaatgttgctgaaacttcgctgactgtagatggtgtcgtgttcgtgattgattgtggttatgtaaagcagcgccaatacaatccatcaagtggaatgtattcacttgatgttgtccaaatcagcagagtgcaggctgatcagcgagcagggcgagctggtagaactcggcccggcaagtgctataggctatacccaatttccatatatcagaatgagtttcttgaggcaacagtccctgaaattcaacgctcttctcttgctggaagtgttctgtatctgaaatcgttaaatcttccagacatcaacatactgaagtttgattttctagatccaccatcacgtgagtcattagaagatgctttgaggcaattatacctcattgatgcaattgatgaaaacggacaaataacggatgttggacgagttatggcagagcttcctcttgagccgtctctttcaaggactttgattgaagcaaatgaattgggatgcctatctcaggcgttaactgttgcatcgattttgtcagcagaaataacattgcgatcacaaggacgtggtggatggaaagaggaaaaggcaggagctccctgatgggtctggctggggtgaccatatacaattgcttcagatatttgaaagctgggaccaaactggctatgacacaaaatggtgctctcatcatgatttgcaggtgcggggtatgaaattgagcaaagatgtgaggaaccaactatgtcagattattcaaaaaattgcaaaaggttcaactgatgtggatgcaaggaaaagccggaagaatgaccctgattatagaaagctgaggagagctctctgcgtaggatatggtaaccagctagctgagaggatgctgcatcacaatggctaccatactgttggctataggacccaacttgtacaggtgcatccatcttctgtactggaaggcgatgagtatggaaagtttccaatgtacgttatttatcatgagctgataagtacaactcgtccatacatgagaaatgtctgcgccgtcgagcaagcctgggttcagcctatattaaagaagctcgacaaattagacataaacagattaagtggtggttcgagtgcaccgggagattctgaacttctgggagacaataagcaagtgaactcgtcaaagaatgacgtgggtgtaaaacaatcagaggtggacagtaaaatccaggcagctcgagagcggtaccttgcacgaaaaggcaagaaatgacaatcgacacgtttaactgatcgctcagcatccttctggtcagcctgaagcttctctgaagatcataccgaggaaccattcgtgttattgtgggtggtgtatgcttcaacgtgcacaaacaagagaatttcttatgtaatcttttgtttgaggactctaaccttttcttttatttggcattactgtgatgtgaccttttccttgggccgaaatattttacaggcttttctgcatgggctagattcttttcccccatattcctatatggtgttgtctgttgaggtcttgtccctcctgcctagcatatgttgagtcccaagcaaggcaacaccgcaatatgatgcgatcttggaagtgatactgatatgcgctctgcttgggtttctctaacaaattttagagtcccgctctccctccctccgttccaaaatataatttgttttagattaattacacattcattaagtaacatatgaatataatttgtatgtatattcattatcatttgaatgaatgtggacaaaaaaaagtgggctagaaggaa

SEQ ID NO: 82323 - DNA, 3807 bp, Zea Mays
atgtctattgtgccttgtgatgtgtgtgtctgtgaattctcaatggatcgtgacccatgggcaaaattccgacgcccaaacagtgagcacccagcccaatcagaggagacacgcacgcaccagcaccctggtgtggccggtgcccggcggccaaacgcgatgccatctccgtctccagccccgccgccagtgctgccgatctcggagcacgaggacgagatagtcgccgcggtggacgcgaacccagtggtggtggtcatcggcgagactggctccggcaagagcactcagctctcccagatcctccaccgccgcggatacacccgtcggggtgccatcgctgtcacccagccccgccgcgttgctgcggtttccgtttccagaagagtagctcaagagcttggtgttccacttggggatgaagttggttatgcaattcgatttgaggacagaacttcagaaagaacatgcataaaatacctcacagacggcattcttctccgtgaaagcctttcaaatcctgagttgaagcagtactcagtaatcatactggatgaagctcacgagcgtagcttaaacactgatatccttttaggtttgatgaaaagattgatcaaggaccgagcttcagatttaaaagttttaatcacctctgcgactcttgacggtttaaaagtttcaaagttcttctcaggatgccctgtgttaaacattcctggaactttattccctgtggagaaattttacagcactgatcgcccaacaaattatatagaatcttcactcagaacagctatagatatccatgccaaggaacctcctggagatgtcttaatatttatgacaggaaaggatgatattgacaagatggtatcaaaattggaggaaagaattcgaaatcttgaggagggctcctgcatcgatgctcttgtccttcctcttcatggttctttgccacctgagctgcaggttagagtatttgctccagcacctccaaactgccgacgcttcattgttgcaacaaatgttgctgaaacttcgctgactgtagatggtgtcgtgtaagaagcaaacacaatcagttcgtgattgattgtggttatgtaaagcagcgccaatacaatccatcaagtggaatgtattcacttgatgttgtccaaatcagcagagtgcaggctgatcagcgagcagggcgagctggtagaactcggcccggcaagtgctataggctatacccaatttccatatatcagaatgagtttcttgaggcaacagtccctgaaattcaacgctcttctcttgctggaagtgttctgtatctgaaatcgttaaatcttccagacatcaacatactgaagtttgattttctagatccaccatcacgagagctacgtatcattatattaaaagaagaaataaacaaggtctaaaatagaccggggtacaattgacgccttacggcagcctgaacgacactaacatagactgacttatctatataactctaggctacatgagagagggaagcaacaagggaggtcaaccccttggccccggcagtctcccacagacggcgctcatccccaacatggattaggaaattagcaatattaggggaaaggccatcaaagatgcatctgttccggtgattccacaaaatttcaactgactgttttctgaagcattgcaaaattatgttattactatgaagtccagtgaagaaactacttttgtgatgactactcatgtcacttttgaattgttacacgtggttaggggaggaaacctcttggaggttgtagttctgatgggtggtatggtagggtgatgggctttgttgctggcaactcgtgatggtttttccagccttggtgaacattggcagtggctacagcttgggcaggggctggtggcagcgcaaaggagagtgagagggaactttaaggcaaaaacacttttctggttaatccatatggatacatccaaaagatgttatatatatgatccacccttcttaattcaattcaagctttcgccacaaagctctcttattctctaatactgataactttttggcggccccgaattggaggggtatggaggttgcagcatgctagccgtaccctctggttgctgcaacatgtagatgtaggtggtggctactgcctcttgggttcagctgggctgcttggcccatgggcattatgccaaaaacataaatgtgtaaaagtgtacttacagaagacataaatggccaaaagggggagctatttggtgccttgaaataaataaaataaaaaatatgttctttggcttctgcctactatttaaaatttacaaatgatttgcaggtgagtcattagaagatgctttgaggcaattatacctcattgatgcaattgatgaaaacggacaaataacggatgttggacgagttatggcagagcttcctcttgagccgtctctttcaaggactttgattgaagcaaatgaattgggatgcctatctcaggcgttaactgttgcatcgattttgtcagcagaaataacattgcgatcacaaggacgtggtggatggaaagaggaaaaggcaggagctccctgatgggtctggctggggtgaccatatacaattgcttcagatatttgaaagctgggaccaaactggctatgacacaaaatggtgctctcatcatgatttgcaggtgcggggtatgaaattgagcaaagatgtgaggaaccaactatgtcagattattcaaaaaattgcaaaaggttcaactgatgtggatgcaaggaaaagccggaagaatgaccctgattatagaaagctgaggagagctctctgcgtaggatatggtaaccagctagctgagaggatgctgcatcacaatggctaccatactgttggctataggacccaacttgtacaggtgcatccatcttctgtactggaaggcgatgagtatggaaagtttccaatgtacgttatttatcatgagctgataagtacaactcgtccatacatgagaaatgtctgcgccgtcgagcaagcctgggttcagcctatattaaagaagctcgacaaattagacataaacagattaagtggtggttcgagtgcaccgggagattctgaacttctgggagacaataagcaagtgaactcgtcaaagaatgacgtgggtgtaaaacaatcagaggtggacagtaaaatccaggcagctcgagagcggtaccttgcacgaaaaggcaagaaatgacaatcgacacgtttaactgatcgctcagcatccttctggtcagcctgaagcttctctgaagatcataccgaggaaccattcgtgttattgtgggtggtgtatgcttcaacgtgcacaaacaagagaatttcttatgtaatcttttgtttgaggactctaaccttttcttttatttggcattactgtgatgtgaccttttccttgggccgaaatattttacaggcttttctgcatgggctagattcttttcccccatattcctatatggtgttgtctgttgaggtcttgtccctcctgcctagcatatgttgagtcccaagcaaggcaacaccgcaatatgatgcgatcttggaagtgatactgatatgcgctctgcttgggtttctctaacaaattttagagtcccgctctccctccctccgttccaaaatataatttgttttagattaattacacattcattaagtaacatatgaatataatttgtatgtatattcattatcatttgaatgaatgtggacaaaaaaaagtgggctagaaggaa

SEQ ID NO: 82324 - DNA, 2854 bp, Zea Mays
atgtctattgtgccttgtgatgtgtgtgtctgtgaattctcaatggatcgtgacccatgggcaaaattccgacgcccaaacagtgagcacccagcccaatcagaggagacacgcacgcaccagcaccctggtgtggccggtgcccggcggccaaacgcgatgccatctccgtctccagccccgccgccagtgctgccgatctcggagcacgaggacgagatagtcgccgcggtggacgcgaacccagtggtggtggtcatcggcgagactggctccggcaagagcactcagctctcccagatcctccaccgccgcggatacacccgtcggggtgccatcgctgtcacccagccccgccgcgttgctgcggtttccgtttccagaagagtagctcaagagcttggtgttccacttggggatgaagttggttatgcaattcgatttgaggacagaacttcagaaagaacatgcataaaatacctcacagacggcattcttctccgtgaaagcctttcaaatcctgagttgaagcagtactcagtaatcatactggatgaagctcacgagcgtagcttaaacactgatatccttttaggtttgatgaaaagattgatcaaggaccgagcttcagatttaaaagttttaatcacctctgcgactcttgacggtttaaaagtttcaaagttcttctcaggatgccctgtgttaaacattcctggaactttattccctgtggagaaattttacagcactgatcgcccaacaaattatatagaatcttcactcagaacagctatagaaaatgattgttgtcagatatccatgccaaggaacctcctggagatgtcttaatatttatgacaggaaaggatgatattgacaagatggtatcaaaattggaggaaagaattcgaaatcttgaggagggctcctgcatcgatgctcttgtccttcctcttcatggttctttgccacctgagctgcaggttagagtatttgctccagcacctccaaactgccgacgcttcattgttgcaacaaatgttgctgaaacttcgctgactgtagatggtgtcgtgtaagaagcaaacacaatcagttcgtgattgattgtggttatgtaaagcagcgccaatacaatccatcaagtggaatgtattcacttgatgttgtccaaatcagcaggctgatcagcgagcagggcgagctggtagaactcggcccggcaagtgctataggctatacccaatttccatatatcagaatgagtttcttgaggcaacagtccctgaaattcaacgctcttctcttgctggaagtgttctgtatctgaaatcgttaaatcttccagacatcaacatactgaagtttgattttctagatccaccatcacgtgagtcattagaagatgctttgaggcaattatacctcattgatgcaattgatgaaaacggacaaataacggatgttggacgagttatggcagagcttcctcttgagccgtctctttcaaggactttgattgaagcaaatgaattgggatgcctatctcaggcgttaactgttgcatcgattttgtcagcagaaataacattgcgatcagttagcaaggacgtggtggatggaaagaggaaaaggcaggagctccctgatgggtctggctggggtgaccatatacaattgcttcagatatttgaaagctgggaccaaactggctatgacacaaaatggtgctctcatcatgatttgcaggtgcggggtatgaaattgagcaaagatgtgaggaaccaactatgtcagattattcaaaaaattgcaaaaggttcaactgatgtggatgcaaggaaaagccggaagaatgaccctgattatagaaagctgaggagagctctctgcgtaggatatggtaaccagctagctgagaggatgctgcatcacaatggctaccatactgttggctataggacccaacttgtacaggtgcatccatcttctgtactggaaggcgatgagtatggaaagtttccaatgtacgttatttatcatgagctgataagtacaactcgtccatacatgagaaatgtctgcgccgtcgagcaagcctgggttcagcctatattaaagaagctcgacaaattagacataaacagattaagtggtggttcgagtgcaccgggagattctgaacttctgggagacaataagcaagtgaactcgtcaaagaatgacgtgggtgtaaaacaatcagaggtggacagtaaaatccaggcagctcgagagcggtaccttgcacgaaaaggcaagaaatgacaatcgacacgtttaactgatcgctcagcatccttctggtcagcctgaagcttctctgaagatcataccgaggaaccattcgtgttattgtgggtggtgtatgcttcaacgtgcacaaacaagagaatttcttatgtaatcttttgtttgaggactctaaccttttcttttatttggcattactgtgatgtgaccttttccttgggccgaaatattttacaggcttttctgcatgggctagattcttttcccccatattcctatatggtgttgtctgttgaggtcttgtccctcctgcctagcatatgttgagtcccaagcaaggcaacaccgcaatatgatgcgatcttggaagtgatactgatatgcgctctgcttgggtttctctaacaaattttagagtcccgctctccctccctccgttccaaaatataatttgttttagattaattacacattcattaagtaacatatgaatataatttgtatgtatattcattatcatttgaatgaatgtggacaaaaaaaagtgggctagaaggaa

SEQ ID NO: 82325 - DNA, 2844 bp, Zea Mays
atgtctattgtgccttgtgatgtgtgtgtctgtgaattctcaatggatcgtgacccatgggcaaaattccgacgcccaaacagtgagcacccagcccaatcagaggagacacgcacgcaccagcaccctggtgtggccggtgcccggcggccaaacgcgatgccatctccgtctccagccccgccgccagtgctgccgatctcggagcacgaggacgagatagtcgccgcggtggacgcgaacccagtggtggtggtcatcggcgagactggctccggcaagagcactcagctctcccagatcctccaccgccgcggatacacccgtcggggtgccatcgctgtcacccagccccgccgcgttgctgcggtttccgtttccagaagagtagctcaagagcttggtgttccacttggggatgaagttggttatgcaattcgatttgaggacagaacttcagaaagaacatgcataaaatacctcacagacggcattcttctccgtgaaagcctttcaaatcctgagttgaagcagtactcagtaatcatactggatgaagctcacgagcgtagcttaaacactgatatccttttaggtttgatgaaaagattgatcaaggaccgagcttcagatttaaaagttttaatcacctctgcgactcttgacggtttaaaagtttcaaagttcttctcaggatgccctgtgttaaacattcctggaactttattccctgtggagaaattttacagcactgatcgcccaacaaattatatagaatcttcactcagaacagctatagatatccatgccaaggaacctcctggagatgtcttaatatttatgacaggaaaggatgatattgacaagatggtatcaaaattggaggaaagaattcgaaatcttgaggagggctcctgcatcgatgctcttgtccttcctcttcatggttctttgccacctgagctgcaggttagagtatttgctccagcacctccaaactgccgacgcttcattgttgcaacaaatgttgctgaaacttcgctgactgtagatggtgtcgtgtaagaagcaaacacaatcagttcgtgattgattgtggttatgtaaagcagcgccaatacaatccatcaagtggaatgtattcacttgatgttgtccaaatcagcagagtgcaggctgatcagcgagcagggcgagctggtagaactcggcccggcaagtgctataggctatacccaatttccatatatcagaatgagtttcttgaggcaacagtccctgaaattcaacgctcttctcttgctggaagtgttctgtatctgaaatcgttaaatcttccagacatcaacatactgaagtttgattttctagatccaccatcacgtgagtcattagaagatgctttgaggcaattatacctcattgatgcaattgatgaaaacggacaaataacggatgttggacgagttatggcagagcttcctcttgagccgtctctttcaaggactttgattgaagcaaatgaattgggatgcctatctcaggcgttaactgttgcatcgattttgtcagcagaaataacattgcgatcagttagcaaggacgtggtggatggaaagaggaaaaggcaggagctccctgatgggtctggctggggtgaccatatacaattgcttcagatatttgaaagctgggaccaaactggctatgacacaaaatggtgctctcatcatgatttgcaggtgcggggtatgaaattgagcaaagatgtgaggaaccaactatgtcagattattcaaaaaattgcaaaaggttcaactgatgtggatgcaaggaaaagccggaagaatgaccctgattatagaaagctgaggagagctctctgcgtaggatatggtaaccagctagctgagaggatgctgcatcacaatggctaccatactgttggctataggacccaacttgtacaggtgcatccatcttctgtactggaaggcgatgagtatggaaagtttccaatgtacgttatttatcatgagctgataagtacaactcgtccatacatgagaaatgtctgcgccgtcgagcaagcctgggttcagcctatattaaagaagctcgacaaattagacataaacagattaagtggtggttcgagtgcaccgggagattctgaacttctgggagacaataagcaagtgaactcgtcaaagaatgacgtgggtgtaaaacaatcagaggtggacagtaaaatccaggcagctcgagagcggtaccttgcacgaaaaggcaagaaatgacaatcgacacgtttaactgatcgctcagcatccttctggtcagcctgaagcttctctgaagatcataccgaggaaccattcgtgttattgtgggtggtgtatgcttcaacgtgcacaaacaagagaatttcttatgtaatcttttgtttgaggactctaaccttttcttttatttggcattactgtgatgtgaccttttccttgggccgaaatattttacaggcttttctgcatgggctagattcttttcccccatattcctatatggtgttgtctgttgaggtcttgtccctcctgcctagcatatgttgagtcccaagcaaggcaacaccgcaatatgatgcgatcttggaagtgatactgatatgcgctctgcttgggtttctctaacaaattttagagtcccgctctccctccctccgttccaaaatataatttgttttagattaattacacattcattaagtaacatatgaatataatttgtatgtatattcattatcatttgaatgaatgtggacaaaaaaaagtgggctagaaggaa

SEQ ID NO: 82326 - DNA, 2896 bp, Zea Mays
attcttcatttcaaacaactaaacttaaataaagtgtgacacacttaatcacgaaccaatcatgacttaaaaatgtctattgtgccttgtgatgtgtgtgtctgtgaattctcaatggatcgtgacccatgggcaaaattccgacgcccaaacagtgagcacccagcccaatcagaggagacacgcacgcaccagcaccctggtgtggccggtgcccggcggccaaacgcgatgccatctccgtctccagccccgccgccagtgctgccgatctcggagcacgaggacgagatagtcgccgcggtggacgcgaacccagtggtggtggtcatcggcgagactggctccggcaagagcactcagctctcccagatcctccaccgccgcggatacacccgtcggggtgccatcgctgtcacccagccccgccgcgttgctgcggtttccgtttccagaagagtagctcaagagcttggtgttccacttggggatgaagttggttatgcaattcgatttgaggacagaacttcagaaagaacatgcataaaatacctcacagacggcattcttctccgtgaaagcctttcaaatcctgagttgaagcagtactcagtaatcatactggatgaagctcacgagcgtagcttaaacactgatatccttttaggtttgatgaaaagattgatcaaggaccgagcttcagatttaaaagttttaatcacctctgcgactcttgacggtttaaaagtttcaaagttcttctcaggatgccctgtgttaaacattcctggaactttattccctgtggagaaattttacagcactgatcgcccaacaaattatatagaatcttcactcagaacagctatagatatccatgccaaggaacctcctggagatgtcttaatatttatgacaggaaaggatgatattgacaagatggtatcaaaattggaggaaagaattcgaaatcttgaggagggctcctgcatcgatgctcttgtccttcctcttcatggttctttgccacctgagctgcaggttagagtatttgctccagcacctccaaactgccgacgcttcattgttgcaacaaatgttgctgaaacttcgctgactgtagatggtgtcgtgttcgtgattgattgtggttatgtaaagcagcgccaatacaatccatcaagtggaatgtattcacttgatgttgtccaaatcagcagagtgcaggctgatcagcgagcagggcgagctggtagaactcggcccggcaagtgctataggctatacccaatttccatatatcagaatgagtttcttgaggcaacagtccctgaaattcaacgctcttctcttgctggaagtgttctgtatctgaaatcgttaaatcttccagacatcaacatactgaagtttgattttctagatccaccatcacgtgagtcattagaagatgctttgaggcaattatacctcattgatgcaattgatgaaaacggacaaataacggatgttggacgagttatggcagagcttcctcttgagccgtctctttcaaggactttgattgaagcaaatgaattgggatgcctatctcaggcgttaactgttgcatcgattttgtcagcagaaataacattgcgatcagttagcaaggacgtggtggatggaaagaggaaaaggcaggagctccctgatgggtctggctggggtgaccatatacaattgcttcagatatttgaaagctgggaccaaactggctatgacacaaaatggtgctctcatcatgatttgcaggtgcggggtatgaaattgagcaaagatgtgaggaaccaactatgtcagattattcaaaaaattgcaaaaggttcaactgatgtggatgcaaggaaaagccggaagaatgaccctgattatagaaagctgaggagagctctctgcgtaggatatggtaaccagctagctgagaggatgctgcatcacaatggctaccatactgttggctataggacccaacttgtacaggtgcatccatcttctgtactggaaggcgatgagtatggaaagtttccaatgtacgttatttatcatgagctgataagtacaactcgtccatacatgagaaatgtctgcgccgtcgagcaagcctgggttcagcctatattaaagaagctcgacaaattagacataaacagattaagtggtggttcgagtgcaccgggagattctgaacttctgggagacaataagcaagtgaactcgtcaaagaatgacgtgggtgtaaaacaatcagaggtggacagtaaaatccaggcagctcgagagcggtaccttgcacgaaaaggcaagaaatgacaatcgacacgtttaactgatcgctcagcatccttctggtcagcctgaagcttctctgaagatcataccgaggaaccattcgtgttattgtgggtggtgtatgcttcaacgtgcacaaacaagagaatttcttatgtaatcttttgtttgaggactctaaccttttcttttatttggcattactgtgatgtgaccttttccttgggccgaaatattttacaggcttttctgcatgggctagattcttttcccccatattcctatatggtgttgtctgttgaggtcttgtccctcctgcctagcatatgttgagtcccaagcaaggcaacaccgcaatatgatgcgatcttggaagtgatactgatatgcgctctgcttgggtttctctaacaaattttagagtcccgctctccctccctccgttccaaaatataatttgttttagattaattacacattcattaagtaacatatgaatataatttgtatgtatattcattatcatttgaatgaatgtggacaaaaaaaagtgggctagaaggaa

SEQ ID NO: 82327 - DNA, 1511 bp, Zea Mays
atgtctattgtgccttgtgatgtgtgtgtctgtgaattctcaatggatcgtgacccatgggcaaaattccgacgcccaaacagtgagcacccagcccaatcagaggagacacgcacgcaccagcaccctggtgtggccggtgcccggcggccaaacgcgatgccatctccgtctccagccccgccgccagtgctgccgatctcggagcacgaggacgagatagtcgccgcggtggacgcgaacccagtggtggtggtcatcggcgagactggctccggcaagagcactcagctctcccagatcctccaccgccgcggatacacccgtcggggtgccatcgctgtcacccagccccgccgcgttgctgcggtttccgtttccagaagagtagctcaagagcttggtgttccacttggggatgaagttggttatgcaattcgatttgaggacagaacttcagaaagaacatgcataaaatacctcacagacggcattcttctccgtgaaagcctttcaaatcctgagttgaagcagtactcagtaatcatactggatgaagctcacgagcgtagcttaaacactgatatccttttaggtttgatgaaaagattgatcaaggaccgagcttcagatttaaaagttttaatcacctctgcgactcttgacggtttaaaagtttcaaagttcttctcaggatgccctgtgttaaacattcctggaactttattccctgtggagaaattttacagcactgatcgcccaacaaattatatagaatcttcactcagaacagctatagatatccatgccaaggaacctcctggagatgtcttaatatttatgacaggaaaggatgatattgacaagatggtatcaaaattggaggaaagaattcgaaatcttgaggagggctcctgcatcgatgctcttgtccttcctcttcatggttctttgccacctgagctgcaggttagagtatttgctccagcacctccaaactgccgacgcttcattgttgcaacaaatgttgctgaaacttcgctgactgtagatggtgtcgtgttcgtgattgattgtggttatgtaaagcagcgccaatacaatccatcaagtggaatgtattcacttgatgttgtccaaatcagcagagtgcaggctgatcagcgagcagggcgagctggtagaactcggcccggcaagtgctataggctatacccaatttccatatatcagaatgagtttcttgaggcaacagtccctgaaattcaacgctcttctcttgctggaagtgttctgtatctgaaatcgttaaatcttccagacatcaacatactgaagtttgattttctagatccaccatcacgtgagtcattagaagatgctttgaggcaattatacctcattgatgcaattgatgaaaacggacaaataacggatgttggacgagttatggcagactatgacaatcgaagtgtttggtgggattttcactgagaatccgattataagcg

SEQ ID NO: 82328 - DNA, 855 bp, Zea Mays
atgtctattgtgccttgtgatgtgtgtgtctgtgaattctcaatggatcgtgacccatgggcaaaattccgacgcccaaacagtgagcacccagcccaatcagaggagacacgcacgcaccagcaccctggtgtggccggtgcccggcggccaaacgcgatgccatctccgtctccagccccgccgccagtgctgccgatctcggagcacgaggacgagatagtcgccgcggtggacgcgaacccagtggtggtggtcatcggcgagactggctccggcaagagcactcagctctcccagatcctccaccgccgcggatacacccgtcggggtgccatcgctgtcacccagccccgccgcgttgctgcggtttccgtttccagaagagtagctcaagagcttggtgttccacttggggatgaagttggttatgcaattcgatttgaggacagaacttcagaaagaacatgcataaaatacctcacagacggcattcttctccgtgaaagcctttcaaatcctgagttgaagcagtactcagtaatcatactggatgaagctcacgagcgtagcttaaacactgatatccttttaggtttgatgaaaagattgatcaaggaccgagcttcagatttaaaagttttaatcacctctgcgactcttgacggtttaaaagtttcaaagttcttctcaggatgccctgtgttaaacattcctggaactttattccctgtggagaaattttacagcactgatcgcccaacaaattatatagaatcttcactcagaacagctatagggtttggttgttgcacatgattatgataaacagatctcctttgttccgaaagaact

SEQ ID NO: 82329 - DNA, 772 bp, Zea Mays
attttgtcggtaaagaacgtgtgaggatggtgcactagcgaagcccttgtacataatggcattcgggcgaatcccccgttccataatggcataattccatatttctccagctgttccgccgagcgaacgacccacaaccagaagccacccattggcgtacgcgaggcgatcggagcatcccgtcccaagaggagaaactccggccggcgacgcgggggaaaatggggaagacgccggtgcggatgaaggcggtggtgtacgcgctgtcgcccttccagcagaaggtgatgccggggctgtggaaggacatcaccaccaagatccaccacaaggtcaccgagaactggatctccgccacgctcctcctcacccccgtcgtcggcacctaccaatacgccatgtggtacaaagagcaggagaagctttcccacagatactaaatgggatgtcctccaagttgctgcggcttgtcgcagttgaattttccatgatggggaaggatgtgaggctgagatggaggaactctgccaccgttcgcgccaggtggagcatcgtgcaatggctagccttgtgccaagcttgtcttaccgcctccaccacccttttttacatccaagatcgcacctcgagattgcctgtccacgctgcaacagcttcaccctgttaacagggcatgtacaaccttacaccgttaaccttacaccgttgcacgatattagacataactaaatcataatataatacggtgggtgtgtctaaacttgtgtcttac

SEQ ID NO: 82330 - DNA, 1586 bp, Zea Mays
gagagcgggcggagagtgtgagttgcgcccgatgtgccgtggcggcatgggaggaagagggagaagggcggacaggatcaaatcgccctcgacccccacactagagctccacctcccttgacatccttctccaccgccctagttgcaagacgaccgccgccctgcaaggaccgtcgacgacggtgctcatcgccgctttggtaattggtcgtatagtccctcatcatcggaatggatccgaaggcagagaatcctaatgagatggttacagccggtgtgctttcaagccttcagaatttcctacgcaagtgcctcatagccatcctctcatatggcccaatgccgaagcacattgcatttattatggatggcaatcgtcgatatgctaaattcagaagcatgcaagaaggagcgggtcacaggatgggtttctctacccttattgcaagtctgatgtactgctatgaaatgggtgtgaagtacatcactgtctacgcattcagcatcgacaattttaaaagggacccaagtgaggtggaatccttgatgcagttaatggaggaaaaaatcaacgaactcttagagaaccgaagtgtaatcaacaagattaactgtaagatcaacttttggggtaacttggacttgttatatgagccggtgcggttggcggctgagaagctgatggcgagcacagctgggaacacagggctggtcttttctatctgcatgccatacaactcgacttctgagattgtcaatgctgtcagtcaagtctgtgcggaaaggatggaaatgtttcagagcgaacatattggcgaatgcaatggtcatgctgcaaataacggtgtgcgatcagagatttcagtggcggatttggatcgccacatgtatagtgccgaatgcccagatcctgatattgtcatccggacttcgggcgagactcgattgagcaatttcctcctttggcagacaacgtttagtcacttgcagaatccagatcctctgtggcccgagttctctttcaggcaccttgtttgggctgtcttgcagtatcagagagtttaccctgctctggagcataacagaaagttggctaagaagcagttgtgattccatgttacttgcaaggaggtatcatgaagggctattaacatcaaacttttccttctcaatttcctggtaatggtaaatgcaaagaagaacatactagcatataacattatgaatagatcaccatgtaacttaagtgtgattgctaccgtaaccatgtaacttatttgagctcgtacaaatgctgtgattcctaaatatatatatatatatagagtgcctggggtaacatggtgtgcgagagcatttctttgttttgcacgacaaagaccggatgcttcaaagcgcccatgtttgacaagtgaaaagaaaggagttcgaagtaaaacaataggccaatgtctgttttccatagtccaataagtagaccactgataatgtctgttgatcatattttgcatccagccaagtagaccactgaaaaccaaggtcatgcacgtacagaaatatatatgcaagtttaacgtctgatggct

SEQ ID NO: 82331 - DNA, 946 bp, Zea Mays
ggtgtgcactatgcaggcgtgcccaagtgcagcagtgccatccctgacaacagattcggagaagaagggcccagtgataatggaaattccactggaccaaatccggaggccactgatgcgaacgcgggccaatgatccagtcaaggtgcaagaactcatggacagtatccgtgtcatcggcctccaagtaccttttcttgactactgcagattgatgtgttggaggtcgatggggtctattatggcttctctggatgccaccgctacgaggctcaccagcgccttggtctcccaaccatccgctgcaaagttcgccgtgggacaaaggaaacactgaggcaccatatgcgatgagttatattttattcagttacaaagtgatctgtgtatctagagctaaaacagaagcttccatggtcttttcgtcgtctcgtctgcaattctccatacctgtaaatgttgtccaaacagagtggtgaatagtacttctgtacccagcagcatcagaaaatgttaattttgcctacaacactcttttcgatcagtggatggatgagtaccacccgctcagtagatcattccatttctacgagatttttgtaaaaaaagaaaaatgcagcagcagtcggcacgctgtgtcatttagatcatctagaaaaccagaaaaaacgagtcatgtaacttgtttggctcgtgcaaaaaaatattcaaaaccaagtttgcttatactggatgctgatgtgtcatgctatgttggggcacactaatgaaagtttggagatttaatttatatgtcaagtttgggagctcaaatgctaagtttgatgatgcaagtgactctaacatggtacgtcaatgttggtatccagttttagcaaatctgatttaaatctgattttggatagttttagatgagcaaacctgattttggatattttagatgggc

SEQ ID NO: 82332 - DNA, 1117 bp, Zea Mays
aaacgaacaagtccttattgtactgcaacaggttttgtttttgaattattggagtgcgtgtgcgtgtgcttgagttcagtacttcagtccacgaagttggtatctcttgagctggggaactgatgtagagaatttattttttgtcaaacattgtatcctcgtgttactgaatttgctggggtgtctagggtgtgcactatgcaggcgtgcccaagtgcagcagtgccatccctgacaacagattcggagaagaagggcccagtgataatggaaattccactggaccaaatccggaggccactgatgcgaacgcgggccaatgatccagtcaaggtgcaagaactcatggacagtatccgtgtcatcggcctccaagtacctattgatgtgttggaggtcgatggggtctattatggcttctctggatgccaccgctacgaggctcaccagcgccttggtctcccaaccatccgctgcaaagttcgccgtgggacaaaggaaacactgaggcaccatatgcgatgagttatattttattcagttacaaagtgatctgtgtatctagagctaaaacagaagcttccatggtcttttcgtcgtctcgtctgcaattctccatacctgtaaatgttgtccaaacagagtggtgaatagtacttctgtacccagcagcatcagaaaatgttaattttgcctacaacactcttttcgatcagtggatggatgagtaccacccgctcagtagatcattccatttctacgagatttttgtaaaaaaagaaaaatgcagcagcagtcggcacgctgtgtcatttagatcatctagaaaaccagaaaaaacgagtcatgtaacttgtttggctcgtgcaaaaaaatattcaaaaccaagtttgcttatactggatgctgatgtgtcatgctatgttggggcacactaatgaaagtttggagatttaatttatatgtcaagtttgggagctcaaatgctaagtttgatgatgcaagtgactctaacatggtacgtcaatgttggtatccagttttagcaaatctgatttaaatctgattttggatagttttagatgagcaaacctgattttggatattttagatgggc

SEQ ID NO: 82333 - DNA, 1263 bp, Zea Mays
acttggaaaatcgatctactcgatgttgtacatgcgtgacgctcgaatcatgccatttctgtgctgatcggcccatttgctctaacatctagcccagataactcttgtggtacacatcgacgcgacactctgacacgctacggcctctcggcggggcccggcaacagaccgggcagcagcacggcagccatggcgtcgagttcgaccctggatttggcgatgggccccggcgccctcctcccccgcagcgcggtcccgtacgcctccttcgctccaggaaggggaaggagcgcgagcggaacgaggagcaggaatctggcgctctccgcttcctcctccaacggtgcagcagtgccatccctgacaacagattcggagaagaagggcccagtgataatggaaattccactggaccaaatccggaggccactgatgcgaacgcgggccaatgatccagtcaaggtgcaagaactcatggacagtatccgtgtcatcggcctccaagtaccttttcttgactactgcagattgatgtgttggaggtcgatggggtctattatggcttctctggatgccaccgctacgaggctcaccagcgccttggtctcccaaccatccgctgcaaagttcgccgtgggacaaaggaaacactgaggcaccatatgcgatgagttatattttattcagttacaaagtgatctgtgtatctagagctaaaacagaagcttccatggtcttttcgtcgtctcgtctgcaattctccatacctgtaaatgttgtccaaacagagtggtgaatagtacttctgtacccagcagcatcagaaaatgttaattttgcctacaacactcttttcgatcagtggatggatgagtaccacccgctcagtagatcattccatttctacgagatttttgtaaaaaaagaaaaatgcagcagcagtcggcacgctgtgtcatttagatcatctagaaaaccagaaaaaacgagtcatgtaacttgtttggctcgtgcaaaaaaatattcaaaaccaagtttgcttatactggatgctgatgtgtcatgctatgttggggcacactaatgaaagtttggagatttaatttatatgtcaagtttgggagctcaaatgctaagtttgatgatgcaagtgactctaacatggtacgtcaatgttggtatccagttttagcaaatctgatttaaatctgattttggatagttttagatgagcaaacctgattttggatattttagatgggc

SEQ ID NO: 82334 - DNA, 577 bp, Zea Mays
atatttctcggcatgtgcttagtacgttcaaacgcttgactcacggtaccacaccttaatccttattccaatttccatctcgtagacaactaatccccatggattgttgtccacagaccaacatcattatgataagaaagtggatacaaccaattcctgacctcgcgcgagtgctagaaaaatcactcgacttctaccgagatccctaaatagtaaagcagttactcgacctagcatactagtatccatctcaaaggtatcctgagttcatgcaactagggtttcaggcaactcctacacttaagtgcacagtacaagcctacaaacattaagtgcagtaaaatagcatatataacggttatgcataaaaccggggcttgcctttaatttgacacttagatagtgtttgctgggggaggtactcgcttggcgagcatccactggttaagtccattcctcaggtcgtccaccaactgcatcttgtgggtggcaccacatcaatggctcgatcatcatctctcggtcctaaatgagatgcaatatgcatatgtatgaatataatgaaatagcacaagat

SEQ ID NO: 82335 - DNA, 1872 bp, Zea Mays
gattgcaaccctcgtccgttgggacgccacaacgtggagtaggcaagcgttggtcttggccgaaccacgggataaaaccactgtgtcactctgtgcttgattctcttgtggtactgtgttttgttgagattgttgagacttcaccttagccacttggcaataatcgtgctaacacttaacaagtttttgtggcttaagtttgaagtttttacaggatcacctattcacccccccctctaggtgctctcaggaccctgcggataacctcttgctgcttgctgctggaactgctgctgacccgccatttccctaaggaagcgggtattatcggcggtggcattcaccaaggcggcgatcgcctcggctaacgtgggaggaactggaggtgggtttggggtaacatcccgtcccccagaagttcctgctgcatcctgtcctcgagtcctggtcggcatctgtggcaaaaacatttgaggtaaacataatgtgccagagaaaaccttccattttacattactataaaaagtaatgatacagactcgattttacataacaggatacaatacccattatacaacaatacaccctacaataccctacaatacactacttttacttctactacacccttattcctgcttgccatcagtcttggcggcttcatcgtcaggtgtgggagtccagacatcaaccaacctcaaagaaggagggggctcaaaaaggtctaactccccacccagcgcacgtcccgcaacgtgagacggtccagcttcggcctcagcaggtggtgcaggctcacttgggtgtagttgtgagtataatacatggacttcctcgtgcaacgtattgcagtaaacctgcaggtcatcgacagtcgagctaagttctttaattcgggcctgagcccttgcttccttagcacacattagcaaacgagactgcacggcccagtcaagtgctaagtctcgatcggcgagttgatcctgcaagtgtcggatgtcccttctcagttcgttgattctatcaccgtcagcgacccaagcatcagtcctatgttgaagtgctgcttgaagtcgactcacacgagcttcaaggtctccgatggggtcgttactcccactgctgctgctttcatgtcgggaagccaattgatgccgaggcaccccaattggtcccgtggacttgcgtgccattagcctggtacgtggcggcatcttttctaagggggaaaatgttattagtatgattcttagcatgatgcatgtataattacagaatcaaccttagtcgattcaaccttctatacgttgcactcttcctatctggtctttaagatagacttcttcagaatacttaggtaagaagagaaaagaatttctaggtaagactttttaaaaaattcctttgaagatgcctcataatatctgccaagaagggctacgctccgataccagctgtgacggaacctcccaagtaattaggcccacctacagttgtccttgtctcacagacatcagccaaccctgtaggtgcccctgaactacttgacaagttcggtatctttccttaccttaccaggaacgtctcacccatcttgtagacattacagaacatcggagatgaagaaatgcggaagcgaattacataatcttacattttatttcgaaagcaagcttgagttatttttattacagaccagactaaaagtgagtgcataggagtaatattatacaaaccagggaggcacaaactcctcccgagaagctaaaagcaaaagatcttaagtggaggaccgagtcctcccgcacttcagtcttgattttcttcttttggaaccaccttggcacagaagcagcaaaagtctgctatttc

SEQ ID NO: 82336 - DNA, 5198 bp, Zea Mays
atttaggtccaaaaccttgggttttgctttcaagtacacatttttgtgaaccaagggacttaagaaacctatttggcttggtttttgcactttagcccaaaagtgggctaattttgcacataagcccctagggtttggttttagggttttccagggttccaattagagtttctggtatctcaggggtataaaagtgattcaagtttattcttagggtcattttatgacttttacccaaaagtatttaggttttcttaacttgggtaaagttttacccctataatccccatttagggttaagttccttaaccagggttctagttgcaaaacacttaaaacaatacaacttgtttgaaatttttgcctagtgaatgcactctaggtgtgtcaaacatatgcaatgccaatgctatgatgccatgctcaagttttagttacagtaacaccaggggtgttacatccttccccccataaaagaatctcgtcccgagatttaaagtcctagggtgagtaatggaaaaggaaatgtgtcacatttttatttccttatttctggtacaaggcaggggtggtgtgggggttcattcctttattacacagctatacaaactttacaacttacaagaggctagaaagcctgggaaattcttatctaagaaatcttgggtttcccatgtagcctcctcttccgaatgctggttccactgtatcttgtagaacttgagagtctttcttcgggtgaccctgtccttttgatccagaactcgaataggatgttccgagtatgttaaatctggttccaggacaacatcagttatttcaatggttcgatcaggaacccgaagacacttcttcaattgtgacacgtggaacacattgtgcacagcagacaatgtttcggggagctgaagtcgatacgccactggcccatatctttccagaataagaaaaggaccaatatatcgtggtgcaagttttcctttaactccgaaacgcgatacgcctttcattggtgataccttcaggtagacatagtctccttcaagaaaatataagggcattcgtcgtttgtccgcataactcttttgtcgtgcttgagctttcttcatattatggataattctatgaaccttttcttcaacctctttcaccatattaggtctaaagaagtatctttctccaggttcagaccaagttagtggagtccgacaccgtcgtccatataaagcttcaaagggtgccatcttgatactttcttggtagctattattatatgaaaactccgctaaaggtagacattcatcccattttagtgagaaatccaggacacatgcccgtagcatatcttcaagtatttggttcactctctcagtttgtccactggtttgaggatgataggccgaactgtggagcagtttagtacccaggaatttatgaagttcttcccagaatttagatacgaattgaggtccacgatccgacactatagtctttggaacaccatgcaaactgagaatacgggcaatgtataactccgcataggtaatgacgggatatttaactttgaccgggagaaagtgggcgatctttgtaagtcgatcgatgataacccagatggagtcaaagccttttgcggttctgggcaatcccacaataaagtccatactgatgtcttcccatttccatgttgggattggcaaggattgtaatggaccagcagttttcatgtgtatggccttgacacgtctgcaggtgtcacacttagccacatagcgtgcaatttcaatcttcatttttgtccaccagtaatgttgctttaaatcttggtacatcttagtgcttccgggatgaatagaataacgactaagatgtgcttcatccagaatttgctggcagagctcttcgttctttggcacaactatgcggtttttaaaccatatcacaccttgatcgtcttcattgaaacacttggctactcccgcctttatcttctctcgaatgtgtttcatacccagattatccttttgagcatcaattatcctttgcaaaatgattgactcaagctttaactgatttagagtcccttgttggatgatccccaggtttagcttttccatttcctgacacaaagtgttctcggaggtcttcgccataagacagtggcaggaagtcttacgactcaacgcatctgccaccacattggccttgcctgggtgataatggatctccaattcatagtctttaatgagctcaagccatcgtctttgcctcatatttaactctgactgggtgaagatgtacttcaaactttttatgatctgtatatatgtgacagatatttcccagcagatagtgacgccaaatctttagggcatgaaccacagcagctaactccagatcatgagttggatagtgctcctcatgccggcgcaactgccttgaagcatacgcaattactcggccctcttgcatcagtacacagccgagcccactgccagatgcatcacaatatacatcaaaaggtttagtgatgtccggttgagccaaaaccggagcagtggtcaatagtgtcttcagttgctcaaaggcttcattgcacttagaagaccaattgaacttaatgtcattcttcaacaaacttgcgattggcttcacaagcttagaaaaatctggtatgaatctgcgataatacccagctagtccaagaaaactccggacttggtgaacagttgttgggggtttccactccagaatatctttgaccttgctaggatctaccgcaattcctttagctgataatacgtgccccaaaaattgaatttcttccagccagaatgcgcacttgctgaacttggcataaagctgatgttccctcaggcgcgtcaatacaatccgtagatgctgagcatggtcctcttcattcttagaatatatcaagatatcgtcgatgaagactaccacgaatttgtccaactcgggcatgaacaccgagttcatcaaataggtaaaatgggcaggagcatttgtaagcccgaaagacattactaggtattcgaacaacccataccgcgtagtgaatgcggtcttcggtatatcctcgggccgaatacggatctgatgatagcccgacctgagatcaattttagaaaataccctcgccccagtcagttgatcaaataggatgtcgatcctgggaagggggtacttattcttgatagtgacctcatttaggggtcgataatccacgcacattctcaaggtttgatctttcttcttaacaaaaatggcgggacaaccccacggggacgagcttggccggatgaatcccttattcagtagatcttgtaattgagtcttcagttccgccaattcattagggggcatacggtacgatcttcgggagatgggagccgtaccgggttttaactcaattacgaattctacatctctttcagggggcagtccaggcaaatcttccggaaatacatctggaaactcacatactaccggaatgttcttgatctccgatacaatggcttcatagactttaccagaagctttggctggattggttgcggggagagtcaaaagaatctcttcttggttatagctcaacctgacggttctgagttcagtgttgaggattgccttgtgttgggttaaccaattcatacccaagattacatctatatcctggccttttagaacaatcatgttagcaggaaagttccgtccggccattgttactggcacaccataggccacttctttagtaaaaatatgtcccccaggtgaatgaattttaaatccctcttttgattcatgacatgcaatatgatattgttccacaaacttcttgctaataaatgtatgtgaagcaccagaatcaaaaagaataattgctgggtgactggccacgggaaacgtacccatcatcaccggctctccttccggtgtagtagccacttgagtataatacacacgccccgttttcttcgtattcttccccatagcatttccttttgactgaactgatttcccagatccttgcgaagcattagattgattttgcctaggatatgggcagtctttgatgaagtgtcccgacttgccgcaattaaagcacccagttgaggaactaggcaaggcagggaatcgagtgcctggggcacccggctgttttggggtagtgggggcattattggggcggataatgataggctgtttaaagggaaatgaaggtggacgagaaaaaatacggttttggctagaaggccggatgacaaaccgttgcttctttgcctggccctgattaggcctctcaccaccgaatcccttattctttccagaatttgtgtatttggcttcaacagataaggctgtgctgacagcctttccatatgtgaggtctatgcacgtggccattttcctttgtagccgatcattcagtccccgcataaaacagttcttcttcttcaaatctgtattcacctggtcgatagcatactgcgacaggtgattgaacttgttgagatattgagtaatggtatctccgccttgttgtaacttcataaactcctcttgtttcatgtgcagcactccttcggggatgtagtgttcacggaaggctgctttaaactcattccaggtgacttgatggttgtcgggttgaatagccataaaatttccccaccaggtactggcaggaccacggagttgttgtgcggcgaacaacggcttttgcgtctctgagcaacgaagaagaccaaacttttgctcgataacccgaatccactcgtcagcttctaggggatcttctgccttgacgaatagaggtggacgagtttccgagaaatccagataagtggtctcacggggacctgaaagggaaatgtgcccttgggccatttctaagtattttggtgattgagtgcaaacacaagggcctaaatgtgaatttatgtacatgaatgaacaaggtgaaaatcatgaagtaaaggtatgtttctaagccttagtacattgtttttaagtactaatatatttgtctaagtgttagaaacagaaagaagaagaatagagaaaaggagaagggacttggctgtgtgctgccaagacccagctcggtctggagcaccggactgtccggtgtgcaccggacagtgtccggtgtgccaggctggcgcgactcgaactgg

SEQ ID NO: 82337 - DNA, 2277 bp, Zea Mays
cttgaatatacttcgtttgactaatgaaggtgccctcttgggagttgcttcacttgaaatcccaagaagtacttcaactcccccatcacagacatctcgaatttttgtgtcatgatcctactaaactcttcacatgtagattcattagtagtcccaaatatgatattatcaacataaatttggcatacaaacaaatcattttcaagtgttttagtaaagagtgtaggatcggcttttccgactttgaagccattagtgataagaaaatctcttaggcattcataccatgctcttggggcttgtttgagcccataaagcgccttacagagtttatatacatagttagggtactcactatcttcaaagctagaaggttgctctacatagacctcctccttgattggtccattgaggaaggcacttttcacgtccatttggtaaagcttaaagccatgataagtagcataggcaagtaaaatgcgaattgattcaagcctagctacgggtgcataggtttcaccgaaatccaaaccttcgacttgtgaatatcccttggccataagtcgggctttgttcctttgtcaccacaccatgctcatcttgcttgttgtggaagacccacttggttcctacaacattttggttaggacgtggaactaaatgccatacatcatttctagtgaagttgttgagctcctcttgcattgccaccacccaatctgaatcttgatgtgcttcctctatcctatgtggctcaatagaggaaacaaaagagtaatgttcacaaaaatgagcaacacgagatcgagtagttacccccttttgaatatcgccgaggatggtgttcacgggatgatctcgttgaattgcttggtggactcttgggtgtggcggccttggaacttgttcatcttcctcatcttgatcatgggcatctcccccttgatcattgctttcctcttgaggtggctcaacttcttgatcttctccttcatcattttgagcctcatcctcatcttgagttggtggagatgattgcatggaggaagatggttgatcttgtgcttgtggaggctcttcagattccttaggacacacatccccaatggacatgttccttagcgcgacgcacagagcctcttcatcatctagctcatcaagatcaacttgctctacttgagagtcgttagtctcatcaaacacaatgtcacaagaaacttcaactagtccagaggacttgttaaagactctatatgcccttgtgtttgaatcatatcctagtaaaaagccttctacaaccttaggagcaaatttagattttctacctcttttaacaagaataaatcattttctaccaaagactctaaaataagaaacattgagctttttaccggttaggagttcatatgatgtcttcttgaggattcggtgtagatacaaccggttgatggcgtagcaagcggtgttgaccgcctcggcccaaaaccgatctgaagtcttgtactcatcaagcatggttcttgccatgtccaatagagttctattcttcctctccactacaccattttgttgtggcgtgtagggagaagagaactcatgcttgatgccctcctcctcaaggaagccttcaatttgggagttcttgaactccgtcccgttgtcgcttctaatcttcttgatccttaagccgaactcgttttgagcctgtctcaagaatccttttaaggtctcttgggtatgagatttttcctgcaaaaagaacacccaagtgaagcgagaataatcatccacaataactagacaatacttactcccattgatgcttatgtaagctatcaggccgaataggtccatgtgtaggagctcgagtggcctgtcagtcgtcatgatgttcttgtgtggatgatgaacaccaacttgcttccctgcctgacatgcgctacaaatcctgtctttctcaaaatgaacatttgttagtcccaaaatgtgttctccctttagaagcttgtgaagattctttattccaacatgtgctagtcggcgatgccaaagccaacccatgttagtcttagcaattaagcaagtgtcgagttcagctctatcaaaatctactaagtatagctgaccgtctaacactcccttaaatgctactgaatcatcacttcttctaaagacagtaacacctatatccataaaaatacagatgtaacccattttacataattgcaaaactgaaagcaagttataatctaagaatctacaagaaaaacatttgag

SEQ ID NO: 82338 - DNA, 4347 bp, Zea Mays
atgcccagggtccctctttctgcaggccgaccaacggctaggcggcgctccgcccacaacccgagctgcttcaccctggccccgcgagcgactccgcccacacgcttccgcgcagctcgccgggtgcggcagcatgatcgcgcacccaagcttgacccgacgtccggggagctgttcgcgctcagctacgacatgatcaagcgtccctacctgaggtacttctacctgcggcccgacggcggcaagtcgggcggcgtggagatcccgctggagcagcccaccatggtgcacgacttcgccgtcacggagcggttcgtggtggtgcccgaccgccagggtaatttgcagcatgagtacagtggaaatgactgtctccaacttaaaggacatcagacatatactgaagtatcttctctccttgagcacttgaagctttgcatgttcttctcaaagaaatcttttttagcatttctgaagtttggtgggtacaaacaagaagacattcttattcacaaggctaaggcgaggctcatgcagtcttctttcgcattggtgtgtgacaaaagaaccaagtgcttgctgcttttcattcggggtgctatcagcactaaagagcgcctgactgcagcaacttctgctgaagttccttttcaccatataattctatctgaaggaaagatcagcaatgtagttttaggtaagttgcagtccgaggttctcaaggatgccatctcccagatagttcaggatgccaataagaataggaagttcactgagactgttgagcttcagattagtctgaagaattatgaagagggctgtggcgatgacgagggctgtggcgatggagatgccagcggcaagcgcttgaccaaggagatttacgctcgtctgtgccgatccaccctctttgatgccggcagaaaggaattctggattatgaagaacaagggagccctttgcataagtatatcatcaaaggcaatgactattaccaggatagatgatcggaggtactggagccacctcgccacaggggaatcaagacaggtggcggagattgcctcggagcccgaccgcgccgccgcgtacgcacggttgcttctcctacagcgcggctgcgccgacgacgcctcctccgccgccgagctcgccgcggaattaccttccaccctcctcccgctcctcctccgcgacgcggccgccgatgacgaggccgtcgccgcttctgcgctcaagtgcctcggcttcgcgctctaccaccccgtcctcgtttctactatttcagcacagatgacccaattggtattggataccttggtacatataatcatgagcactcggatgaagtctgcttgcaatttgggtgtctggtgcttctcggttcaacaactgaacccattgattatagaggatagagcagatccaatgcttattgctattgttcatgcgctcgacaatccatttggttccttgtccacaacatttgaggcagctcaggctatcatgaagcttggtggtcaaagtcccaaaagaatgagggacctatcaagcttgtgggttccaccagtataccggagactcttaagtgctgacaaggcagaaagggacatggtagaaaggtgccttattaaggtgtcatgtgttattctaccacctcaacctctcctttccaaggctgttgcttcagaccttgagcagaagctactctcctgtatggtaaatatgcttgatgatccttccaagaaagttcaaactgtgaagtcatggggatggattgtatctttgcttggtccagatgcagtgaacaatagacctctgcttaataaacttataaaggttcctgagcagatgtttactgatctgaatccacaagttcaggttgctacaatggtttcctggaaaagtttggtggatgcattttttccttctcaggcaactgagattgtggcccagcaaactgtgatttccccattaaaacccattgaacagggtcagagaggatttatgtgccccagtgaatcagaacttgctagctcaatcatgcaagcatatcaaggccttattggatattcaacacatcaaatggttaccatgggatattagttgctttaatttccaactcaatattcttggcataattcttaagccagaactattccaggacataattcctgaaacaatggtgattgttatggattctgcaacagagattttcagatttcttctaaaaggtattcaaatcgaacttagagagcagcgtgcttatgaacaagtcaatgaatgcattactaacgcgtgcaagtttgcaaagaggttgttgctggatcatgtaggaaagaatagtgttatcaagtgtgctgcattactggaatttggtcttcggtttatgaaagttattgcgaaggaactagatcattctttgttagcttctgaaaacattgaggtatgcttagacatcgaacacataaaggagaaccaacatgcagaatgcagcccaaagctgtccttaccaagaatcagatcactctcttacatggagatggtttctccagcagtttatgtgactgcactgtctctgtccatgatatctcagtatactggagagttttctcatagagatgcagatgaattagtttcaattctggatccatcatcagatgccctggagaattttcatactgctgtctcttttatgtatatgcagatcaggcggccaacatgtaacaaggaaagattaaaatggttgatggtttggaactcgtttgcaaaaaaaatgaacagtcaaattatctcttatttggaaaccaattctggattatgttaccatgatgttctccatcagttcttctgttatccaatccttaattttttataccccaaggggatatccattcttttgaatgctgaaaatagctccgagtcaaaattttctgtcctgcaaaacctggagatggaatcaacaattgaagtttatagatccctctctacaaactcctgtaattcgaagtttttttccaaggttttctttgatggtttttacaaatacttggtttgcactattgatgaaaacatggcattgttccaagccaaccttgagcatttgtcggaggagtttgaaaatgctagtgtcctttctgctcttggtgaaatagtcattggactgttacagaatgatcaaatgttgacctatgctaatcaagagttgaaggaaacacctgaagattcttctgtgtgcagacaaccggaacttttcttgaattgcttcaagcttgctaataggtttatgaagttgtcaagttttcatttcaaagcaaatccagctggacagcaccaggtcacaagcaggtttttttcatctttatctaattttgctgggcatctcactttaaaggaagatgttcttcttttcgagattattggagaccaacttaccgagtggctctctttaagcatcatattgtactctgaaatgcaacaaggacaaattgttgttcatcttgagaacctttggctcaagatggttgagtgcctgaagaggagtcagctagttagtgatgttcccttaataaatcagaagcatcgacttcttcaagctgcactcaatcgcccacatcgccccatttcagttgcaacagcatcagtttgcagagtagcaacacatggcaacacaaccctgcaccctggttgcttaatttctgaatttgctgagttattaatgcatagaagaaaggctcttgatagctccaggaaaacagtcatcacatccaatcctactgatctcacggccgagaggtatgatggatctgtgaatgtctcggtgggtttggggaggaagaggctgaagatcatgaagtattcaactaaaccaaaggaactcaacaaaaatagagccaacatgggcatctcaccaggtaatacggaaaatagggcgtgtaggaaaccagaattaatattggagatgctacagaggaagacatagttgtttgaactcaatgttaggtttaaagaacataaatgtgtacatacgtatagaaagcggaaggtcagtgcaatgatcccctgcaaaagaattaaatccattcaaaattacaagtcattttcattccttacacagccacattgtttgactatagggagatggaaacaacaggatctaatcatgtatgtaattgatgctttggcctgggctcctggctgttacccctttttttttgtgtgttttggtaacctctgagcaagattcttgtgttcttcctcatcgtccctgcagccaacacttcgtttgttaactacagccgcaggttcttttccaatcgcattaataatgctgagaagcaagtcatg

SEQ ID NO: 82339 - DNA, 4663 bp, Zea Mays
atgcccagggtccctctttctgcaggccgaccaacggctaggcggcgctccgcccacaacccgagctgcttcaccctggccccgcgagcgactccgcccacacgcttccgcgcagctcgccgggtgcggcagcatgatcgcgcacccaagcttgacccgacgtccggggagctgttcgcgctcagctacgacatgatcaagcgtccctacctgaggtacttctacctgcggcccgacggcggcaagtcgggcggcgtggagatcccgctggagcagcccaccatggtgcacgacttcgccgtcacggagcggttcgtggtggtgcccgaccgccagggtaatttgcagcatgagtacagtggaaatgactgtctccaacttaaaggacatcagacatatactgaagtatcttctctccttgagcacttgaagctttgcatgttcttctcaaagaaatcttttttagcatttctgaagtttggtgggtacaaacaagaagacattcttattcacaaggctaaggcgaggctcatgcagtcttctttcgcattggtgtgtgacaaaagaaccaagtgcttgctgcttttcattcggggtgctatcagcactaaagagcgcctgactgcagcaacttctgctgaagttccttttcaccatataattctatctgaaggaaagatcagcaatgtagttttaggtaagttgcagtccgaggttctcaaggatgccatctcccagatagttcaggatgccaataagaataggaagttcactgagactgttgagcttcagattagtctgaagaattatgaagagggctgtggcgatgacgagggctgtggcgatggagatgccagcggcaagcgcttgaccaaggagatttacgctcgtctgtgccgatccaccctctttgatgccggcagaaaggaattctggattatgaagaacaagggagccctttgcataagtatatcatcaaaggcaatgactattaccaggatagatgatcggaggtactggagccacctcgccacaggggaatcaagacaggtggcggagattgcctcggagcccgaccgcgccgccgcgtacgcacggttgcttctcctacagcgcggctgcgccgacgacgcctcctccgccgccgagctcgccgcggaattaccttccaccctcctcccgctcctcctccgcgacgcggccgccgatgacgaggccgtcgccgcttctgcgctcaagtgcctcggcttcgcgctctaccaccccgtcctcgtttctactatttcagcacagatgacccaattggtattggataccttggtacatataatcatgagcactcggatgaaggttgatccggctgaccattttttccttttcaagatctcaagtctgcttgcaatttgggtgtctggtgcttctcggttcaacaactgaacccattgattatagaggatagagcagatccaatgcttattgctattgttcatgcgctcgacaatccatttggttccttgtccacaacatttgaggcagctcaggctatcatgaagcttggtggtcaaagtcccaaaagaatgagggacctatcaagcttgtgggttccaccagtataccggagactcttaagtgctgacaaggcagaaagggacatggtagaaaggtgccttattaaggtgtcatgtgttattctaccacctcaacctctcctttccaaggctgttgcttcagaccttgagcagaagctactctcctgtatggtaaatatgcttgatgatccttccaagaaagttcaaactgtgaagtcatggggatggattgtatctttgcttggtccagatgcagtgaacaatagacctctgcttaataaacttataaaggttcctgagcagatgtttactgatctgaatccacaagttcaggttgctacaatggtttcctggaaaagtttggtggatgcattttttccttctcaggcaactgagattgtggcccagcaaactgtgatttccccattaaaacccattgaacaggcaagtgcacaggtgaaaaggataagattaattatggtgcctatatgtcgagttctgtcaagaagtcgcaatattgtacttagctcttcttgtttgagtacatggcattaccttctacatagacttggtaatctgatcaattatttacccattctggaggctgcttttggaccaatactcaaaataattttctcttttgggatcaatgatcagaacaagccactgtggtcattttgcttgaacctttttcttgattttgtttcatcaaaaaatagggtcagagaggatttatgtgccccagtgaatcagaacttgctagctcaatcatgcaagcatatcaaggccttattggatattcaacacatcaaatggttaccatgggatattagttgctttaatttccaactcaatattcttggcataattcttaagccagaactattccaggacataattcctgaaacaatggtgattgttatggattctgcaacagagattttcagatttcttctaaaaggtattcaaatcgaacttagagagcagcgtgcttatgaacaagtcaatgaatgcattactaacgcgtgcaagtttgcaaagaggttgttgctggatcatgtaggaaagaatagtgttatcaagtgtgctgcattactggaatttggtcttcggtttatgaaagttattgcgaaggaactagatcattctttgttagcttctgaaaacattgaggtatgcttagacatcgaacacataaaggagaaccaacatgcagaatgcagcccaaagctgtccttaccaagaatcagatcactctcttacatggagatggtttctccagcagtttatgtgactgcactgtctctgtccatgatatctcagtatactggagagttttctcatagagatgcagatgaattagtttcaattctggatccatcatcagatgccctggagaattttcatactgctgtctcttttatgtatatgcagatcaggcggccaacatgtaacaaggaaagattaaaatggttgatggtttggaactcgtttgcaaaaaaaatgaacagtcaaattatctcttatttggaaaccaattctggattatgttaccatgatgttctccatcagttcttctgttatccaatccttaattttttataccccaaggggatatccattcttttgaatgctgaaaatagctccgagtcaaaattttctgtcctgcaaaacctggagatggaatcaacaattgaagtttatagatccctctctacaaactcctgtaattcgaagtttttttccaaggttttctttgatggtttttacaaatacttggtttgcactattgatgaaaacatggcattgttccaagccaaccttgagcatttgtcggaggagtttgaaaatgctagtgtcctttctgctcttggtgaaatagtcattggactgttacagaatgatcaaatgttgacctatgctaatcaagagttgaaggaaacacctgaagattcttctgtgtgcagacaaccggaacttttcttgaattgcttcaagcttgctaataggtttatgaagttgtcaagttttcatttcaaagcaaatccagctggacagcaccaggtcacaagcaggtttttttcatctttatctaattttgctgggcatctcactttaaaggaagatgttcttcttttcgagattattggagaccaacttaccgagtggctctctttaagcatcatattgtactctgaaatgcaacaaggacaaattgttgttcatcttgagaacctttggctcaagatggttgagtgcctgaagaggagtcagctagttagtgatgttcccttaataaatcagaagcatcgacttcttcaagctgcactcaatcgcccacatcgccccatttcagttgcaacagcatcagtttgcagagtagcaacacatggcaacacaaccctgcaccctggttgcttaatttctgaatttgctgagttattaatgcatagaagaaaggctcttgatagctccaggaaaacagtcatcacatccaatcctactgatctcacggccgagaggtatgatggatctgtgaatgtctcggtgggtttggggaggaagaggctgaagatcatgaagtattcaactaaaccaaaggaactcaacaaaaatagagccaacatgggcatctcaccaggtaatacggaaaatagggcgtgtaggaaaccagaattaatattggagatgctacagaggaagacatagttgtttgaactcaatgttaggtttaaagaacataaatgtgtacatacgtatagaaagcggaaggtcagtgcaatgatcccctgcaaaagaattaaatccattcaaaattacaagtcattttcattccttacacagccacattgtttgactatagggagatggaaacaacaggatctaatcatgtatgtaattgatgctttggcctgggctcctggctgttacccctttttttttgtgtgttttggtaacctctgagcaagattcttgtgttcttcctcatcgtccctgcagccaacacttcgtttgttaactacagccgcaggttcttttccaatcgcattaataatgctgagaagcaagtcatg

SEQ ID NO: 82340 - DNA, 4513 bp, Zea Mays
atgcccagggtccctctttctgcaggccgaccaacggctaggcggcgctccgcccacaacccgagctgcttcaccctggccccgcgagcgactccgcccacacgcttccgcgcagctcgccgggtgcggcagcatgatcgcgcacccaagcttgacccgacgtccggggagctgttcgcgctcagctacgacatgatcaagcgtccctacctgaggtacttctacctgcggcccgacggcggcaagtcgggcggcgtggagatcccgctggagcagcccaccatggtgcacgacttcgccgtcacggagcggttcgtggtggtgcccgaccgccagggtaatttgcagcatgagtacagtggaaatgactgtctccaacttaaaggacatcagacatatactgaagtatcttctctccttgagcacttgaagctttgcatgttcttctcaaagaaatcttttttagcatttctgaagtttggtgggtacaaacaagaagacattcttattcacaaggctaaggcgaggctcatgcagtcttctttcgcattggtgtgtgacaaaagaaccaagtgcttgctgcttttcattcggggtgctatcagcactaaagagcgcctgactgcagcaacttctgctgaagttccttttcaccatataattctatctgaaggaaagatcagcaatgtagttttaggtaagttgcagtccgaggttctcaaggatgccatctcccagatagttcaggatgccaataagaataggaagttcactgagactgttgagcttcagattagtctgaagaattatgaagagggctgtggcgatgacgagggctgtggcgatggagatgccagcggcaagcgcttgaccaaggagatttacgctcgtctgtgccgatccaccctctttgatgccggcagaaaggaattctggattatgaagaacaagggagccctttgcataagtatatcatcaaaggcaatgactattaccaggatagatgatcggaggtactggagccacctcgccacaggggaatcaagacaggtggcggagattgcctcggagcccgaccgcgccgccgcgtacgcacggttgcttctcctacagcgcggctgcgccgacgacgcctcctccgccgccgagctcgccgcggaattaccttccaccctcctcccgctcctcctccgcgacgcggccgccgatgacgaggccgtcgccgcttctgcgctcaagtgcctcggcttcgcgctctaccaccccgtcctcgtttctactatttcagcacagatgacccaattggtattggataccttggtacatataatcatgagcactcggatgaaggttgatccggctgaccattttttccttttcaagatctcaaggctatcatgaagcttggtggtcaaagtcccaaaagaatgagggacctatcaagcttgtgggttccaccagtataccggagactcttaagtgctgacaaggcagaaagggacatggtagaaaggtgccttattaaggtgtcatgtgttattctaccacctcaacctctcctttccaaggctgttgcttcagaccttgagcagaagctactctcctgtatggtaaatatgcttgatgatccttccaagaaagttcaaactgtgaagtcatggggatggattgtatctttgcttggtccagatgcagtgaacaatagacctctgcttaataaacttataaaggttcctgagcagatgtttactgatctgaatccacaagttcaggttgctacaatggtttcctggaaaagtttggtggatgcattttttccttctcaggcaactgagattgtggcccagcaaactgtgatttccccattaaaacccattgaacaggcaagtgcacaggtgaaaaggataagattaattatggtgcctatatgtcgagttctgtcaagaagtcgcaatattgtacttagctcttcttgtttgagtacatggcattaccttctacatagacttggtaatctgatcaattatttacccattctggaggctgcttttggaccaatactcaaaataattttctcttttgggatcaatgatcagaacaagccactgtggtcattttgcttgaacctttttcttgattttgtttcatcaaaaaatagggtcagagaggatttatgtgccccagtgaatcagaacttgctagctcaatcatgcaagcatatcaaggccttattggatattcaacacatcaaatggttaccatgggatattagttgctttaatttccaactcaatattcttggcataattcttaagccagaactattccaggacataattcctgaaacaatggtgattgttatggattctgcaacagagattttcagatttcttctaaaaggtattcaaatcgaacttagagagcagcgtgcttatgaacaagtcaatgaatgcattactaacgcgtgcaagtttgcaaagaggttgttgctggatcatgtaggaaagaatagtgttatcaagtgtgctgcattactggaatttggtcttcggtttatgaaagttattgcgaaggaactagatcattctttgttagcttctgaaaacattgaggtatgcttagacatcgaacacataaaggagaaccaacatgcagaatgcagcccaaagctgtccttaccaagaatcagatcactctcttacatggagatggtttctccagcagtttatgtgactgcactgtctctgtccatgatatctcagtatactggagagttttctcatagagatgcagatgaattagtttcaattctggatccatcatcagatgccctggagaattttcatactgctgtctcttttatgtatatgcagatcaggcggccaacatgtaacaaggaaagattaaaatggttgatggtttggaactcgtttgcaaaaaaaatgaacagtcaaattatctcttatttggaaaccaattctggattatgttaccatgatgttctccatcagttcttctgttatccaatccttaattttttataccccaaggggatatccattcttttgaatgctgaaaatagctccgagtcaaaattttctgtcctgcaaaacctggagatggaatcaacaattgaagtttatagatccctctctacaaactcctgtaattcgaagtttttttccaaggttttctttgatggtttttacaaatacttggtttgcactattgatgaaaacatggcattgttccaagccaaccttgagcatttgtcggaggagtttgaaaatgctagtgtcctttctgctcttggtgaaatagtcattggactgttacagaatgatcaaatgttgacctatgctaatcaagagttgaaggaaacacctgaagattcttctgtgtgcagacaaccggaacttttcttgaattgcttcaagcttgctaataggtttatgaagttgtcaagttttcatttcaaagcaaatccagctggacagcaccaggtcacaagcaggtttttttcatctttatctaattttgctgggcatctcactttaaaggaagatgttcttcttttcgagattattggagaccaacttaccgagtggctctctttaagcatcatattgtactctgaaatgcaacaaggacaaattgttgttcatcttgagaacctttggctcaagatggttgagtgcctgaagaggagtcagctagttagtgatgttcccttaataaatcagaagcatcgacttcttcaagctgcactcaatcgcccacatcgccccatttcagttgcaacagcatcagtttgcagagtagcaacacatggcaacacaaccctgcaccctggttgcttaatttctgaatttgctgagttattaatgcatagaagaaaggctcttgatagctccaggaaaacagtcatcacatccaatcctactgatctcacggccgagaggtatgatggatctgtgaatgtctcggtgggtttggggaggaagaggctgaagatcatgaagtattcaactaaaccaaaggaactcaacaaaaatagagccaacatgggcatctcaccaggtaatacggaaaatagggcgtgtaggaaaccagaattaatattggagatgctacagaggaagacatagttgtttgaactcaatgttaggtttaaagaacataaatgtgtacatacgtatagaaagcggaaggtcagtgcaatgatcccctgcaaaagaattaaatccattcaaaattacaagtcattttcattccttacacagccacattgtttgactatagggagatggaaacaacaggatctaatcatgtatgtaattgatgctttggcctgggctcctggctgttacccctttttttttgtgtgttttggtaacctctgagcaagattcttgtgttcttcctcatcgtccctgcagccaacacttcgtttgttaactacagccgcaggttcttttccaatcgcattaataatgctgagaagcaagtcatg

SEQ ID NO: 82341 - DNA, 4630 bp, Zea Mays
atgcccagggtccctctttctgcaggccgaccaacggctaggcggcgctccgcccacaacccgagctgcttcaccctggccccgcgagcgactccgcccacacgcttccgcgcagctcgccgggtgcggcagcatgatcgcgcacccaagcttgacccgacgtccggggagctgttcgcgctcagctacgacatgatcaagcgtccctacctgaggtacttctacctgcggcccgacggcggcaagtcgggcggcgtggagatcccgctggagcagcccaccatggtgcacgacttcgccgtcacggagcggttcgtggtggtgcccgaccgccagggtaatttgcagcatgagtacagtggaaatgactgtctccaacttaaaggacatcagacatatactgaagtatcttctctccttgagcacttgaagctttgcatgttcttctcaaagaaatcttttttagcatttctgaagtttggtgggtacaaacaagaagacattcttattcacaaggctaaggcgaggctcatgcagtcttctttcgcattggtgtgtgacaaaagaaccaagtgcttgctgcttttcattcggggtgctatcagcactaaagagcgcctgactgcagcaacttctgctgaagttccttttcaccatataattctatctgaaggaaagatcagcaatgtagttttaggtaagttgcagtccgaggttctcaaggatgccatctcccagatagttcaggatgccaataagaataggaagttcactgagactgttgagcttcagattagtctgaagaattatgaagagggctgtggcgatgacgagggctgtggcgatggagatgccagcggcaagcgcttgaccaaggagatttacgctcgtctgtgccgatccaccctctttgatgccggcagaaaggaattctggattatgaagaacaagggagccctttgcataagtatatcatcaaaggcaatgactattaccaggatagatgatcggaggtactggagccacctcgccacaggggaatcaagacaggtggcggagattgcctcggagcccgaccgcgccgccgcgtacgcacggttgcttctcctacagcgcggctgcgccgacgacgcctcctccgccgccgagctcgccgcggaattaccttccaccctcctcccgctcctcctccgcgacgcggccgccgatgacgaggccgtcgccgcttctgcgctcaagtgcctcggcttcgcgctctaccaccccgtcctcgtttctactatttcagcacagatgacccaattggtattggataccttggtacatataatcatgagcactcggatgaagtctgcttgcaatttgggtgtctggtgcttctcggttcaacaactgaacccattgattatagaggatagagcagatccaatgcttattgctattgttcatgcgctcgacaatccatttggttccttgtccacaacatttgaggcagctcaggctatcatgaagcttggtggtcaaagtcccaaaagaatgagggacctatcaagcttgtgggttccaccagtataccggagactcttaagtgctgacaaggcagaaagggacatggtagaaaggtgccttattaaggtgtcatgtgttattctaccacctcaacctctcctttccaaggctgttgcttcagaccttgagcagaagctactctcctgtatggtaaatatgcttgatgatccttccaagaaagttcaaactgtgaagtcatggggatggattgtatctttgcttggtccagatgcagtgaacaatagacctctgcttaataaacttataaaggttcctgagcagatgtttactgatctgaatccacaagttcaggttgctacaatgattcacaggtttcctggaaaagtttggtggatgcattttttccttctcaggcaactgagattgtggcccagcaaactgtgatttccccattaaaacccattgaacaggcaagtgcacaggtgaaaaggataagattaattatggtgcctatatgtcgagttctgtcaagaagtcgcaatattgtacttagctcttcttgtttgagtacatggcattaccttctacatagacttggtaatctgatcaattatttacccattctggaggctgcttttggaccaatactcaaaataattttctcttttgggatcaatgatcagaacaagccactgtggtcattttgcttgaacctttttcttgattttgtttcatcaaaaaatagggtcagagaggatttatgtgccccagtgaatcagaacttgctagctcaatcatgcaagcatatcaaggccttattggatattcaacacatcaaatggttaccatgggatattagttgctttaatttccaactcaatattcttggcataattcttaagccagaactattccaggacataattcctgaaacaatggtgattgttatggattctgcaacagagattttcagatttcttctaaaaggtattcaaatcgaacttagagagcagcgtgcttatgaacaagtcaatgaatgcattactaacgcgtgcaagtttgcaaagaggttgttgctggatcatgtaggaaagaatagtgttatcaagtgtgctgcattactggaatttggtcttcggtttatgaaagttattgcgaaggaactagatcattctttgttagcttctgaaaacattgaggtatgcttagacatcgaacacataaaggagaaccaacatgcagaatgcagcccaaagctgtccttaccaagaatcagatcactctcttacatggagatggtttctccagcagtttatgtgactgcactgtctctgtccatgatatctcagtatactggagagttttctcatagagatgcagatgaattagtttcaattctggatccatcatcagatgccctggagaattttcatactgctgtctcttttatgtatatgcagatcaggcggccaacatgtaacaaggaaagattaaaatggttgatggtttggaactcgtttgcaaaaaaaatgaacagtcaaattatctcttatttggaaaccaattctggattatgttaccatgatgttctccatcagttcttctgttatccaatccttaattttttataccccaaggggatatccattcttttgaatgctgaaaatagctccgagtcaaaattttctgtcctgcaaaacctggagatggaatcaacaattgaagtttatagatccctctctacaaactcctgtaattcgaagtttttttccaaggttttctttgatggtttttacaaatacttggtttgcactattgatgaaaacatggcattgttccaagccaaccttgagcatttgtcggaggagtttgaaaatgctagtgtcctttctgctcttggtgaaatagtcattggactgttacagaatgatcaaatgttgacctatgctaatcaagagttgaaggaaacacctgaagattcttctgtgtgcagacaaccggaacttttcttgaattgcttcaagcttgctaataggtttatgaagttgtcaagttttcatttcaaagcaaatccagctggacagcaccaggtcacaagcaggtttttttcatctttatctaattttgctgggcatctcactttaaaggaagatgttcttcttttcgagattattggagaccaacttaccgagtggctctctttaagcatcatattgtactctgaaatgcaacaaggacaaattgttgttcatcttgagaacctttggctcaagatggttgagtgcctgaagaggagtcagctagttagtgatgttcccttaataaatcagaagcatcgacttcttcaagctgcactcaatcgcccacatcgccccatttcagttgcaacagcatcagtttgcagagtagcaacacatggcaacacaaccctgcaccctggttgcttaatttctgaatttgctgagttattaatgcatagaagaaaggctcttgatagctccaggaaaacagtcatcacatccaatcctactgatctcacggccgagaggtatgatggatctgtgaatgtctcggtgggtttggggaggaagaggctgaagatcatgaagtattcaactaaaccaaaggaactcaacaaaaatagagccaacatgggcatctcaccaggtaatacggaaaatagggcgtgtaggaaaccagaattaatattggagatgctacagaggaagacatagttgtttgaactcaatgttaggtttaaagaacataaatgtgtacatacgtatagaaagcggaaggtcagtgcaatgatcccctgcaaaagaattaaatccattcaaaattacaagtcattttcattccttacacagccacattgtttgactatagggagatggaaacaacaggatctaatcatgtatgtaattgatgctttggcctgggctcctggctgttacccctttttttttgtgtgttttggtaacctctgagcaagattcttgtgttcttcctcatcgtccctgcagccaacacttcgtttgttaactacagccgcaggttcttttccaatcgcattaataatgctgagaagcaagtcatg

SEQ ID NO: 82342 - DNA, 4472 bp, Zea Mays
atgcccagggtccctctttctgcaggccgaccaacggctaggcggcgctccgcccacaacccgagctgcttcaccctggccccgcgagcgactccgcccacacgcttccgcgcagctcgccgggtgcggcagcatgatcgcgcacccaagcttgacccgacgtccggggagctgttcgcgctcagctacgacatgatcaagcgtccctacctgaggtacttctacctgcggcccgacggcggcaagtcgggcggcgtggagatcccgctggagcagcccaccatggtgcacgacttcgccgtcacggagcggttcgtggtggtgcccgaccgccagggtaatttgcagcatgagtacagtggaaatgactgtctccaacttaaaggacatcagacatatactgaagtatcttctctccttgagcacttgaagctttgcatgttcttctcaaagaaatcttttttagcatttctgaagtttggtgggtacaaacaagaagacattcttattcacaaggctaaggcgaggctcatgcagtcttctttcgcattggtgtgtgacaaaagaaccaagtgcttgctgcttttcattcggggtgctatcagcactaaagagcgcctgactgcagcaacttctgctgaagttccttttcaccatataattctatctgaaggaaagatcagcaatgtagttttaggtaagttgcagtccgaggttctcaaggatgccatctcccagatagttcaggatgccaataagaataggaagttcactgagactgttgagcttcagattagtctgaagaattatgaagagggctgtggcgatgacgagggctgtggcgatggagatgccagcggcaagcgcttgaccaaggagatttacgctcgtctgtgccgatccaccctctttgatgccggcagaaaggaattctggattatgaagaacaagggagccctttgcataagtatatcatcaaaggcaatgactattaccaggatagatgatcggaggtactggagccacctcgccacaggggaatcaagacaggtggcggagattgcctcggagcccgaccgcgccgccgcgtacgcacggttgcttctcctacagcgcggctgcgccgacgacgcctcctccgccgccgagctcgccgcggaattaccttccaccctcctcccgctcctcctccgcgacgcggccgccgatgacgaggccgtcgccgcttctgcgctcaagtgcctcggcttcgcgctctaccaccccgtcctcgtttctactatttcagcacagatgacccaattggtattggataccttggtacatataatcatgagcactcggatgaaggctatcatgaagcttggtggtcaaagtcccaaaagaatgagggacctatcaagcttgtgggttccaccagtataccggagactcttaagtgctgacaaggcagaaagggacatggtagaaaggtgccttattaaggtgtcatgtgttattctaccacctcaacctctcctttccaaggctgttgcttcagaccttgagcagaagctactctcctgtatggtaaatatgcttgatgatccttccaagaaagttcaaactgtgaagtcatggggatggattgtatctttgcttggtccagatgcagtgaacaatagacctctgcttaataaacttataaaggttcctgagcagatgtttactgatctgaatccacaagttcaggttgctacaatggtttcctggaaaagtttggtggatgcattttttccttctcaggcaactgagattgtggcccagcaaactgtgatttccccattaaaacccattgaacaggcaagtgcacaggtgaaaaggataagattaattatggtgcctatatgtcgagttctgtcaagaagtcgcaatattgtacttagctcttcttgtttgagtacatggcattaccttctacatagacttggtaatctgatcaattatttacccattctggaggctgcttttggaccaatactcaaaataattttctcttttgggatcaatgatcagaacaagccactgtggtcattttgcttgaacctttttcttgattttgtttcatcaaaaaatagggtcagagaggatttatgtgccccagtgaatcagaacttgctagctcaatcatgcaagcatatcaaggccttattggatattcaacacatcaaatggttaccatgggatattagttgctttaatttccaactcaatattcttggcataattcttaagccagaactattccaggacataattcctgaaacaatggtgattgttatggattctgcaacagagattttcagatttcttctaaaaggtattcaaatcgaacttagagagcagcgtgcttatgaacaagtcaatgaatgcattactaacgcgtgcaagtttgcaaagaggttgttgctggatcatgtaggaaagaatagtgttatcaagtgtgctgcattactggaatttggtcttcggtttatgaaagttattgcgaaggaactagatcattctttgttagcttctgaaaacattgaggtatgcttagacatcgaacacataaaggagaaccaacatgcagaatgcagcccaaagctgtccttaccaagaatcagatcactctcttacatggagatggtttctccagcagtttatgtgactgcactgtctctgtccatgatatctcagtatactggagagttttctcatagagatgcagatgaattagtttcaattctggatccatcatcagatgccctggagaattttcatactgctgtctcttttatgtatatgcagatcaggcggccaacatgtaacaaggaaagattaaaatggttgatggtttggaactcgtttgcaaaaaaaatgaacagtcaaattatctcttatttggaaaccaattctggattatgttaccatgatgttctccatcagttcttctgttatccaatccttaattttttataccccaaggggatatccattcttttgaatgctgaaaatagctccgagtcaaaattttctgtcctgcaaaacctggagatggaatcaacaattgaagtttatagatccctctctacaaactcctgtaattcgaagtttttttccaaggttttctttgatggtttttacaaatacttggtttgcactattgatgaaaacatggcattgttccaagccaaccttgagcatttgtcggaggagtttgaaaatgctagtgtcctttctgctcttggtgaaatagtcattggactgttacagaatgatcaaatgttgacctatgctaatcaagagttgaaggaaacacctgaagattcttctgtgtgcagacaaccggaacttttcttgaattgcttcaagcttgctaataggtttatgaagttgtcaagttttcatttcaaagcaaatccagctggacagcaccaggtcacaagcaggtttttttcatctttatctaattttgctgggcatctcactttaaaggaagatgttcttcttttcgagattattggagaccaacttaccgagtggctctctttaagcatcatattgtactctgaaatgcaacaaggacaaattgttgttcatcttgagaacctttggctcaagatggttgagtgcctgaagaggagtcagctagttagtgatgttcccttaataaatcagaagcatcgacttcttcaagctgcactcaatcgcccacatcgccccatttcagttgcaacagcatcagtttgcagagtagcaacacatggcaacacaaccctgcaccctggttgcttaatttctgaatttgctgagttattaatgcatagaagaaaggctcttgatagctccaggaaaacagtcatcacatccaatcctactgatctcacggccgagaggtatgatggatctgtgaatgtctcggtgggtttggggaggaagaggctgaagatcatgaagtattcaactaaaccaaaggaactcaacaaaaatagagccaacatgggcatctcaccaggtaatacggaaaatagggcgtgtaggaaaccagaattaatattggagatgctacagaggaagacatagttgtttgaactcaatgttaggtttaaagaacataaatgtgtacatacgtatagaaagcggaaggtcagtgcaatgatcccctgcaaaagaattaaatccattcaaaattacaagtcattttcattccttacacagccacattgtttgactatagggagatggaaacaacaggatctaatcatgtatgtaattgatgctttggcctgggctcctggctgttacccctttttttttgtgtgttttggtaacctctgagcaagattcttgtgttcttcctcatcgtccctgcagccaacacttcgtttgttaactacagccgcaggttcttttccaatcgcattaataatgctgagaagcaagtcatg

SEQ ID NO: 82343 - DNA, 1662 bp, Zea Mays
ctcacccccacccacacacaacaacaacgaaccctgcacctttgccattttcagggggtttgttccgctttgttctaaaagcaaggatcagatgccggcagcttcgcactcaaatgaagaagtaggcgagagccgttcgtttccaacgtcggtcgtggcctctggttctggctggcctgggtccgacggctgtatcagtctgacagtacgagcccaggatatattgctacttccaccgggaacccgaggtgaaaatcggttctcatcccgctccccgggctcaggaagtggatcttcggtggtggcgccggaaatacactggtacactcagggtttacagacagagcagccgctcgctagtcgtaatctcttatagacgctgaggacaactattaagcctcctccgtccgaatcagtctgcaggggcacggtttccgtctgcatggccgtcagtgctgtagccgccactcctatctccgccgccgccgacgccgccgccgacaccgacgcatctctcagcctccccgcactcgcttccgtcgccgcagccgccacttcgcagccatgggtaaggtgcacggatcgctggcccgcgccgggaaggtccgcgggcagacgcccaaggtggcgaagcaggacaagaagaagaagccccgcggccgcgcgtacaagaggatgcagtacaaccgccgcttcgtcaccgccgtcgtcggcttcggcaagaagcgcgggcccaactcgtccgagaagtaggcgcgacgccgttgggctcgcatgcctatgcctatgctcttgctcttcctggtagtagttttcgttgtgcaagcagaagaagatctttttttgttgttgttccagtctcagtttcgtgcggtgagatgagagcttgagattatatgtcaacctccttattaatcgaggatgaatttttgagatatgatgatacgtggcaatgacttcttgcccctttttgcattctttgtgaaatgttatgcaaataggtgggttaaatcattcgtcgattggctacatgacattgactagatttgcctaatttgtttgtttggttcggcgttcctcgcttgattaaggaacctgctgttttttcactcgttattgctggcattatggtccagttataaatttgaatggttagcccactttgaaaccagcttgctgataagatctgtactaggttcgggtagtttgtgggagcggagccgagcctgctatttgattgaaggtgcttgttctatccttgttttgacactgtagaatgataatttgcggtgtgaacgataattggaaatgtaagccttgtgtaaagtgaggttcaagctttgctcaatcccgattctcgaagacgatttgagtctccaaacgatctgtattccattcccctgcctccaatcgtaccttggtttgtaacctggtagggttccattttcttgcgagtctcccatgtttgttagtgcagcattgcgaacagcggctgttgtgtttttgcaaccgagtatgtgattttgaattgaggaacctgtacattttttatatttcaattttttgacagcaaatctgtttcggaaagctgaactaaacacacgaaacaccagttttcctgatttccacaatcctctcttttgcaaaaaaaaaaaaaaaaaa

SEQ ID NO: 82344 - DNA, 1985 bp, Zea Mays
tttatattttctgactcacccccacccacacacaacaacaacgaaccctgcacctttgccattttcagggggtttgttccgctttgttctaaaagcaaggatcagatgccggcagcttcgcactcaaatgaagaagtaggcgagagccgttcgtttccaacgtcggtcgtggcctctggttctggctggcctgggtccgacggctgtatcagtctgacagtacgagcccaggatatattgctacttccaccgggaacccgaggtgaaaatcggttctcatcccgctccccgggctcaggaagtggatcttcggtggtggcgccggaaatacactgtctgcaggggcacggtttccgtctgcatggccgtcagtgctgtagccgccactcctatctccggccgtggcgaaggggtgcgacagcacgctgcggcgcgtgtcgagcaccttgttgaaatggcgcacggcctcgccggggaggccggcgtccagcgccgccaccgcggcggcggcggaggagcttcacgtgcggcagcagctgcgacacggactccgcccttgtattggcgggcgccagcaggttcgacgggggcaagaagcggcggttgggcatgtggtggcggagcgagtggaggtccccgccggggcagaactccgtgacgacgcaggagaagtgcggcgcagcgtcgaagtcggcgaagagcgtgggcaggacttttatttagatttcggttccgagctgctgctgctagtgcgtgagccatcggtcgataatttccggaacagaacacctcttgtgcctgttcgagaagttctgacgggactctactccacgtggctcttccgtgcccataaaattagtggagtctagattcgatctggacaccgcgttgaatcggtggtggatgtaatgaaagaaggccgcccaatgccgcgtgagctgaacggagccagacgagcaggatgaggaggacgaggcggtggtggcgtcgtcggccgagcacgacttggcgcagtagctggggatgtagtcgcagagcatgtcggcgacgtcacggttgcgcgaggagagcccgcgcccggagctccagcgccgcgcgagtagctgactcgtacgacgccgcgcgagcagctgtcgtagctgcagcagaagctcattcggcgaccatcatacacaagcagccgctcctcctttgcctggaagaatgctcggagtggtacaaggttcggatggcgcagtcggccaacaacatccatgttctgctcgaacgcctctgcttcccgtgctgctgggccaatctcggcggcgtccagcctcttcatcgcaatcatggcgtagacaagaagcgcggcgaggacagacccggcagcgaccgcgacggccaatttggtcatcctccgcctcgctctcttcgcatttggcacggacgaatccggcacgctcaggttctcctgctgcggcccgctgtcgctagcagcagcgtctgcacagggggagtggcggtaccgttcgcgccgcccccgtggaagaagaggaggtgggagccgcggcggaccacttcgtcgcaaaggttggcgtcgagacggaggagggtgaggtgcaggaaggcggcctcgagcggagaatcgagaaggtgttgtttgactgcgtcctcttcttcgtccggctggaaggggtgctcggtgtcggcgtcggcggggcagggcggtagcggtggaactgcgacccgagcagtaacggcgctgaagacgggaacggtggctgccctgactgatcctcacggtggaggattaatcactgtcgaacgcgtctaagagagagctcaagtccatatcggcgtatgtgcgttgtgtgaatctctaaatcatccaagacctcgtctacgcctctatttcgttgaagccgaacttgtcgcgttttacaatggcaaaagtctccgccaaacatggtttccgtggcctctgttctccatcgttttctttcatt

SEQ ID NO: 82345 - DNA, 2122 bp, Zea Mays
ccgtcgctatcgaccccatcgcgttgccggatcgagctcagctctatctcgaaccttggttcgccgcacggcaccagaagcacggccgtgttctcatcccctccacacgtttccgcctcccgatccacgtccgccgttagccgcggccgacacagctcctcctcctcctcgcagctcttctccagctctcggaggcccgaggtttcatcgacccgcgctccttcatcctcgacacctcactccggcggcgcgggtccgcagtgctgcacatcgcgagccgcgcggcacagccgcacttgttgtccttcgtgcgtggggtgcggttcgacgcggcggcgggatggcggcgagcgcgcgggacagcgccgatgcagcggagcgagttgtggatgaccacgacggctgggcgtcggacgccgagatggacgtggagatggatgtggtggaaggcgatgccgaccggagggacggcggcgcggatggtgatgatgaatacttgctgctcactaggataagggacacgtcagcagctgaagcaagggcaggaaaggatatacaaggtataccatgggagaggatacacatagccaggcaagattaccgaaaagctaggttggaacagtataagaactatgaaaatttccctcaatcaggagagctcatggataagttgtgcaagcaagtggagaagagcagcaagtattatgaatttcagcacaacactagatcagtgaagccatcaattctccattttcagcttaggaatttgttatgggcaacatcgaagcatgatgtctattttatgtcaaattccacagtaagccactggtcatcattgtctcacaaattatcagaggttcttgacttctctgggcatgttgctccagcggagaagtatcctggcagtttactagaaggtttctctggtgttcaagttagcacacttgctgtgaatgagggtttggtggtagctggcggttttcaaggagaactaattggcaaagatgtggaaggctgtagtgtaaaattctgtatgaggacaactttgagtgacaatgccataacaaatgccatagatatacacagatcgataagtggaagcctgcacattacagtatctaacaacgattgtggtgttcgtgaatatgatatggagagatatcagctcgtgaaccactaccgatataactggccggttaatataagaaacttttggctgtggttggagatgatcgagatgctcttcttgtggattcacgaaatggaaaggtaacctctaccctagttggccatctggactactcatttgctacggcatggcacccggacagccggacattcgcgaccgggaaccaggacaaaacctgccgcatctgggacacccgcaacttgtcgacctcacttgcagtactgcggggcaacatcggcgcgatccggtgcatccgctactcctccgacgggcggttcctggtgttctcggagcctgccgacttcgtccatgtgtacagtgtggctgcggactacaagaaacggcaggagatcgacttctttggtgaggtgtccgggatcacgctcagcccggacgacgagtccctgttcatcggagtgtgcgaccgcgtctatgccagcctgttgcagtacaggatgatccgcggattcgactatcttgactcatacgtgtgaagaactgagctttggtgaccggtgttgtgctaggtgctggctgaaggttctgatgcgcggttcagggaatatatctgcctgctcttagttcatggcgaatgatggttcggtgggactcgacgccagcgaatctgccgtgtaaatagtttagaatttgaagcgtagtgtagtgctgtggaccaatgctgtctctgaacatacatatgatcagagtaatgtgtgtttgcgctgttagtttcagactccggaatacaaatagttttggaccaaattcctaaagcctgtttgtactgtggaacacatgaaagggctagtttgtattcacttcgatatatgtgttgttattattgagttccctggacagtgtttcaaatttaaacatcgtatttttagatgcataataaaaacatgtatgcagatataacatgtatatttgtta

SEQ ID NO: 82346 - DNA, 2135 bp, Zea Mays
ccgtcgctatcgaccccatcgcgttgccggatcgagctcagctctatctcgaaccttggttcgccgcacggcaccagaagcacggccgtgttctcatcccctccacacgtttccgcctcccgatccacgtccgccgttagccgcggccgacacagctcctcctcctcctcgcagctcttctccagctctcggaggcccgaggtttcatcgacccgcgctccttcatcctcgacacctcactccggcggcgcgggtccgcagtgctgcacatcgcgagccgcgcggcacagccgcacttgttgtccttcgtgcgtggggtgcggttcgacgcggcggcgggatggcggcgagcgcgcgggacagcgccgatgcagcggagcgagttgtggatgaccacgacggctgggcgtcggacgccgagatggacgtggagatggatgtggtggaaggcgatgccgaccggagggacggcggcgcggatggtgatgatgaatacttgctgctcactaggataagggacacgtcagcagctgaagcaagggcaggaaaggatatacaaggtataccatgggagaggatacacatagccaggcaagattaccgaaaagctaggttggaacagtataagaactatgaaaatttccctcaatcaggagagctcatggataagttgtgcaagcaagtggagaagagcagcaagtattatgaatttcagcacaacactagatcagtgaagccatcaattctccattttcagcttaggaatttgttatgggcaacatcgaagcatgatgtctattttatgtcaaattccacagtaagccactggtcatcattgtctcacaaattatcagaggttcttgacttctctgggcatgttgctccagcggagaagtatcctggcagtttactagaaggtttctctggtgttcaagttagcacacttgctgtgaatgagggtttggtggtagctggcggttttcaaggagaactaattggcaaagatgtggaaggctgtagtgtaaaattctgtatgaggacaactttgagtgacaatgccataacaaatgccatagatatacacagatcgataagtggaagcctgcacattacagtatctaacaacgattgtggtgttcgtgaatatgatatggagagatatcagctcgtgaaccactaccgatataactggccgcacacatccgtgagcccagataagaaacttttggctgtggttggagatgatcgagatgctcttcttgtggattcacgaaatggaaaggtaacctctaccctagttggccatctggactactcatttgctacggcatggcacccggacagccggacattcgcgaccgggaaccaggacaaaacctgccgcatctgggacacccgcaacttgtcgacctcacttgcagtactgcggggcaacatcggcgcgatccggtgcatccgctactcctccgacgggcggttcctggtgttctcggagcctgccgacttcgtccatgtgtacagtgtggctgcggactacaagaaacggcaggagatcgacttctttggtgaggtgtccgggatcacgctcagcccggacgacgagtccctgttcatcggagtgtgcgaccgcgtctatgccagcctgttgcagtacaggatgatccgcggattcgactatcttgactcatacgtgtgaagaactgagctttggtgaccggtgttgtgctaggtgctggctgaaggttctgatgcgcggttcagggaatatatctgcctgctcttagttcatggcgaatgatggttcggtgggactcgacgccagcgaatctgccgtgtaaatagtttagaatttgaagcgtagtgtagtgctgtggaccaatgctgtctctgaacatacatatgatcagagtaatgtgtgtttgcgctgttagtttcagactccggaatacaaatagttttggaccaaattcctaaagcctgtttgtactgtggaacacatgaaagggctagtttgtattcacttcgatatatgtgttgttattattgagttccctggacagtgtttcaaatttaaacatcgtatttttagatgcataataaaaacatgtatgcagatataacatgtatatttgtta

SEQ ID NO: 82347 - DNA, 539 bp, Zea Mays
catttttctcctaattgccgttgaggcataccgcatacgtttctcccccattcctctccccactccgaaccctagccaccgtgctcacttcccaggtcgaacccgccgcggcgcgagtccacggcagtgcaggacctgatcctgcggtctaggccgcggcggtgagatggtgatggtgtcaggcggcggggggaacgcgtgggcgaaggagatgaccctccgccgcaggatagccagcatattcaacaagacgcaggaacacttccctactctgaaagactacaacgattatctggaagaagttgaggatatgactttcaacctgatcgaagggatagatgtcgaggagattgaagcaaaaattgcaagataccaacaggaaaatgcggagcagatatacttgtccagagctaaaagggcggaagatcttgcggcagcacttaaagcaagcaggatgaaccctgtaaaggccgaagcaaatgatacgagatctgataatctgatagctggttgtgtaagtacacgagcaatcccatcat

SEQ ID NO: 82348 - DNA, 677 bp, Zea Mays
atttgcaggtggtctgccatcaagtggattgtggccatcaatgttaaacttcgtggaagctctccagattgcacccattgtggcgaaaactccgttttcacagaagaagactttcagaagtttgactatgagagcttcacacagtcaccaatgtctgataaggcagcaccaagcgtgaacgtactcccagagagcgcgcggatcacttgcagagagtacaagaaactggccgacgatggtgaacctcatctactgttggacgtacggcctgcgcatcacttccagatagcttcgatctctccgtcccacaacatcccgctctccatgctggaagagaagctgcccgcgctcgaagcctcgctgaaggaagcaggagaggggtcagccttggttgtcctgtgtaggagaggtaatgactctcagagagccgtccagcttctccgcgagaagggattcgcctccgcgaaggatatcatcggtgggctgcaggcatggggacgagacgtcgatcctgatttccctgtgtactagcgagatggaaatagatgcactacaccttgtaacagtttgaatgccgccagagattctggtggtgttgcaagaacgagaactctggtactatgatttgggtactaattttgccataccgtgtacttgcaaatatatatatatatata

SEQ ID NO: 82349 - DNA, 1795 bp, Zea Mays
gcggctgtggcgagaccatttcggcggttgaggcgacacggcagaagtgagcaaagcgttcaggtgcggagccgcggagggatgggcggcaggagggaggccatagagcgggagctgaagaagcttcgggcagagcgggaggagctcgacggccggatacggctgctggaatcgcagctcgaggcagggcctgcgggattcaacggtgcggcggcggggaaaggagtaggggacgatgcgtgcggcgggagtggagcgtgccagagccgcgtgggtaacgagtttgctccggacggtagcctcccggcggatatgatctaccggtacagccgccacctccttctcccggacttcggggtcgaaggccagcggaagctgtcacagtcgtcgattttagttgttggggctggaggtttgggctctcccctggcattgtatctagcagcttgtggtgtcggtcgcttgggcattgtggatggtgatgatgttgaattgaataatcttcatcgacagataattcataaagaagcatatgttggacaatctaaagtgaagtcagcagctgatgcttgccgggagtaagaaactatccttttggcagttttctctgattgattgccaaccaaatatatttgattcactatcccactatatcacatatgttgtctcaagtcaggattaattcctctatcaaagtagtagagtatcaccatactctgaagccatgcaatgctttggaggttgcacggaagtatccttacaatatatgctatgacagacacaatattgtttcctcaaagccaacactcttgttttcagcattaactaaaataccctcagatatgatatagttgttgatgcaactgacaaccttcctactaggtatatgatcagcgattgctgtgttttgctgaacaagccacttgtatctggtgcggcattaggcttagaagggcagcccatgctatcggtgcctctttccaactccaccacctgtggcagcctgccagagatgctcagacagtggtgtccttggggttgttccgggagtgattggttgcttacaagctctggaggctataaaggttgcaactggtgttggtgagcccctatgcggaagaatgctactatttgatgcactctctgctcgtattagagttgttaaacttcgtggaagctctccagattgcacccattgtggcgaaaactccgttttcacagaagaagactttcagaagtttgactatgagagcttcacacagtcaccaatgtctgataaggcagcaccaagcgtgaacgtactcccagagagcgcgcggatcacttgcagagagtacaagaaactggccgacgatggtgaacctcatctactgttggacgtacggcctgcgcatcacttccagatagcttcgatctctccgtcccacaacatcccgctctccatgctggaagagaagctgcccgcgctcgaagcctcgctgaaggaagcaggagaggggtcagccttggttgtcctgtgtaggagaggtaatgactctcagagagccgtccagcttctccgcgagaagggattcgcctccgcgaaggatatcatcggtgggctgcaggcatggggacgagacgtcgatcctgatttccctgtgtactagcgagatggaaatagatgcactacaccttgtaacagtttgaatgccgccagagattctggtggtgttgcaagaacgagaactctggtactatgatttgggtactaattttgccataccgtgtacttgcaaatatatatatatatata

SEQ ID NO: 82350 - DNA, 1579 bp, Zea Mays
gcggctgtggcgagaccatttcggcggttgaggcgacacggcagaagtgagcaaagcgttcaggtgcggagccgcggagggatgggcggcaggagggaggccatagagcgggagctgaagaagcttcgggcagagcgggaggagctcgacggccggatacggctgctggaatcgcagctcgaggcagggcctgcgggattcaacggtgcggcggcggggaaaggagtaggggacgatgcgtgcggcgggagtggagcgtgccagagccgcgtgggtaacgagtttgctccggacggtagcctcccggcggatatgatctaccggtacagccgccacctccttctcccggacttcggggtcgaaggccagcggaagctgtcacagtcgtcgattttagttgttggggctggaggtttgggctctcccctggcattgtatctagcagcttgtggtgtcggtcgcttgggcattgtggatggtgatgatgttgaattgaataatcttcatcgacagataattcataaagaagcatatgttggacaatctaaagtgaagtcagcagctgatgcttgccgggatcaggattaattcctctatcaaagtagtagagtatcaccatactctgaagccatgcaatgctttggaggttgcacggaaatatgatatagttgttgatgcaactgacaaccttcctactaggtatatgatcagcgattgctgtgttttgctgaacaagccacttgtatctggtgcggcattaggcttagaagggcagttgactgtttatcatcataatggaagcccatgctatcggtgcctctttccaactccaccacctgtggcagcctgccagagatgctcagacagtggtgtccttggggttgttccgggagtgattggttgcttacaagctctggaggctataaaggttgcaactggtgttggttaaacttcgtggaagctctccagattgcacccattgtggcgaaaactccgttttcacagaagaagactttcagaagtttgactatgagagcttcacacagtcaccaatgtctgataaggcagcaccaagcgtgaacgtactcccagagagcgcgcggatcacttgcagagagtacaagaaactggccgacgatggtgaacctcatctactgttggacgtacggcctgcgcatcacttccagatagcttcgatctctccgtcccacaacatcccgctctccatgctggaagagaagctgcccgcgctcgaagcctcgctgaaggaagcaggagaggggtcagccttggttgtcctgtgtaggagaggtaatgactctcagagagccgtccagcttctccgcgagaagggattcgcctccgcgaaggatatcatcggtgggctgcaggcatggggacgagacgtcgatcctgatttccctgtgtactagcgagatggaaatagatgcactacaccttgtaacagtttgaatgccgccagagattctggtggtgttgcaagaacgagaactctggtactatgatttgggtactaattttgccataccgtgtacttgcaaatatatatatatatata

SEQ ID NO: 82351 - DNA, 1458 bp, Zea Mays
gcggctgtggcgagaccatttcggcggttgaggcgacacggcagaagtgagcaaagcgttcaggtgcggagccgcggagggatgggcggcaggagggaggccatagagcgggagctgaagaagcttcgggcagagcgggaggagctcgacggccggatacggctgctggaatcgcagctcgaggcagggcctgcgggattcaacggtgcggcggcggggaaaggagtaggggacgatgcgtgcggcgggagtggagcgtgccagagccgcgtgggtaacgagtttgctccggacggtagcctcccggcggatatgatctaccggtacagccgccacctccttctcccggacttcggggtcgaaggccagcggaagctgtcacagtcgtcgattttagttgttggggctggaggtttgggctctcccctggcattgtatctagcagcttgtggtgtcggtcgcttgggcattgtggatggtgatgatgttgaattgaataatcttcatcgacagataattcataaagaagcatatgttggacaatctaaagtgaagtcagcagctgatgcttgccgggagtatatgatcagcgattgctgtgttttgctgaacaagccacttgtatctggtgcggcattaggcttagaagggcagttgactgtttatcatcataatggaagcccatgctatcggtgcctctttccaactccaccacctgtggcagcctgccagagatgctcagacagtggtgtccttggggttgttccgggagtgattggttgcttacaagctctggaggctataaaggttgcaactggtgttggttaaacttcgtggaagctctccagattgcacccattgtggcgaaaactccgttttcacagaagaagactttcagaagtttgactatgagagcttcacacagtcaccaatgtctgataaggcagcaccaagcgtgaacgtactcccagagagcgcgcggatcacttgcagagagtacaagaaactggccgacgatggtgaacctcatctactgttggacgtacggcctgcgcatcacttccagatagcttcgatctctccgtcccacaacatcccgctctccatgctggaagagaagctgcccgcgctcgaagcctcgctgaaggaagcaggagaggggtcagccttggttgtcctgtgtaggagaggtaatgactctcagagagccgtccagcttctccgcgagaagggattcgcctccgcgaaggatatcatcggtgggctgcaggcatggggacgagacgtcgatcctgatttccctgtgtactagcgagatggaaatagatgcactacaccttgtaacagtttgaatgccgccagagattctggtggtgttgcaagaacgagaactctggtactatgatttgggtactaattttgccataccgtgtacttgcaaatatatatatatatata

SEQ ID NO: 82352 - DNA, 1683 bp, Zea Mays
ggtcagactgtgctccaggctttacgtaagcgtttacgtgggcctaggtttacgtatttgtttacgtgggccgagcccgcgtggaaaagacgtggttagttaattttggcggctgtggcgagaccatttcggcggttgaggcgacacggcagaagtgagcaaagcgttcaggtgcggagccgcggagggatgggcggcaggagggaggccatagagcgggagctgaagaagcttcgggcagagcgggaggagctcgacggccggatacggctgctggaatcgcagctcgaggcagggcctgcgggattcaacggtgcggcggcggggaaaggagtaggggacgatgcgtgcggcgggagtggagcgtgccagagccgcgtgggtaacgagtttgctccggacggtagcctcccggcggatatgatctaccggtacagccgccacctccttctcccggacttcggggtcgaaggccagcggaagctgtcacagtcgtcgattttagttgttggggctggaggtttgggctctcccctggcattgtatctagcagcttgtggtgtcggtcgcttgggcattgtggatggtgatgatgttgaattgaataatcttcatcgacagataattcataaagaagcatatgttggacaatctaaagtgaagtcagcagctgatgcttgccgggagattaattcctctatcaaagtagtagagtatcaccatactctgaagccatgcaatgctttggaggttgcacggaaatatgatatagttgttgatgcaactgacaaccttcctactaggtatatgatcagcgattgctgtgttttgctgaacaagccacttgtatctggtgcggcattaggcttagaagggcagttgactgtttatcatcataatggaagcccatgctatcggtgcctctttccaactccaccacctgtggcagcctgccagagatgctcagacagtggtgtccttggggttgttccgggagtgattggttgcttacaagctctggaggctataaaggttgcaactggtgttggttaaacttcgtggaagctctccagattgcacccattgtggcgaaaactccgttttcacagaagaagactttcagaagtttgactatgagagcttcacacagtcaccaatgtctgataaggcagcaccaagcgtgaacgtactcccagagagcgcgcggatcacttgcagagagtacaagaaactggccgacgatggtgaacctcatctactgttggacgtacggcctgcgcatcacttccagatagcttcgatctctccgtcccacaacatcccgctctccatgctggaagagaagctgcccgcgctcgaagcctcgctgaaggaagcaggagaggggtcagccttggttgtcctgtgtaggagaggtaatgactctcagagagccgtccagcttctccgcgagaagggattcgcctccgcgaaggatatcatcggtgggctgcaggcatggggacgagacgtcgatcctgatttccctgtgtactagcgagatggaaatagatgcactacaccttgtaacagtttgaatgccgccagagattctggtggtgttgcaagaacgagaactctggtactatgatttgggtactaattttgccataccgtgtacttgcaaatatatatatatatata

SEQ ID NO: 82353 - DNA, 621 bp, Zea Mays
acgttggtcgaagccacgtcggcgacgtctcctgtcgtcgcccaactgagcggtacagatacatcatacaccaatccatccaatccctaggcctcataccttggagcaagcaaaggggtccggacccctatggcggcagtgctccactccatcaagcgatgcacaacgtcgtcaatggaagactccggtggcggtggccaggaggtctacgtcgttctcggcattggggacaacattagaagccacgctgtcgcgcatcgacgccatcatctcctacgatccgtcccctcgctcgatctgcatcctgtcatatataccctatcccatgctaagtccctgaaacgacggtggctgtggtagttggtgacgctgcacacgcacctaggcgacatcaaatgcgaggtgatctgcgatcaggtgccccgcacgacggataacttcttggccctctgcgctagctgctagcctgctactacgacgtcactgtgttccaccgcaacatcaagtgcttcatggtatagggcggcgaccccatcggctccatctggggctccatctggggcaccaagttcgtcgacgagttcaaggagtccctcaagccaagtgttgataccaaaagag

SEQ ID NO: 82354 - DNA, 832 bp, Zea Mays
ccatccaatccctaggcctcataccttggagcaagcaaaggggtccggacccctatggcggcagtgctccactccatcaagcgatgcacaacgtcgtcaatggaagactccggtggcggtggccaggaggtctacgtcgttctcggcattggggacaacattagaagccacgctgtcgcgcatcgacgccatcatctcctacgatccgtcccctcgctcgatctgcatcctgtcatatataccctatcccatgctaagtccctgaaacgacggtggctgtggtagttggtgacgctgcacacgcacctaggcgacatcaaatgcgaggtgatctgcgatcaggtgccccgcacgacggataacttcttggccctctgcgctagctgctagcctgctactacgacgtcactgtgttccaccgcaacatcaagtgcttcatggtatagggcggcgaccccatcggctccatctggggctccatctggggcaccaagttcgtcgacgagttcaaggagtccctcaaggtagcacaccatgcaggggccaacaccagacccaacgccaacggcagccagttcttcatcacctacaccaagcatctgttataaaagaaattcagtagagtcacccaaaaaatgtgcctgtctggaatggcagcgacaaccacgatttttccaattgtgtggtttcaatggagtcatgtatgggtgcaaccaggaggccatctaaataaatacgtatgcacttgaatcatatattaatcttgattgtaaagtacacacatattaatatagtgatctgaaagtcgcctagagggagggtgaataggcaa

SEQ ID NO: 82355 - DNA, 858 bp, Zea Mays
gtcgtcgcccaactgagcggtacagatacatcatacaccaatccatccaatccctaggcctcataccttggagcaagcaaaggggtccggacccctatggcggcagtgctccactccatcaagcgatgcacaacgtcgtcaatggaagactccggtggcggtggccaggaggtctacgtcgttctcggcattggggacaacattagaagccacgctgtcgcgcatcgacgccatcatctcctacgatccgtcccctcgctcgatctgcatcctgtcatatataccctatcccatgctaagtccctgaaacgacggtggctgtggtagttggtgacgctgcacacgcacctaggcgacatcaaatgcgaggtgatctgcgatcaggtgccccgcacgacggataacttcttggccctctgcgctagctgctagcctgctactacgacgtcactgtgttccaccgcaacatcaagtgcttcatggtatagggcggcgaccccatcggctccatctggggctccatctggggcaccaagttcgtcgacgagttcaaggagtccctcaaggggccaacaccagacccaacgccaacggcagccagttcttcatcacctacaccaagcatctgttataaaagaaattcagtagagtcacccaaaaaatgtgcctgtctggaatggcagcgacaaccacgatttttccaattgtgtggtttcaatggagtcatgtatgggtgcaaccaggaggccatctaaataaatacgtatgcacttgaatcatatattaatcttgattgtaaagtacacacatattaatatagtgatctgaaagtcgcctagagggagggtgaataggcaa

SEQ ID NO: 82356 - DNA, 1052 bp, Zea Mays
cgttgtcaacaagatagaatattatattccatttcgtataacgttttcatatatcatctgcagatcaagaagtgaagaccgaagaacttcgacgacagagcagagaaagggctagcacttgattaacatggtacatcgactgattaagcaagctacacgcttagcatcggagttggaaaagttcccgagtcctgacgagaagcaacgcattacgtacgcatactcgcgagagcaagaactagagaaatcacggagcaaatggtagacatgctactactagctagcgctagcttgcacaggatgccatcacatcatgcatgcatggcggcgcgtatagaagtgttggctggtggtggtgttcatcagtcgtagagcggcgggcactggaagcccgacggcgcgtgcttgccgcaggtgatgagcaggttgagcgcgatggggaggtagatgttgatgttgagcaggcgcgcgcggatggtggtgcagaggcacagcgccgcgtccaggtccgccaccccctgcaccagcgggcagcacttggacctggcctcctgcccgatcaccaggtggatcagcccgctcagcacgtccacgcacgcgttcagcttcagcgtgtcgatcgggcacgtccgcaccgccggcggcgtcggcggaacgtacggtggcacgtagggtggtgatggccgaggcgtcggaggcacgtacggagggttgcacggcgggcacttgggcggcttgccatggtggtgcttgggcggcttgctgtggccgccgccggagccggagccgggtgaaggccacgtcggcgagccactgccgggcgcgcccggtgcacagttgctgctctgccacgccagcgagccggggagcaggaggaggccggcggcggcggcgaggagcaggaggacgggaactgaggtggaggttgccattgcgccttggctcaacgcagcggcgcgcgacgggctgttctgtgcacactgcagcgcacgcgtctccttttatagaggaggagcgtcacgtacggtccctccgcactctgactctctggt

SEQ ID NO: 82357 - DNA, 1241 bp, Zea Mays
cgttgtcaacaagatagaatattatattccatttcgtataacgttttcatatatcatctgcagatcaagaagtgaagaccgaagaacttcgacgacagagcagagaaagggctagcacttgattaacatggtacatcgactgattaagcaagctacacgcttagcatcggagttggaaaagttcccgagtcctgacgagaagcaacgcattacgtacgcatactcgcgagagcaagaactagagaaatcacggagcaaatggtagacatgctactactagctagcgctagcttgcacaggatgccatcacatcatgcatgcatggcggcgcgtatagaagtgttggctggtggtggtgttcatcagtcgtagagcggcgggcactggaagcccgacggcgcgtgcttgccgcaggtgatgagcaggttgagcgcgatggggaggtagatgttgatgttgagcaggcgcgcgcggatggtggtgcagaggcacagcgccgcgtccaggtccgccaccccctgcaccagcgggcagcacttggacctggcctcctgcccgatcaccaggtggatcagcccgctcagcacgtccacgcacgcgttcagcttcagcgtgtcgatcgggcacgtccgcaccgccggcggcgtcggcggaacgtacggtggcacgtagggtggtgatggccgaggcgtcggggggacgtagggtggcacgtacggtggtggtgatggccgaggcgtcggtgggacgtagggcggcgtcggtggaacgtagggcggagtcggcggccgtggcgtcgggggtacgtacggcggtgacggccgaggcgtcggcgggacggggacgtatggtggcacgtagggcggtgagggccgaggcgtcggaggcacgtacggagggttgcacggcgggcacttgggcggcttgccatggtggtgcttgggcggcttgctgtggccgccgccggagccggagccgggtgaaggccacgtcggcgagccactgccgggcgcgcccggtgcacagttgctgctctgccacgccagcgagccggggagcaggaggaggccggcggcggcggcgaggagcaggaggacgggaactgaggtggaggttgccattgcgccttggctcaacgcagcggcgcgcgacgggctgttctgtgcacactgcagcgcacgcgtctccttttatagaggaggagcgtcacgtacggtccctccgcactctgactctctggt

SEQ ID NO: 82358 - DNA, 1109 bp, Zea Mays
catatgaatagaaaagaacccctttgcgcaaggcaaacccccacccagctcacctcggcgatggcatcggcggcggccgtggagtgggaggcggcggcgcggaaggtgctggtggcgcgcaagccctgcttcgggctacctacggcctgcccaacctgcctccccgtgctcctctacctccgcatggcgcaggttcccttcgacatccacgtcgacacctccttccccgatgccgatcacataccatatgttgaatttggggattgcgtggctttcaacaacgagaaaggaggcgtaattgagtatctcaaggatgagaaaattgctgacttgaactcaaatcacccaaatatttcatccaccactgtgctagatacaaaggccatggtttcgtcctggcttgctaatgctttgctgtatgaactctgggtggttagtgctggaagcattgcaaatgatatctacttctctgatctcccttggcccattggaaagatactccattggaataaaactagacatgtgaagcagctacttggtataacaaagctcaatgctgcagaaaaagaagaggagatatacctgaaggcaagtgctgcttatgactcattgtctttcagattaggggatcaagtctttctatttgataatagccctacagatgttgatgctcttttccttggacatgctctttttgtcctcagtgcgttgcctgatacatctgtgctgaggggcacattgcagaagcatgacaacttggttagctttgctgagcatcacaaggtccagttgctggaaacctcatcatcgtcatcgtcagggttaggatcatcacctagcccgtcatcatccacccccaggagaagaccatctgctgaccacagttataagccaaaacccagagccaagaaggaacggacggaggaggaaaagaaattcaggcgaagagcaaaaatacatagcagaacctccttgattgtcgttgttggagtatctacctctcaaggtgctgcctcctcttccacctcttgatgtgggaccatcttgaaaggtactctgttgccttttcttgggtctgtttgaagattggcttggtgcttgagttggat

SEQ ID NO: 82359 - DNA, 3045 bp, Zea Mays
aaacaaatccgaagcacaaagcaggggcctcttcgcaaatcccaccaccaccatcaccgcctcccagatccgcctggccgtcctcctcgtccgccactgcggcggtgatccctcgccgccccgcccttgataccgtcgagaggatcgtcgaggacttcgccatggacctcgccatcaatcccttctcctccggtacccgcctccgtgcgtttattcttcacagggacatgatacgtgcgatacgcgcgtgcaagacggcagcagaggagcgcgccgtggtgcggcgggagtgcgcggcgatacgggccgctatcagcgagggcgaccaggactaccggcatcggaacatggccaagctcatgttcatccacatgctcggctaccccacacacttcggccagatggagtgcctcaaacttattgctgccgcaggcttccccgagaagcgcatcggctatctaggactcatgctgctgctcgacgagcggcaggaggtcctcatgctcgtcaccaactctctcaagcaagatcttaaccactcaaaccagttcattgttggtcttgcactctgtgcccttggcaatatatgttctgctgaaatggcgcgtgatcttgctcctgaagtggagcggctgttacaaaatagggaccctaatacaaagaagaaggccgctttatgctctgtgaggattgtacgaaaagttccagacttggcagaaattttcatgagtgccgccacatcattactgaaggaaaaacatcacggtgttctgatatctgctgttcagctttgcatggagctatgtaatgccagcaatgaagcattggagtacttgaggaagaattgccttgaaggactggtccgaatactgagagatgtatccaacagttcatatgctcctgaatacgacattggtggcatcacagatccattcttacatatccgagtgcttaaactcatgcggatactgggccaaggagatgcagattgcagcgagtatatcaatgacattcttgctcaggtttcaacgaaaaccgagtcaaataagaatgctggaaatgctattttatatgaatgtgtggagacaataatgagcattgaagctacaagtggtttacgtgtgttggcaattaatattttgggtcggtttttgtccaaccgcgataacaacataagatatgttgccctaaacatgcttatgaaggccattgctgtagacacacaagcggtgcagaggcacagggcaacaatattagagtgtgtcaaggaacttgttgattaccttgaagtgagtgatcaagatttcaaggaagacctcactgctaagatatgctcaatagttgaaaagttttccctggacaggctatggtacttagaccagatgttcagagttttatctctggctggtaatcatgtgaaggatgatgtatggcatgctcttatagttctagtgagtaatgcatctgaacttcaaggatattcagtcaggtcattatataaagcattgcaagcatctagtgaacaggaaagtttagttagggtggctgtttggtgcatcggtgaatatggagaaatgctggtcaacaatcttagtatgttggacatggaggaaccaattacggtaacagaatatgatgctgtggatgccgtagaggctgctcttcagcgctactctgcagatgttactactagggctatgtgtcttgtctctcttttgaagctttcctcccggtttccaccaacatcagagaggataaaagaaatagttgcgcaaaataaagggaatactgtgcttgaattgcagcaaagatctattgaattcagttccattatacaaagacatcaatcgatgaaatcatctttgcttgaacggatgcctgtattggatgaagctaattatttggtgaagagagctgcttctatacaggctgcagttccatctgtaaattctgctccagcagtcacttctggaggcccatttaagcttcctaatggtgttggaaagcctgcagctcctttagctgatttgcttgatttgagttctgatgatgctccagtgactacctcggcccctacaacagcacctaatgattttctacaggatctgttgggcattggcttgactgattcgtctcctataggcggagctccgtctacaagcactgacattctgatggatcttctatctattggttcatcttctgtacaaaatggaccaccaacggcaaactttagccttcctggcatagagactaaatctgtcgctgttacacctcaagttgtggatcttcttgatggtttgtcctcaggcacatctcttcctgatgagaacgcaacctaccccacaatcacagcattccagagtgcaactttgaggatcacattcagtttcaaaaaacaacctggaaaacctcaggagactacaattagtgcttctttcacaaatttagcaaccactacattcacagatttcgtcttccaggcagctgtgccaaagttcatccagttgcgtttggacccagcgagcagcagcactcttcctgccagtggaaatgggtcagttacacaaagcctcagtgtcaccaacaaccagcatggccagaaaccacttgcaatgcgtatccggatgtcttacaaagtgaatggtgaggacaggctggaacaagggcaaatcagcaactttcctgctgggttgtagggccacctgtgtctatagggtttgggttgctctttcagacttatgcttgcctgctagtgagttgtgtacactggtagttggtttttggccgtccattatctctttatatatatagtgtacagtagatgacagcgattaatgatatatcctcagttttgccgaaatgtatttttatcttggtgcatatcggacttcagggtaaccaaaattttcacccttttccccgcgtaccaagcaccaaaggaatgtgttgtaccatgatattccccaatgtaattatttatttttctaatcattgtacaagcttattgtgcagacaaattatttgtttttcatgtgcgtttct

SEQ ID NO: 82360 - DNA, 2763 bp, Zea Mays
aaacaaatccgaagcacaaagcaggggcctcttcgcaaatcccaccaccaccatcaccgcctcccagatccgcctggccgtcctcctcgtccgccactgcggcggtgatccctcgccgccccgcccttgataccgtcgagaggatcgtcgaggacttcgccatggacctcgccatcaatcccttctcctccggtacccgcctccgggacatgatacgtgcgatacgcgcgtgcaagacggcagcagaggagcgcgccgtggtgcggcgggagtgcgcggcgatacgggccgctatcagcgagggcgaccaggactaccggcatcggaacatggccaagctcatgttcatccacatgctcggctaccccacacacttcggccagatggagtgcctcaaacttattgctgccgcaggcttccccgagaagcgcatcggctatctaggactcatgctgctgctcgacgagcggcaggaggtcctcatgctcgtcaccaactctctcaagcaagatcttaaccactcaaaccagttcattgttggtcttgcactctgtgcccttggcaatatatgttctgctgaaatggcgcgtgatcttgctcctgaagtggagcggctgttacaaaatagggaccctaatacaaagaagaaggaaaaacatcacggtgttctgatatctgctgttcagctttgcatggagctatgtaatgccagcaatgaagcattggagtacttgaggaaggtttcaacgaaaaccgagtcaaataagaatgctggaaatgctattttatatgaatgtgtggagacaataatgagcattgaagctacaagtggtttacgtgtgttggcaattaatattttgggtcggtttttgtccaaccgcgataacaacataagatatgttgccctaaacatgcttatgaaggccattgctgtagacacacaagcggtgcagaggcacagggcaacaatattagagtgtgtcaaggaacttgttgattaccttgaagtgagtgatcaagatttcaaggaagacctcactgctaagatatgctcaatagttgaaaagttttccctggacaggctatggtacttagaccagatgttcagagttttatctctggctggtaatcatgtgaaggatgatgtatggcatgctcttatagttctagtgagtaatgcatctgaacttcaaggatattcagtcaggtcattatataaagcattgcaagcatctagtgaacaggaaagtttagttagggtggctgtttggtgcatcggtgaatatggagaaatgctggtcaacaatcttagtatgttggacatggaggaaccaattacggtaacagaatatgatgctgtggatgccgtagaggctgctcttcagcgctactctgcagatgttactactagggctatgtgtcttgtctctcttttgaagctttcctcccggtttccaccaacatcagagaggataaaagaaatagttgcgcaaaataaagggaatactgtgcttgaattgcagcaaagatctattgaattcagttccattatacaaagacatcaatcgatgaaatcatctttgcttgaacggatgcctgtattggatgaagctaattatttggtgaagagagctgcttctatacaggctgcagttccatctgtaaattctgctccagcagtcacttctggaggcccatttaagcttcctaatggtgttggaaagcctgcagctcctttagctgatttgcttgatttgagttctgatgatgctccagtgactacctcggcccctacaacagcacctaatgattttctacaggatctgttgggcattggcttgactgattcgtctcctataggcggagctccgtctacaagcactgacattctgatggatcttctatctattggttcatcttctgtacaaaatggaccaccaacggcaaactttagccttcctggcatagagactaaatctgtcgctgttacacctcaagttgtggatcttcttgatggtttgtcctcaggcacatctcttcctgatgagaacgcaacctaccccacaatcacagcattccagagtgcaactttgaggatcacattcagtttcaaaaaacaacctggaaaacctcaggagactacaattagtgcttctttcacaaatttagcaaccactacattcacagatttcgtcttccaggcagctgtgccaaagttcatccagttgcgtttggacccagcgagcagcagcactcttcctgccagtggaaatgggtcagttacacaaagcctcagtgtcaccaacaaccagcatggccagaaaccacttgcaatgcgtatccggatgtcttacaaagtgaatggtgaggacaggctggaacaagggcaaatcagcaactttcctgctgggttgtagggccacctgtgtctatagggtttgggttgctctttcagacttatgcttgcctgctagtgagttgtgtacactggtagttggtttttggccgtccattatctctttatatatatagtgtacagtagatgacagcgattaatgatatatcctcagttttgccgaaatgtatttttatcttggtgcatatcggacttcagggtaaccaaaattttcacccttttccccgcgtaccaagcaccaaaggaatgtgttgtaccatgatattccccaatgtaattatttatttttctaatcattgtacaagcttattgtgcagacaaattatttgtttttcatgtgcgtttct

SEQ ID NO: 82361 - DNA, 3144 bp, Zea Mays
aaacaaatccgaagcacaaagcaggggcctcttcgcaaatcccaccaccaccatcaccgcctcccagatccgcctggccgtcctcctcgtccgccactgcggcggtgatccctcgccgccccgcccttgataccgtcgagaggatcgtcgaggacttcgccatggacctcgccatcaatcccttctcctccggtacccgcctccgtgcgtttattcttcacagggacatgatacgtgcgatacgcgcgtgcaagacggcagcagaggagcgcgccgtggtgcggcgggagtgcgcggcgatacgggccgctatcagcgagggcgaccaggactaccggcatcggaacatggccaagctcatgttcatccacatgctcggctaccccacacacttcggccagatggagtgcctcaaacttattgctgccgcaggcttccccgagaagcgcatcggctatctaggactcatgctgctgctcgacgagcggcaggaggtcctcatgctcgtcaccaactctctcaagcaagatcttaaccactcaaaccagttcattgttggtcttgcactctgtgcccttggcaatatatgttctgctgaaatggcgcgtgatcttgctcctgaagtggagcggctgttacaaaatagggaccctaatacaaagaagaagctcttgtatttttaggccgctttatgctctgtgaggattgtacgaaaagttccagacttggcagaaattttcatgagtgccgccacatcattactgaaggaaaaacatcacggtgttctgatatctgctgttcagctttgcatggagctatgtaatgccagcaatgaagcattggagtacttgaggaagaattgccttgaaggactggtccgaatactgagagatgtatccaacagttcatatgctcctgaatacgacattggtggcatcacagatccattcttacatatccgagtgcttaaactcatgcggatactgggccaaggagatgcagattgcagcgagtatatcaatgacattcttgctcaggtttcaacgaaaaccgagtcaaataagaatgctggaaatgctattttatatgaatgtgtggagacaataatgagcattgaagctacaagtggtttacgtgtgttggcaattaatattttgggtcggtttttgtccaaccgcgataacaacataagatatgttgccctaaacatgcttatgaaggccattgctgtagacacacaagcggtgcagaggcacagggcaacaatattagagtgtgtcaaggatgcagatgtttctattcgtaaaagggccctggaacttgtttacctacttgtcaacgatacaaatgtaaagccattgactaaggaacttgttgattaccttgaagtgagtgatcaagatttcaaggaagacctcactgctaagatatgctcaatagttgaaaagttttccctggacaggctatggtacttagaccagatgttcagagttttatctctggctggtaatcatgtgaaggatgatgtatggcatgctcttatagttctagtgagtaatgcatctgaacttcaaggatattcagtcaggtcattatataaagcattgcaagcatctagtgaacaggaaagtttagttagggtggctgtttggtgcatcggtgaatatggagaaatgctggtcaacaatcttagtatgttggacatggaggaaccaattacggtaacagaatatgatgctgtggatgccgtagaggctgctcttcagcgctactctgcagatgttactactagggctatgtgtcttgtctctcttttgaagctttcctcccggtttccaccaacatcagagaggataaaagaaatagttgcgcaaaataaagggaatactgtgcttgaattgcagcaaagatctattgaattcagttccattatacaaagacatcaatcgatgaaatcatctttgcttgaacggatgcctgtattggatgaagctaattatttggtgaagagagctgcttctatacaggctgcagttccatctgtaaattctgctccagcagtcacttctggaggcccatttaagcttcctaatggtgttggaaagcctgcagctcctttagctgatttgcttgatttgagttctgatgatgctccagtgactacctcggcccctacaacagcacctaatgattttctacaggatctgttgggcattggcttgactgattcgtctcctataggcggagctccgtctacaagcactgacattctgatggatcttctatctattggttcatcttctgtacaaaatggaccaccaacggcaaactttagccttcctggcatagagactaaatctgtcgctgttacacctcaagttgtggatcttcttgatggtttgtcctcaggcacatctcttcctgatgagaacgcaacctaccccacaatcacagcattccagagtgcaactttgaggatcacattcagtttcaaaaaacaacctggaaaacctcaggagactacaattagtgcttctttcacaaatttagcaaccactacattcacagatttcgtcttccaggcagctgtgccaaagttcatccagttgcgtttggacccagcgagcagcagcactcttcctgccagtggaaatgggtcagttacacaaagcctcagtgtcaccaacaaccagcatggccagaaaccacttgcaatgcgtatccggatgtcttacaaagtgaatggtgaggacaggctggaacaagggcaaatcagcaactttcctgctgggttgtagggccacctgtgtctatagggtttgggttgctctttcagacttatgcttgcctgctagtgagttgtgtacactggtagttggtttttggccgtccattatctctttatatatatagtgtacagtagatgacagcgattaatgatatatcctcagttttgccgaaatgtatttttatcttggtgcatatcggacttcagggtaaccaaaattttcacccttttccccgcgtaccaagcaccaaaggaatgtgttgtaccatgatattccccaatgtaattatttatttttctaatcattgtacaagcttattgtgcagacaaattatttgtttttcatgtgcgtttct

SEQ ID NO: 82362 - DNA, 3109 bp, Zea Mays
aaacaaatccgaagcacaaagcaggggcctcttcgcaaatcccaccaccaccatcaccgcctcccagatccgcctggccgtcctcctcgtccgccactgcggcggtgatccctcgccgccccgcccttgataccgtcgagaggatcgtcgaggacttcgccatggacctcgccatcaatcccttctcctccggtacccgcctccgggacatgatacgtgcgatacgcgcgtgcaagacggcagcagaggagcgcgccgtggtgcggcgggagtgcgcggcgatacgggccgctatcagcgagggcgaccaggactaccggcatcggaacatggccaagctcatgttcatccacatgctcggctaccccacacacttcggccagatggagtgcctcaaacttattgctgccgcaggcttccccgagaagcgcatcggctatctaggactcatgctgctgctcgacgagcggcaggaggtcctcatgctcgtcaccaactctctcaagcagtatccaccctgtctgcacttaacagttgtgtttgttgattgttatgcgttgtttctgattgtaattacttaacgtgggcagagatcttaaccactcaaaccagttcattgttggtcttgcactctgtgcccttggcaatatatgttctgctgaaatggcgcgtgatcttgctcctgaagtggagcggctgttacaaaatagggaccctaatacaaagaagaaggccgctttatgctctgtgaggattgtacgaaaagttccagacttggcagaaattttcatgagtgccgccacatcattactgaaggaaaaacatcacggtgttctgatatctgctgttcagctttgcatggagctatgtaatgccagcaatgaagcattggagtacttgaggaagaattgccttgaaggactggtccgaatactgagagatgtatccaacagttcatatgctcctgaatacgacattggtggcatcacagatccattcttacatatccgagtgcttaaactcatgcggatactgggccaaggagatgcagattgcagcgagtatatcaatgacattcttgctcaggtttcaacgaaaaccgagtcaaataagaatgctggaaatgctattttatatgaatgtgtggagacaataatgagcattgaagctacaagtggtttacgtgtgttggcaattaatattttgggtcggtttttgtccaaccgcgataacaacataagatatgttgccctaaacatgcttatgaaggccattgctgtagacacacaagcggtgcagaggcacagggcaacaatattagagtgtgtcaaggaacttgttgattaccttgaagtgagtgatcaagatttcaaggaagacctcactgctaagatatgctcaatagttgaaaagttttccctggacaggctatggtacttagaccagatgttcagagttttatctctggctggtaatcatgtgaaggatgatgtatggcatgctcttatagttctagtgagtaatgcatctgaacttcaaggatattcagtcaggtcattatataaagcattgcaagcatctagtgaacaggaaagtttagttagggtggctgtttggtgcatcggtgaatatggagaaatgctggtcaacaatcttagtatgttggacatggaggaaccaattacggtaacagaatatgatgctgtggatgccgtagaggctgctcttcagcgctactctgcagatgttactactagggctatgtgtcttgtctctcttttgaagctttcctcccggtttccaccaacatcagagaggataaaagaaatagttgcgcaaaataaagggaatactgtgcttgaattgcagcaaagatctattgaattcagttccattatacaaagacatcaatcgatgaaatcatctttgcttgaacggatgcctgtattggatgaagctaattatttggtgaagagagctgcttctatacaggctgcagttccatctgtaaattctgctccagcagtcacttctggaggcccatttaagcttcctaatggtgttggaaagcctgcagctcctttagctgatttgcttgatttgagttctgatgatgctccagtgactacctcggcccctacaacagcacctaatgattttctacaggatctgttgggcattggcttgactgattcgtctcctataggcggagctccgtctacaagcactgacattctgatggatcttctatctattggttcatcttctgtacaaaatggaccaccaacggcaaactttagccttcctggcatagagactaaatctgtcgctgttacacctcaagttgtggatcttcttgatggtttgtcctcaggcacatctcttcctgatgagaacgcaacctaccccacaatcacagcattccagagtgcaactttgaggatcacattcagtttcaaaaaacaacctggaaaacctcaggagactacaattagtgcttctttcacaaatttagcaaccactacattcacagatttcgtcttccaggcagctgtgccaaagttcatccagttgcgtttggacccagcgagcagcagcactcttcctgccagtggaaatgggtcagttacacaaagcctcagtgtcaccaacaaccagcatggccagaaaccacttgcaatgcgtatccggatgtcttacaaagtgaatggtgaggacaggctggaacaagggcaaatcagcaactttcctgctgggttgtagggccacctgtgtctatagggtttgggttgctctttcagacttatgcttgcctgctagtgagttgtgtacactggtagttggtttttggccgtccattatctctttatatatatagtgtacagtagatgacagcgattaatgatatatcctcagttttgccgaaatgtatttttatcttggtgcatatcggacttcagggtaaccaaaattttcacccttttccccgcgtaccaagcaccaaaggaatgtgttgtaccatgatattccccaatgtaattatttatttttctaatcattgtacaagcttattgtgcagacaaattatttgtttttcatgtgcgtttct

SEQ ID NO: 82363 - DNA, 3127 bp, Zea Mays
aaacaaatccgaagcacaaagcaggggcctcttcgcaaatcccaccaccaccatcaccgcctcccagatccgcctggccgtcctcctcgtccgccactgcggcggtgatccctcgccgccccgcccttgataccgtcgagaggatcgtcgaggacttcgccatggacctcgccatcaatcccttctcctccggtacccgcctccgggacatgatacgtgcgatacgcgcgtgcaagacggcagcagaggagcgcgccgtggtgcggcgggagtgcgcggcgatacgggccgctatcagcgagggcgaccaggactaccggcatcggaacatggccaagctcatgttcatccacatgctcggctaccccacacacttcggccagatggagtgcctcaaacttattgctgccgcaggcttccccgagaagcgcatcggctatctaggactcatgctgctgctcgacgagcggcaggaggtcctcatgctcgtcaccaactctctcaagcaagatcttaaccactcaaaccagttcattgttggtcttgcactctgtgcccttggcaatatatgttctgctgaaatggcgcgtgatcttgctcctgaagtggagcggctgttacaaaatagggaccctaatacaaagaagaaggccgctttatgctctgtgaggattgtacgaaaagttccagacttggcagaaattttcatgagtgccgccacatcattactgaaggaaaaacatcacggtgttctgatatctgctgttcagctttgcatggagctatgtaatgccagcaatgaagcattggagtacttgaggaagaattgccttgaaggactggtccgaatactgagagatgtatccaacagttcatatgctcctgaatacgacattggtggcatcacagatccattcttacatatccgagtgcttaaactcatgcggatactgggccaaggagatgcagattgcagcgagtatatcaatgacattcttgctcaggtttcaacgaaaaccgagtcaaataagaatgctggaaatgctattttatatgaatgtgtggagacaataatgagcattgaagctacaagtggtttacgtgtgttggcaattaatattttgggtcggtttttgtccaaccgcgataacaacataagatatgttgccctaaacatgcttatgaaggccattgctgtagacacacaagcggtgcagaggcacagggcaacaatattagagtgtgtcaaggatgcagatgtttctattcgtaaaagggccctggaacttgtttacctacttgtcaacgatacaaatgtaaagccattgactaaggaacttgttgattaccttgaagtgagtgatcaagatttcaaggaagacctcactgctaagatatgctcaatagttgaaaagttttccctggacaggctatggtacttagaccagatgttcagagttttatctctggctggtaatcatgtgaaggatgatgtatggcatgctcttatagttctagtgagtaatgcatctgaacttcaaggatattcagtcaggtcattatataaagcattgcaagcatctagtgaacaggaaagtttagttagggtggctgtttggtgcatcggtgaatatggagaaatgctggtcaacaatcttagtatgttggacatggaggaaccaattacggtaacagaatatgatgctgtggatgccgtagaggctgctcttcagcgctactctgcagatgttactactagggctatgtgtcttgtctctcttttgaagctttcctcccggtttccaccaacatcagagaggataaaagaaatagttgcgcaaaataaagggaatactgtgcttgaattgcagcaaagatctattgaattcagttccattatacaaagacatcaatcgatgaaatcatctttgcttgaacggatgcctgtattggatgaagctaattatttggtgaagagagctgcttctatacaggctgcagttccatctgtaaattctgctccagcagtcacttctggaggcccatttaagcttcctaatggtgttggaaagcctgcagctcctttagctgatttgcttgatttgagttctgatgatgctccagtgactacctcggcccctacaacagcacctaatgattttctacaggatctgttgggcattggcttgactgattcgtctcctataggcggagctccgtctacaagcactgacattctgatggatcttctatctattggttcatcttctgtacaaaatggaccaccaacggcaaactttagccttcctggcatagagactaaatctgtcgctgttacacctcaagttgtggatcttcttgatggtttgtcctcaggcacatctcttcctgtttgcctattcgccagatgagaacgcaacctaccccacaatcacagcattccagagtgcaactttgaggatcacattcagtttcaaaaaacaacctggaaaacctcaggagactacaattagtgcttctttcacaaatttagcaaccactacattcacagatttcgtcttccaggcagctgtgccaaagttcatccagttgcgtttggacccagcgagcagcagcactcttcctgccagtggaaatgggtcagttacacaaagcctcagtgtcaccaacaaccagcatggccagaaaccacttgcaatgcgtatccggatgtcttacaaagtgaatggtgaggacaggctggaacaagggcaaatcagcaactttcctgctgggttgtagggccacctgtgtctatagggtttgggttgctctttcagacttatgcttgcctgctagtgagttgtgtacactggtagttggtttttggccgtccattatctctttatatatatagtgtacagtagatgacagcgattaatgatatatcctcagttttgccgaaatgtatttttatcttggtgcatatcggacttcagggtaaccaaaattttcacccttttccccgcgtaccaagcaccaaaggaatgtgttgtaccatgatattccccaatgtaattatttatttttctaatcattgtacaagcttattgtgcagacaaattatttgtttttcatgtgcgtttct

SEQ ID NO: 82364 - DNA, 3027 bp, Zea Mays
aaacaaatccgaagcacaaagcaggggcctcttcgcaaatcccaccaccaccatcaccgcctcccagatccgcctggccgtcctcctcgtccgccactgcggcggtgatccctcgccgccccgcccttgataccgtcgagaggatcgtcgaggacttcgccatggacctcgccatcaatcccttctcctccggtacccgcctccgggacatgatacgtgcgatacgcgcgtgcaagacggcagcagaggagcgcgccgtggtgcggcgggagtgcgcggcgatacgggccgctatcagcgagggcgaccaggactaccggcatcggaacatggccaagctcatgttcatccacatgctcggctaccccacacacttcggccagatggagtgcctcaaacttattgctgccgcaggcttccccgagaagcgcatcggctatctaggactcatgctgctgctcgacgagcggcaggaggtcctcatgctcgtcaccaactctctcaagcaagatcttaaccactcaaaccagttcattgttggtcttgcactctgtgcccttggcaatatatgttctgctgaaatggcgcgtgatcttgctcctgaagtggagcggctgttacaaaatagggaccctaatacaaagaagaaggaaaaacatcacggtgttctgatatctgctgttcagctttgcatggagctatgtaatgccagcaatgaagcattggagtacttgaggaagaattgccttgaaggactggtccgaatactgagagatgtatccaacagttcatatgctcctgaatacgacattggtggcatcacagatccattcttacatatccgagtgcttaaactcatgcggatactgggccaaggagatgcagattgcagcgagtatatcaatgacattcttgctcaggtttcaacgaaaaccgagtcaaataagaatgctggaaatgctattttatatgaatgtgtggagacaataatgagcattgaagctacaagtggtttacgtgtgttggcaattaatattttgggtcggtttttgtccaaccgcgataacaacataagatatgttgccctaaacatgcttatgaaggccattgctgtagacacacaagcggtgcagaggcacagggcaacaatattagagtgtgtcaaggatgcagatgtttctattcgtaaaagggccctggaacttgtttacctacttgtcaacgatacaaatgtaaagccattgactaaggaacttgttgattaccttgaagtgagtgatcaagatttcaaggaagacctcactgctaagatatgctcaatagttgaaaagttttccctggacaggctatggtacttagaccagatgttcagagttttatctctggctggtaatcatgtgaaggatgatgtatggcatgctcttatagttctagtgagtaatgcatctgaacttcaaggatattcagtcaggtcattatataaagcattgcaagcatctagtgaacaggaaagtttagttagggtggctgtttggtgcatcggtgaatatggagaaatgctggtcaacaatcttagtatgttggacatggaggaaccaattacggtaacagaatatgatgctgtggatgccgtagaggctgctcttcagcgctactctgcagatgttactactagggctatgtgtcttgtctctcttttgaagctttcctcccggtttccaccaacatcagagaggataaaagaaatagttgcgcaaaataaagggaatactgtgcttgaattgcagcaaagatctattgaattcagttccattatacaaagacatcaatcgatgaaatcatctttgcttgaacggatgcctgtattggatgaagctaattatttggtgaagagagctgcttctatacaggctgcagttccatctgtaaattctgctccagcagtcacttctggaggcccatttaagcttcctaatggtgttggaaagcctgcagctcctttagctgatttgcttgatttgagttctgatgatgctccagtgactacctcggcccctacaacagcacctaatgattttctacaggatctgttgggcattggcttgactgattcgtctcctataggcggagctccgtctacaagcactgacattctgatggatcttctatctattggttcatcttctgtacaaaatggaccaccaacggcaaactttagccttcctggcatagagactaaatctgtcgctgttacacctcaagttgtggatcttcttgatggtttgtcctcaggcacatctcttcctgatgagaacgcaacctaccccacaatcacagcattccagagtgcaactttgaggatcacattcagtttcaaaaaacaacctggaaaacctcaggagactacaattagtgcttctttcacaaatttagcaaccactacattcacagatttcgtcttccaggcagctgtgccaaagttcatccagttgcgtttggacccagcgagcagcagcactcttcctgccagtggaaatgggtcagttacacaaagcctcagtgtcaccaacaaccagcatggccagaaaccacttgcaatgcgtatccggatgtcttacaaagtgaatggtgaggacaggctggaacaagggcaaatcagcaactttcctgctgggttgtagggccacctgtgtctatagggtttgggttgctctttcagacttatgcttgcctgctagtgagttgtgtacactggtagttggtttttggccgtccattatctctttatatatatagtgtacagtagatgacagcgattaatgatatatcctcagttttgccgaaatgtatttttatcttggtgcatatcggacttcagggtaaccaaaattttcacccttttccccgcgtaccaagcaccaaaggaatgtgttgtaccatgatattccccaatgtaattatttatttttctaatcattgtacaagcttattgtgcagacaaattatttgtttttcatgtgcgtttct

SEQ ID NO: 82365 - DNA, 2927 bp, Zea Mays
aaacaaatccgaagcacaaagcaggggcctcttcgcaaatcccaccaccaccatcaccgcctcccagatccgcctggccgtcctcctcgtccgccactgcggcggtgatccctcgccgccccgcccttgataccgtcgagaggatcgtcgaggacttcgccatggacctcgccatcaatcccttctcctccggtacccgcctccgggacatgatacgtgcgatacgcgcgtgcaagacggcagcagaggagcgcgccgtggtgcggcgggagtgcgcggcgatacgggccgctatcagcgagggcgaccaggactaccggcatcggaacatggccaagctcatgttcatccacatgctcggctaccccacacacttcggccagatggagtgcctcaaacttattgctgccgcaggcttccccgagaagcgcatcggctatctaggactcatgctgctgctcgacgagcggcaggaggtcctcatgctcgtcaccaactctctcaagcaagatcttaaccactcaaaccagttcattgttggtcttgcactctgtgcccttggcaatatatgttctgctgaaatggcgcgtgatcttgctcctgaagtggagcggctgttacaaaatagggaccctaatacaaagaagaaggccgctttatgctctgtgaggattgtacgaaaagttccagacttggcagaaattttcatgagtgccgccacatcattactgaaggaaaaacatcacggtgttctgatatctgctgttcagctttgcatggagctatgtaatgccagcaatgaagcattggagtacttgaggaagaattgccttgaaggactggtccgaatactgagagatgtatccaacagttcatatgctcctgaatacgacattggtggcatcacagatccattcttacatatccgagtgcttaaactcatgcggatactgggccaaggagatgcagattgcagcgagtatatcaatgacattcttgctcaggtttcaacgaaaaccgagtcaaataagaatgctggaaatgctattttatatgaatgtgtggagacaataatgagcattgaagctacaagtggtttacgtgtgttggcaattaatattttgggtcggtttttgtccaaccgcgataacaacataagatatgttgccctaaacatgcttatgaaggccattgctgtagacacacaagcggtgcagaggcacagggcaacaatattagagtgtgtcaaggaacttgttgattaccttgaagtgagtgatcaagatttcaaggaagacctcactgctaagatatgctcaatagttgaaagttttccctggacaggctatggtacttagaccagatgttcagagttttatctctggctggtaatcatgtgaaggatgatgaaagtttagttagggtggctgtttggtgcatcggtgaatatggagaaatgctggtcaacaatcttagtatgttggacatggaggaaccaattacggtaacagaatatgatgctgtggatgccgtagaggctgctcttcagcgctactctgcagatgttactactagggctatgtgtcttgtctctcttttgaagctttcctcccggtttccaccaacatcagagaggataaaagaaatagttgcgcaaaataaagggaatactgtgcttgaattgcagcaaagatctattgaattcagttccattatacaaagacatcaatcgatgaaatcatctttgcttgaacggatgcctgtattggatgaagctaattatttggtgaagagagctgcttctatacaggctgcagttccatctgtaaattctgctccagcagtcacttctggaggcccatttaagcttcctaatggtgttggaaagcctgcagctcctttagctgatttgcttgatttgagttctgatgatgctccagtgactacctcggcccctacaacagcacctaatgattttctacaggatctgttgggcattggcttgactgattcgtctcctataggcggagctccgtctacaagcactgacattctgatggatcttctatctattggttcatcttctgtacaaaatggaccaccaacggcaaactttagccttcctggcatagagactaaatctgtcgctgttacacctcaagttgtggatcttcttgatggtttgtcctcaggcacatctcttcctgatgagaacgcaacctaccccacaatcacagcattccagagtgcaactttgaggatcacattcagtttcaaaaaacaacctggaaaacctcaggagactacaattagtgcttctttcacaaatttagcaaccactacattcacagatttcgtcttccaggcagctgtgccaaagttcatccagttgcgtttggacccagcgagcagcagcactcttcctgccagtggaaatgggtcagttacacaaagcctcagtgtcaccaacaaccagcatggccagaaaccacttgcaatgcgtatccggatgtcttacaaagtgaatggtgaggacaggctggaacaagggcaaatcagcaactttcctgctgggttgtagggccacctgtgtctatagggtttgggttgctctttcagacttatgcttgcctgctagtgagttgtgtacactggtagttggtttttggccgtccattatctctttatatatatagtgtacagtagatgacagcgattaatgatatatcctcagttttgccgaaatgtatttttatcttggtgcatatcggacttcagggtaaccaaaattttcacccttttccccgcgtaccaagcaccaaaggaatgtgttgtaccatgatattccccaatgtaattatttatttttctaatcattgtacaagcttattgtgcagacaaattatttgtttttcatgtgcgtttct

SEQ ID NO: 82366 - DNA, 3012 bp, Zea Mays
aaacaaatccgaagcacaaagcaggggcctcttcgcaaatcccaccaccaccatcaccgcctcccagatccgcctggccgtcctcctcgtccgccactgcggcggtgatccctcgccgccccgcccttgataccgtcgagaggatcgtcgaggacttcgccatggacctcgccatcaatcccttctcctccggtacccgcctccgggacatgatacgtgcgatacgcgcgtgcaagacggcagcagaggagcgcgccgtggtgcggcgggagtgcgcggcgatacgggccgctatcagcgagggcgaccaggactaccggcatcggaacatggccaagctcatgttcatccacatgctcggctaccccacacacttcggccagatggagtgcctcaaacttattgctgccgcaggcttccccgagaagcgcatcggctatctaggactcatgctgctgctcgacgagcggcaggaggtcctcatgctcgtcaccaactctctcaagcaagatcttaaccactcaaaccagttcattgttggtcttgcactctgtgcccttggcaatatatgttctgctgaaatggcgcgtgatcttgctcctgaagtggagcggctgttacaaaatagggaccctaatacaaagaagaaggccgctttatgctctgtgaggattgtacgaaaagttccagacttggcagaaattttcatgagtgccgccacatcattactgaaggaaaaacatcacggtgttctgatatctgctgttcagctttgcatggagctatgtaatgccagcaatgaagcattggagtacttgaggaagaattgccttgaaggactggtccgaatactgagagatgtatccaacagttcatatgctcctgaatacgacattggtggcatcacagatccattcttacatatccgagtgcttaaactcatgcggatactgggccaaggagatgcagattgcagcgagtatatcaatgacattcttgctcaggtttcaacgaaaaccgagtcaaataagaatgctggaaatgctattttatatgaatgtgtggagacaataatgagcattgaagctacaagtggtttacgtgtgttggcaattaatattttgggtcggtttttgtccaaccgcgataacaacataagatatgttgccctaaacatgcttatgaaggccattgctgtagacacacaagcggtgcagaggcacagggcaacaatattagagtgtgtcaaggatgcagatgtttctattcgtaaaagggccctggaacttgtttacctacttgtcaacgatacaaatgtaaagccattgactaaggaacttgttgattaccttgaagtgagtgatcaagatttcaaggaagacctcactgctaagatatgctcaatagttgaaaagttttccctggacaggctatggtacttagaccagatgttcagagttttatctctggctggtaatcatgtgaaggatgatgaaagtttagttagggtggctgtttggtgcatcggtgaatatggagaaatgctggtcaacaatcttagtatgttggacatggaggaaccaattacggtaacagaatatgatgctgtggatgccgtagaggctgctcttcagcgctactctgcagatgttactactagggctatgtgtcttgtctctcttttgaagctttcctcccggtttccaccaacatcagagaggataaaagaaatagttgcgcaaaataaagggaatactgtgcttgaattgcagcaaagatctattgaattcagttccattatacaaagacatcaatcgatgaaatcatctttgcttgaacggatgcctgtattggatgaagctaattatttggtgaagagagctgcttctatacaggctgcagttccatctgtaaattctgctccagcagtcacttctggaggcccatttaagcttcctaatggtgttggaaagcctgcagctcctttagctgatttgcttgatttgagttctgatgatgctccagtgactacctcggcccctacaacagcacctaatgattttctacaggatctgttgggcattggcttgactgattcgtctcctataggcggagctccgtctacaagcactgacattctgatggatcttctatctattggttcatcttctgtacaaaatggaccaccaacggcaaactttagccttcctggcatagagactaaatctgtcgctgttacacctcaagttgtggatcttcttgatggtttgtcctcaggcacatctcttcctgatgagaacgcaacctaccccacaatcacagcattccagagtgcaactttgaggatcacattcagtttcaaaaaacaacctggaaaacctcaggagactacaattagtgcttctttcacaaatttagcaaccactacattcacagatttcgtcttccaggcagctgtgccaaagttcatccagttgcgtttggacccagcgagcagcagcactcttcctgccagtggaaatgggtcagttacacaaagcctcagtgtcaccaacaaccagcatggccagaaaccacttgcaatgcgtatccggatgtcttacaaagtgaatggtgaggacaggctggaacaagggcaaatcagcaactttcctgctgggttgtagggccacctgtgtctatagggtttgggttgctctttcagacttatgcttgcctgctagtgagttgtgtacactggtagttggtttttggccgtccattatctctttatatatatagtgtacagtagatgacagcgattaatgatatatcctcagttttgccgaaatgtatttttatcttggtgcatatcggacttcagggtaaccaaaattttcacccttttccccgcgtaccaagcaccaaaggaatgtgttgtaccatgatattccccaatgtaattatttatttttctaatcattgtacaagcttattgtgcagacaaattatttgtttttcatgtgcgtttct

SEQ ID NO: 82367 - DNA, 3043 bp, Zea Mays
aaacaaatccgaagcacaaagcaggggcctcttcgcaaatcccaccaccaccatcaccgcctcccagatccgcctggccgtcctcctcgtccgccactgcggcggtgatccctcgccgccccgcccttgataccgtcgagaggatcgtcgaggacttcgccatggacctcgccatcaatcccttctcctccggtacccgcctccgggacatgatacgtgcgatacgcgcgtgcaagacggcagcagaggagcgcgccgtggtgcggcgggagtgcgcggcgatacgggccgctatcagcgagggcgaccaggactaccggcatcggaacatggccaagctcatgttcatccacatgctcggctaccccacacacttcggccagatggagtgcctcaaacttattgctgccgcaggcttccccgagaagcgcatcggctatctaggactcatgctgctgctcgacgagcggcaggaggtcctcatgctcgtcaccaactctctcaagcaagatcttaaccactcaaaccagttcattgttggtcttgcactctgtgcccttggcaatatatgttctgctgaaatggcgcgtgatcttgctcctgaagtggagcggctgttacaaaatagggaccctaatacaaagaagaaggccgctttatgctctgtgaggattgtacgaaaagttccagacttggcagaaattttcatgagtgccgccacatcattactgaaggaaaaacatcacggtgttctgatatctgctgttcagctttgcatggagctatgtaatgccagcaatgaagcattggagtacttgaggaagaattgccttgaaggactggtccgaatactgagagatgtatccaacagttcatatgctcctgaatacgacattggtggcatcacagatccattcttacatatccgagtgcttaaactcatgcggatactgggccaaggagatgcagattgcagcgagtatatcaatgacattcttgctcaggtttcaacgaaaaccgagtcaaataagaatgctggaaatgctattttatatgaatgtgtggagacaataatgagcattgaagctacaagtggtttacgtgtgttggcaattaatattttgggtcggtttttgtccaaccgcgataacaacataagatatgttgccctaaacatgcttatgaaggccattgctgtagacacacaagcggtgcagaggcacagggcaacaatattagagtgtgtcaaggaacttgttgattaccttgaagtgagtgatcaagatttcaaggaagacctcactgctaagatatgctcaatagttgaaaagttttccctggacaggctatggtacttagaccagatgttcagagttttatctctggctggtaatcatgtgaaggatgatgtatggcatgctcttatagttctagtgagtaatgcatctgaacttcaaggatattcagtcaggtcattatataaagcattgcaagcatctagtgaacaggaaagtttagttagggtggctgtttggtgcatcggtgaatatggagaaatgctggtcaacaatcttagtatgttggacatggaggaaccaattacggtaacagaatatgatgctgtggatgccgtagaggctgctcttcagcgctactctgcagatgttactactagggctatgtgtcttgtctctcttttgaagctttcctcccggtttccaccaacatcagagaggataaaagaaatagttgcgcaaaataaagggaatactgtgcttgaattgcagcaaagatctattgaattcagttccattatacaaagacatcaatcgatgaaatcatctttgcttgaacggatgcctgtattggatgaagctaattatttggtgaagagagctgcttctatacaggctgcagttccatctgtaaattctgctccagcagtcacttctggaggcccatttaagcttcctaatggtgttggaaagcctgcagctcctttagctgatttgcttgatttgagttctgatgatgctccagtgactacctcggcccctacaacagcacctaatgattttctacaggatctgttgggcattggcttgactgattcgtctcctataggcggagctccgtctacaagcactgacattctgatggatcttctatctattggttcatcttctgtacaaaatggaccaccaacggcaaactttagccttcctggcatagagactaaatctgtcgctgttacacctcaagttgtggatcttcttgatggtttgtcctcaggcacatctcttcctgtttgcctattcgccagatgagaacgcaacctaccccacaatcacagcattccagagtgcaactttgaggatcacattcagtttcaaaaaacaacctggaaaacctcaggagactacaattagtgcttctttcacaaatttagcaaccactacattcacagatttcgtcttccaggcagctgtgccaaagttcatccagttgcgtttggacccagcgagcagcagcactcttcctgccagtggaaatgggtcagttacacaaagcctcagtgtcaccaacaaccagcatggccagaaaccacttgcaatgcgtatccggatgtcttacaaagtgaatggtgaggacaggctggaacaagggcaaatcagcaactttcctgctgggttgtagggccacctgtgtctatagggtttgggttgctctttcagacttatgcttgcctgctagtgagttgtgtacactggtagttggtttttggccgtccattatctctttatatatatagtgtacagtagatgacagcgattaatgatatatcctcagttttgccgaaatgtatttttatcttggtgcatatcggacttcagggtaaccaaaattttcacccttttccccgcgtaccaagcaccaaaggaatgtgttgtaccatgatattccccaatgtaattatttatttttctaatcattgtacaagcttattgtgcagacaaattatttgtttttcatgtgcgtttct

SEQ ID NO: 82368 - DNA, 2847 bp, Zea Mays
aaacaaatccgaagcacaaagcaggggcctcttcgcaaatcccaccaccaccatcaccgcctcccagatccgcctggccgtcctcctcgtccgccactgcggcggtgatccctcgccgccccgcccttgataccgtcgagaggatcgtcgaggacttcgccatggacctcgccatcaatcccttctcctccggtacccgcctccgggacatgatacgtgcgatacgcgcgtgcaagacggcagcagaggagcgcgccgtggtgcggcgggagtgcgcggcgatacgggccgctatcagcgagggcgaccaggactaccggcatcggaacatggccaagctcatgttcatccacatgctcggctaccccacacacttcggccagatggagtgcctcaaacttattgctgccgcaggcttccccgagaagcgcatcggctatctaggactcatgctgctgctcgacgagcggcaggaggtcctcatgctcgtcaccaactctctcaagcaagatcttaaccactcaaaccagttcattgttggtcttgcactctgtgcccttggcaatatatgttctgctgaaatggcgcgtgatcttgctcctgaagtggagcggctgttacaaaatagggaccctaatacaaagaagaaggaaaaacatcacggtgttctgatatctgctgttcagctttgcatggagctatgtaatgccagcaatgaagcattggagtacttgaggaaggtttcaacgaaaaccgagtcaaataagaatgctggaaatgctattttatatgaatgtgtggagacaataatgagcattgaagctacaagtggtttacgtgtgttggcaattaatattttgggtcggtttttgtccaaccgcgataacaacataagatatgttgccctaaacatgcttatgaaggccattgctgtagacacacaagcggtgcagaggcacagggcaacaatattagagtgtgtcaaggatgcagatgtttctattcgtaaaagggccctggaacttgtttacctacttgtcaacgatacaaatgtaaagccattgactaaggaacttgttgattaccttgaagtgagtgatcaagatttcaaggaagacctcactgctaagatatgctcaatagttgaaaagttttccctggacaggctatggtacttagaccagatgttcagagttttatctctggctggtaatcatgtgaaggatgatgtatggcatgctcttatagttctagtgagtaatgcatctgaacttcaaggatattcagtcaggtcattatataaagcattgcaagcatctagtgaacaggaaagtttagttagggtggctgtttggtgcatcggtgaatatggagaaatgctggtcaacaatcttagtatgttggacatggaggaaccaattacggtaacagaatatgatgctgtggatgccgtagaggctgctcttcagcgctactctgcagatgttactactagggctatgtgtcttgtctctcttttgaagctttcctcccggtttccaccaacatcagagaggataaaagaaatagttgcgcaaaataaagggaatactgtgcttgaattgcagcaaagatctattgaattcagttccattatacaaagacatcaatcgatgaaatcatctttgcttgaacggatgcctgtattggatgaagctaattatttggtgaagagagctgcttctatacaggctgcagttccatctgtaaattctgctccagcagtcacttctggaggcccatttaagcttcctaatggtgttggaaagcctgcagctcctttagctgatttgcttgatttgagttctgatgatgctccagtgactacctcggcccctacaacagcacctaatgattttctacaggatctgttgggcattggcttgactgattcgtctcctataggcggagctccgtctacaagcactgacattctgatggatcttctatctattggttcatcttctgtacaaaatggaccaccaacggcaaactttagccttcctggcatagagactaaatctgtcgctgttacacctcaagttgtggatcttcttgatggtttgtcctcaggcacatctcttcctgatgagaacgcaacctaccccacaatcacagcattccagagtgcaactttgaggatcacattcagtttcaaaaaacaacctggaaaacctcaggagactacaattagtgcttctttcacaaatttagcaaccactacattcacagatttcgtcttccaggcagctgtgccaaagttcatccagttgcgtttggacccagcgagcagcagcactcttcctgccagtggaaatgggtcagttacacaaagcctcagtgtcaccaacaaccagcatggccagaaaccacttgcaatgcgtatccggatgtcttacaaagtgaatggtgaggacaggctggaacaagggcaaatcagcaactttcctgctgggttgtagggccacctgtgtctatagggtttgggttgctctttcagacttatgcttgcctgctagtgagttgtgtacactggtagttggtttttggccgtccattatctctttatatatatagtgtacagtagatgacagcgattaatgatatatcctcagttttgccgaaatgtatttttatcttggtgcatatcggacttcagggtaaccaaaattttcacccttttccccgcgtaccaagcaccaaaggaatgtgttgtaccatgatattccccaatgtaattatttatttttctaatcattgtacaagcttattgtgcagacaaattatttgtttttcatgtgcgtttct

SEQ ID NO: 82369 - DNA, 2830 bp, Zea Mays
aaacaaatccgaagcacaaagcaggggcctcttcgcaaatcccaccaccaccatcaccgcctcccagatccgcctggccgtcctcctcgtccgccactgcggcggtgatccctcgccgccccgcccttgataccgtcgagaggatcgtcgaggacttcgccatggacctcgccatcaatcccttctcctccggtacccgcctccgggacatgatacgtgcgatacgcgcgtgcaagacggcagcagaggagcgcgccgtggtgcggcgggagtgcgcggcgatacgggccgctatcagcgagggcgaccaggactaccggcatcggaacatggccaagctcatgttcatccacatgctcggctaccccacacacttcggccagatggagtgcctcaaacttattgctgccgcaggcttccccgagaagcgcatcggctatctaggactcatgctgctgctcgacgagcggcaggaggtcctcatgctcgtcaccaactctctcaagcagtatccaccctgtctgcacttaacagttgtgtttgttgattgttatgcgttgtttctgattgtaattacttaacgtgggcagagatcttaaccactcaaaccagttcattgttggtcttgcactctgtgcccttggcaatatatgttctgctgaaatggcgcgtgatcttgctcctgaagtggagcggctgttacaaaatagggaccctaatacaaagaagaaggccgctttatgctctgtgaggattgtacgaaaagttccagacttggcagaaattttcatgagtgccgccacatcattactgaaggaaaaacatcacggtgttctgatatctgctgttcagctttgcatggagctatgtaatgccagcaatgaagcattggagtacttgaggaaggtttcaacgaaaaccgagtcaaataagaatgctggaaatgctattttatatgaatgtgtggagacaataatgagcattgaagctacaagtggtttacgtgtgttggcaattaatattttgggtcggtttttgtccaaccgcgataacaacataagatatgttgccctaaacatgcttatgaaggccattgctgtagacacacaagcggtgcagaggcacagggcaacaatattagagtgtgtcaaggaacttgttgattaccttgaagtgagtgatcaagatttcaaggaagacctcactgctaagatatgctcaatagttgaaaagttttccctggacaggctatggtacttagaccagatgttcagagttttatctctggctggtaatcatgtgaaggatgatgaaagtttagttagggtggctgtttggtgcatcggtgaatatggagaaatgctggtcaacaatcttagtatgttggacatggaggaaccaattacggtaacagaatatgatgctgtggatgccgtagaggctgctcttcagcgctactctgcagatgttactactagggctatgtgtcttgtctctcttttgaagctttcctcccggtttccaccaacatcagagaggataaaagaaatagttgcgcaaaataaagggaatactgtgcttgaattgcagcaaagatctattgaattcagttccattatacaaagacatcaatcgatgaaatcatctttgcttgaacggatgcctgtattggatgaagctaattatttggtgaagagagctgcttctatacaggctgcagttccatctgtaaattctgctccagcagtcacttctggaggcccatttaagcttcctaatggtgttggaaagcctgcagctcctttagctgatttgcttgatttgagttctgatgatgctccagtgactacctcggcccctacaacagcacctaatgattttctacaggatctgttgggcattggcttgactgattcgtctcctataggcggagctccgtctacaagcactgacattctgatggatcttctatctattggttcatcttctgtacaaaatggaccaccaacggcaaactttagccttcctggcatagagactaaatctgtcgctgttacacctcaagttgtggatcttcttgatggtttgtcctcaggcacatctcttcctgatgagaacgcaacctaccccacaatcacagcattccagagtgcaactttgaggatcacattcagtttcaaaaaacaacctggaaaacctcaggagactacaattagtgcttctttcacaaatttagcaaccactacattcacagatttcgtcttccaggcagctgtgccaaagttcatccagttgcgtttggacccagcgagcagcagcactcttcctgccagtggaaatgggtcagttacacaaagcctcagtgtcaccaacaaccagcatggccagaaaccacttgcaatgcgtatccggatgtcttacaaagtgaatggtgaggacaggctggaacaagggcaaatcagcaactttcctgctgggttgtagggccacctgtgtctatagggtttgggttgctctttcagacttatgcttgcctgctagtgagttgtgtacactggtagttggtttttggccgtccattatctctttatatatatagtgtacagtagatgacagcgattaatgatatatcctcagttttgccgaaatgtatttttatcttggtgcatatcggacttcagggtaaccaaaattttcacccttttccccgcgtaccaagcaccaaaggaatgtgttgtaccatgatattccccaatgtaattatttatttttctaatcattgtacaagcttattgtgcagacaaattatttgtttttcatgtgcgtttct

SEQ ID NO: 82370 - DNA, 2680 bp, Zea Mays
cttggactctcagactaaacaaatccgaagcacaaagcaggggcctcttcgcaaatcccaccaccaccatcaccgcctcccagatccgcctggccgtcctcctcgtccgccactgcggcggtgatccctcgccgccccgcccttgataccgtcgagaggatcgtcgaggacttcgccatggacctcgccatcaatcccttctcctccggtacccgcctccgggacatgatacgtgcgatacgcgcgtgcaagacggcagcagaggagcgcgccgtggtgcggcgggagtgcgcggcgatacgggccgctatcagcgagggcgaccaggactaccggcatcggaacatggccaagctcatgttcatccacatgctcggctaccccacacacttcggccagatggagtgcctcaaacttattgctgccgcaggcttccccgagaagcgcatcggctatctaggactcatgctgctgctcgacgagcggcaggaggtcctcatgctcgtcaccaactctctcaagcaagatcttaaccactcaaaccagttcattgttggtcttgcactctgtgcccttggcaatatatgttctgctgaaatggcgcgtgatcttgctcctgaagtggagcggctgttacaaaatagggaccctaatacaaagaagaaggaaaaacatcacggtgttctgatatctgctgttcagctttgcatggagctatgtaatgccagcaatgaagcattggagtacttgaggaaggtttcaacgaaaaccgagtcaaataagaatgctggaaatgctattttatatgaatgtgtggagacaataatgagcattgaagctacaagtggtttacgtgtgttggcaattaatattttgggtcggtttttgtccaaccgcgataacaacataagatatgttgccctaaacatgcttatgaaggccattgctgtagacacacaagcggtgcagaggcacagggcaacaatattagagtgtgtcaaggaacttgttgattaccttgaagtgagtgatcaagatttcaaggaagacctcactgctaagatatgctcaatagttgaaaagttttccctggacaggctatggtacttagaccagatgttcagagttttatctctggctggtaatcatgtgaaggatgatgaaagtttagttagggtggctgtttggtgcatcggtgaatatggagaaatgctggtcaacaatcttagtatgttggacatggaggaaccaattacggtaacagaatatgatgctgtggatgccgtagaggctgctcttcagcgctactctgcagatgttactactagggctatgtgtcttgtctctcttttgaagctttcctcccggtttccaccaacatcagagaggataaaagaaatagttgcgcaaaataaagggaatactgtgcttgaattgcagcaaagatctattgaattcagttccattatacaaagacatcaatcgatgaaatcatctttgcttgaacggatgcctgtattggatgaagctaattatttggtgaagagagctgcttctatacaggctgcagttccatctgtaaattctgctccagcagtcacttctggaggcccatttaagcttcctaatggtgttggaaagcctgcagctcctttagctgatttgcttgatttgagttctgatgatgctccagtgactacctcggcccctacaacagcacctaatgattttctacaggatctgttgggcattggcttgactgattcgtctcctataggcggagctccgtctacaagcactgacattctgatggatcttctatctattggttcatcttctgtacaaaatggaccaccaacggcaaactttagccttcctggcatagagactaaatctgtcgctgttacacctcaagttgtggatcttcttgatggtttgtcctcaggcacatctcttcctgatgagaacgcaacctaccccacaatcacagcattccagagtgcaactttgaggatcacattcagtttcaaaaaacaacctggaaaacctcaggagactacaattagtgcttctttcacaaatttagcaaccactacattcacagatttcgtcttccaggcagctgtgccaaagttcatccagttgcgtttggacccagcgagcagcagcactcttcctgccagtggaaatgggtcagttacacaaagcctcagtgtcaccaacaaccagcatggccagaaaccacttgcaatgcgtatccggatgtcttacaaagtgaatggtgaggacaggctggaacaagggcaaatcagcaactttcctgctgggttgtagggccacctgtgtctatagggtttgggttgctctttcagacttatgcttgcctgctagtgagttgtgtacactggtagttggtttttggccgtccattatctctttatatatatagtgtacagtagatgacagcgattaatgatatatcctcagttttgccgaaatgtatttttatcttggtgcatatcggacttcagggtaaccaaaattttcacccttttccccgcgtaccaagcaccaaaggaatgtgttgtaccatgatattccccaatgtaattatttatttttctaatcattgtacaagcttattgtgcagacaaattatttgtttttcatgtgcgtttct

SEQ ID NO: 82371 - DNA, 1207 bp, Zea Mays
gtttttaggcattgtggaagaaaaaaacccaatacaatgcttaatagacaaacccatctcttagattgctgtcaagaggttaaataacgcaaagaacggcacagaagccgaatttgcttcagaagtcgagatactgggaagaataagacacaaaaacctcctgagcttccgtggatactgtgcggacggacccgagcgcgttctggtgtacgacttcatggcaaactcaagcctgtatgcacatctccatggaccgcattccgcggagtgtctcctcgactggcggaggcgagcgtctatcgccatgggcaccgctcgggctctcttgtaccttcatcgccacgcaacgcctaagataatccacggaagcgtcaaggccaccaacgtgctgctggattcagacttccgggcgcacgctggcgatttcggtctggcaaggcttattcccgacgacggaacggaccacgaaaagatagccagcagcgagagccagcgaggctaccttgctcccgagtacgccgccatgtccggcaaaccaactgcaggctgcgatgtatacagcttcgggatcatactgctggagcttgcgagcggcagaaggccagtcgagaagtcgggttctggcaaggcttgtggaatccgaagctgggtgctcccgctcgcaaggcagggcaggtacgacgagattgcggactcaaagctgggcgacaagttctctggacctgagctgagaaggatggtgttggtcggtctagcgtgtacacgttcagaacctgaaaagagacccacgatgcttcaagtcgtgccgttgctgaaaggcgagtcgaaagaaacgcttgttaagcttgaaagggaggagttgttcagcccagactcgacgacggtgagttcgcagggaacaccgaccccagatgggagcacggactctgcgccgccgctgaagaaagataaagaactggttggggcgtgagttgcgatatattgctgttctaggagattgtagagtgcgtatttgtggtattgatgattagtctgtgcggtttgacgtgaatgggaattgtataggcattgtttttttctaagttttttttttctgtcccttttgagggagtaaggaagagccggcgggctggagtactctgttgctttgcagctttttggttcattatgcttcgtctatcgagcttgtcgccgagtctggcccctc

SEQ ID NO: 82372 - DNA, 1333 bp, Zea Mays
ggcgaactcctcgcacttggtcgctctagtgaatttgccaaatacgtctgacgaaggaaggcgatcgttgaggtgggtgttctcgttgagagaacttcgatcagcaacaaacagcttcaattacgataacaagatcggagaagggccacttgggagcgtgtattgggggcaagtctgggatggttctcagattgctgtcaagaggttaaataacgcaaagaacggcacagaagccgaatttgcttcagaagtcgagatactgggaagaataagacacaaaaacctcctgagcttccgtggatactgtgcggacggacccgagcgcgttctggtgtacgacttcatggcaaactcaagcctgtatgcacatctccatggaccgcattccgcggagtgtctcctcgactggcggaggcgagcgtctatcgccatgggcaccgctcgggctctcttgtaccttcatcgccacgcaacgcctaagataatccacggaagcgtcaaggccaccaacgtgctgctggattcagacttccgggcgcacgctggcgatttcggtctggcaaggcttattcccgacgacggaacggaccacgaaaagatagccagcagcgagagccagcgaggctaccttgctcccgagtacgccgccatgtccggcaaaccaactgcaggctgcgatgtatacagcttcgggatcatactgctggagcttgcgagcggcagaaggccagtcgagaagtcgggttctggcaaggcttgtggaatccgaagctgggtgctcccgctcgcaaggcagggcaggtacgacgagattgcggactcaaagctgggcgacaagttctctggacctgagctgagaaggatggtgttggtcggtctagcgtgtacacgttcagaacctgaaaagagacccacgatgcttcaagtcgtgccgttgctgaaaggcgagtcgaaagaaacgcttgttaagcttgaaagggaggagttgttcagcccagactcgacgacggtgagttcgcagggaacaccgaccccagatgggagcacggactctgcgccgccgctgaagaaagataaagaactggttggggcgtgagttgcgatatattgctgttctaggagattgtagagtgcgtatttgtggtattgatgattagtctgtgcggtttgacgtgaatgggaattgtataggcattgtttttttctaagttttttttttctgtcccttttgagggagtaaggaagagccggcgggctggagtactctgttgctttgcagctttttggttcattatgcttcgtctatcgagcttgtcgccgagtctggcccctc

SEQ ID NO: 82373 - DNA, 1372 bp, Zea Mays
cgcagctgcgaggctggtctccgctgttacgtctctgcccgcctctcccccacccctcctctggtccaagtccccccaccgcagcggccaccactccatccgagtctcttcgactccaagccgttccgctccccctgttccgcgcgacgccgatgcaccccaagctgccgcgggccgcgcgcaggctcctctgctgcggcggggccgccgcgtccccggaggaggacctattgctgtcaagaggttaaataacgcaaagaacggcacagaagccgaatttgcttcagaagtcgagatactgggaagaataagacacaaaaacctcctgagcttccgtggatactgtgcggacggacccgagcgcgttctggtgtacgacttcatggcaaactcaagcctgtatgcacatctccatggaccgcattccgcggagtgtctcctcgactggcggaggcgagcgtctatcgccatgggcaccgctcgggctctcttgtaccttcatcgccacgcaacgcctaagataatccacggaagcgtcaaggccaccaacgtgctgctggattcagacttccgggcgcacgctggcgatttcggtctggcaaggcttattcccgacgacggaacggaccacgaaaagatagccagcagcgagagccagcgaggctaccttgctcccgagtacgccgccatgtccggcaaaccaactgcaggctgcgatgtatacagcttcgggatcatactgctggagcttgcgagcggcagaaggccagtcgagaagtcgggttctggcaaggcttgtggaatccgaagctgggtgctcccgctcgcaaggcagggcaggtacgacgagattgcggactcaaagctgggcgacaagttctctggacctgagctgagaaggatggtgttggtcggtctagcgtgtacacgttcagaacctgaaaagagacccacgatgcttcaagtcgtgccgttgctgaaaggcgagtcgaaagaaacgcttgttaagcttgaaagggaggagttgttcagcccagactcgacgacggtgagttcgcagggaacaccgaccccagatgggagcacggactctgcgccgccgctgaagaaagataaagaactggttggggcgtgagttgcgatatattgctgttctaggagattgtagagtgcgtatttgtggtattgatgattagtctgtgcggtttgacgtgaatgggaattgtataggcattgtttttttctaagttttttttttctgtcccttttgagggagtaaggaagagccggcgggctggagtactctgttgctttgcagctttttggttcattatgcttcgtctatcgagcttgtcgccgagtctggcccctc

SEQ ID NO: 82374 - DNA, 2172 bp, Zea Mays
agcagccatccagcagggcctccgtttgtccgtctcctctctctacaggctgttcgtgcccccaagcaagcactacgcgcgcgaaaaaaaataaaaaaaaaaggcacgtcatctggatctcttgctctagctcactcaacctcaccaaaatgtgcaggctgctccgactccgagaacaggacggtcatgccgcgcgcaccggtttcccttcccatgccgctaccacctcccgactcccgagtcacgactgggggaccacccgatggacgatgattgatgcactgaaagcaagagtgggttggtggtggaccgtggcagtctaccaaatgtcgctgctctccccgcccggccggaacgaggaaggaaggcgaccaccactccacgccggtcgtgccaggtcggcagtcagagtcagccgcgcctgcgcgcgtccctttcccaccaacccctctccctccccgcactcgacagccacggccgcgacggcgtccgcgtgcaccggacaccacggccagacccgaggccacacagccctctgaccaaacgcacggatccggccagccacccaccccgcccccctagcggccgccacccacccgtgcgcgcggcgcaccaaggcctggcccggcagtggcagccaggctctcacacgcctcgcctagtcgccttgccgccgcgcgttatataagagccgccccggcaggcacggtcggtcaatccagcaatacccgacgcgcaagccagtgccgcacccagaccagatctccgcgacatatcagtcgttcgtccagctaactgcactgcactgcactgcacgcaatggccaccacggcgaccgaggcggccaaggctgcaccggcgcaggagcagcaggccaacggcaacggcaacggcgagcagaagacgcgccactccgaggtcggccacaagagcctgctcaagagcgacgacctgtaccagaatgatccgcagtacatcctggacacgagcgtgtacccgcgggagccggagagcatgaaggagctgcgcgagatcaccgccaagcacccatggaacctgatgaccacctccgccgacgagggccagttcctcaacatgctcatcaagctcatcggcgccaagaagaccatggagatcggcgtctacaccggctactcgctcctcgccaccgcgctcgcactcccggaggacggcacgatcttggccatggacatcaaccgcgagaactacgagctaggccttccctgcatcaacaaggccggcgtgggccacaagatcgacttccgcgagggccccgcgctccccgtcctggacgacctcgtggcggacaaggagcagcacgggtcgttcgacttcgccttcgtggacgccgacaaggacaactacctcagctaccacgagcggctcctgaagctggtgaggcccggcggcctcatcggctacgacaacacgctgtggaacggctccgtcgtgctccccgacgacgcgcccatgcgcaagtacatccgcttctaccgcgacttcgtcctcgccctcaacagcgcgctcgccgccgacgaccgcgtcgagatctgccagctccccgtcggcgacggcgtcacgctctgccgccgcgtcaagtgaaaaaaagaagaagaagaaaaaaaacataataccctgcgttcctgctgccccggctgtctggcccccactactgccaccgacggcggcgccgaacccccgttccaatcatcatatcgtagacgacgcgcagcattaaactatcaatcaccggatctggctctttcttggccctgtactgtactattaatgttccgttcttgtttttttattcggaattgtcgccgtttcagtatacgtaaatctcgaggtcgataatacagtaatactaccaatttaactgtatactcctaccgtctggatggttttgttttgttttgtttcgttctccctgcgcgtgtcgaaattccgatttcgaattatttggtcaaaacccaagctgtcaaattcggtcgatgcttccaccacatgtttttgacagagatggcaggcaaccctcgcatcgcgcatgttcaccgacagcgacgccccacctccgtacagatattttgctcgtatatagcatctgtgccctgccgaacgacaagaatattgtggacgacagatcagaac

SEQ ID NO: 82375 - DNA, 2748 bp, Zea Mays
atcctgagctcggctcctcctcagaaaaacacaagggaagacagctgcctacccaacctaccagccatggcgccacattcttactccatagcccccgtccaaagcgagctgaacatgacgctgtacaacaaggaggtgtacggtgggcgggggaccaacggagtgaccactctagtgaaccgagggccaatcggcaccacctgggtcttctcgtggcctgtcaccgacgggcccgccggcgccgacgcgaacgtcgtcggccatcttcagggcaccggcgttcaagtcgccacttaccccgactacatgtggcactactcccttgggctggtgttcggccagggaagcaggttcaatgggtccacactacaaatacaagggacttccaaaataaatggcgagtggagcattgttggagggacaggagaacttgctatggcaaagggcacggtcagacgcacagaagtttcgtatacgggaaatataaggatttcagaactcaatatacatgtgctttacactccaatgtgacctatacagatgtaagtataatgcaccccagtgtttaatgtgatgggcatttatttttcctatttaacaagttagctacgtacatatttagtttaccagaatttccataataacgtccagactatatatgtaacacatttggaaaatgatgatgcattggttgtttgttgaactgtttctttttttttacttatatattacgcccttcccctcaaatacaagctatcatagaaattttggatatattatgggataaaattaaagaaatgacacatgtaactaaagagatctcgagcataccatatattggtgctttacgaagttcatttgttttaaaatgcttataatttggaacaaattttgaatgcttaaggttctgtttgggtcctcttagctaatagatatttttttctctttttatgatctattagcacctattagtaaggtcaaatggctaataggcaaataatttatcggctctctaactagcaattagtcaatttattagctagcccgtttgaaacctaaggtgctaaatagccaacaaattgtttgtccgatgaatctgttatatttttggacggagggagatgtgcctaaactgtttggttgtcattgtttaaatcattgttttatatgcatgaatgtaagtatgtaaccatcatatggacaatttagtatgagtattttttccataagcatgcattgatgatgatgtcctgtttgaatatactactacaatacatgtgcgttacgacgacacacaagaaaaaatattacactttaccttagccaaaatgcatagaaatgtattagttgaaaaggagtccgaccctcttttttatatttcgctcggtcgcttgtccttctttagctaacgaggtagtactatgtgggagcgctacattgcatgtgacttcttttcgtgctgggcttggatggtcacgctcatctgtgggggtaacgacccactaataagagtttgagtggttttcacggcctatctatgagataacggtatactgctaggacagtccggtgaacaccggacagcccggtgaataatagtcgcagcgccttcgctttttcctgagagcgccgagttcgtcgccgggccagcctgggcaccggacactgtccggtgcaccacaggttggtgctggtttgactgaacatagctaattcttctccacttcttttcctcttttcttggcaatgtctctagtacttagataaacatgttaatacccaaaaacaatttactagggctagaaacataccttggctcttgatgtgcacttctaaatcacttggcacatatgaacttaaaacaatgtgttggccatctaatcacaaaaacatttatagaaatggctcaagggcacatttccctttcagaagtgtctaagggtctagctaacccaggcctaaccattcaccttggaagaatctatggttttggctaacccaggctaaaagggatacacgacctctgcaaagtgtaaaactggtatatcagtcgtgctcacagttaagagcgactcgggactctcacgtgattaatatatggaagtaaatttaacgagacatgcattgtattgtggatattttgtttatgttcatttatttaattgggatggtatgtacttgtacttaattaaaagctaatgcccaacctcagccatatttcttggtaagccttacactacacttattcttgcacacttgctgggcaataaccgtatgagagctcacacttgctataaacaatacccaggtcaagaacaagtatctctggaggaggactactatgataagttcgatgagatctagggtgtggagaagttatcttaatctggtttattttatttagttatttttgtaagatgttttgtcatgtaataaagattgtgacattggtttatatacacactgagtcgtcatatatgtgaaatttgatcctgacacgtacatatgaggtgcatatggatttgtccttaaatccgggtgtgatattacttgagtgaggagagggttgaaagagacccagtcctcggactcctcaacagagacataggtttctctttgaaatcaaactctagtaaacaaaccaccatgtctcctatgcattttccttccctatttgcatttgtcttttcccattcaagcaaaacttgctttgttcttcatttgagctttaccttttgatattctgtt

SEQ ID NO: 82376 - DNA, 1006 bp, Zea Mays
cgtacgcatccgcctcttcttcccatcctgagctcggctcctcctcagaaaaacacaagggaagacagctgcctacccaacctaccagccatggcgccacattcttactccatagcccccgtccaaagcgagctgaacatgacgctgtacaacaaggaggtgtacggtgggcgggggaccaacggagtgaccactctagtgaaccgagggccaatcggcaccacctgggtcttctcgtggcctgtcaccgacgggcccgccggcgccgacgcgaacgtcgtcggccatcttcagggcaccggcgttcaagtcgccacttaccccgactacatgtggcactactcccttgggctggtgttcggccagggaagcaggttcaatgggtccacactacaaatacaagggacttccaaaataaatggcgagtggagcattgttggagggacaggagaacttgctatggcaaagggcacggtcagacgcacagaagtttcgtatacgggaaatataaggatttcagaactcaatatacatgtgctttacactccaatgtgacctatacagatgtcaagaacaagtatctctggaggaggactactatgataagttcgatgagatctagggtgtggagaagttatcttaatctggtttattttatttagttatttttgtaagatgttttgtcatgtaataaagattgtgacattggtttatatacacactgagtcgtcatatatgtgaaatttgatcctgacacgtacatatgaggtgcatatggatttgtccttaaatccgggtgtgatattacttgagtgaggagagggttgaaagagacccagtcctcggactcctcaacagagacataggtttctctttgaaatcaaactctagtaaacaaaccaccatgtctcctatgcattttccttccctatttgcatttgtcttttcccattcaagcaaaacttgctttgttcttcatttgagctttaccttttgatattctgtt

SEQ ID NO: 82377 - DNA, 643 bp, Zea Mays
gacaaaaccattcaagaagctccctttcacttggaatcatcgcagttccaccctcgaccatttcgaatgcctgaatcttctgaggtgaggtagtggcaaagcaccagctaacttcaattcaaggaagagttagtatgccaggaattggtatgaaccccattaggcaagaatcatccactgtaaaagctgatcagtttgatggttgctcacatagcaaagagtgactacgagatatgtgccacaaaatgcatgacaagttcagcttaggaaatggcaaccgatgaggaccgaaggcaagatgacacagttcagtaacccagctgacagcctggcacgcaggcttcccctttattttcctctgttactgcaatagtaacttaaatttttaggcttcccctttattttcctctgttactgcaatagtaacttaattttttttaggcttcacctttcctttttgtttgaaaattagcagggcagtattaattaatagtacaaaaccatgtatcaccaagatttcaggggttgaaacttgaaatgccaatattcaccaagctttagttttttttcaaagagtaatttgcagaggttgtaatgcactatagcctatagcagacttaacaagcactacaatagaagacag

SEQ ID NO: 82378 - DNA, 743 bp, Zea Mays
aggttatagatgctgtctatgagaaatgttggtgggggcaacattacagcgtcaagctctggggcagtgatgccaccagtaaaccaaaacaaaaccattcaagaagctccctttcacttggaatcatcgcagttccaccctcgaccatttcgaatgcctgaatcttctgagatgatgcttccaggtgaggtagtggcaaagcaccagctaacttcaattcaaggaagagttagtatgccaggaattggtatgaaccccattaggcaagaatcatccactgtaaaagctgatcagtttgatggttgctcacatagcaaagagtgactacgagatatgtgccacaaaatgcatgacaagttcagcttaggaaatggcaaccgatgaggaccgaaggcaagatgacacagttcagtaacccagctgacagcctggcacgcaggcttcccctttattttcctctgttactgcaatagtaacttaaatttttaggcttcccctttattttcctctgttactgcaatagtaacttaattttttttaggcttcacctttcctttttgtttgaaaattagcagggcagtattaattaatagtacaaaaccatgtatcaccaagatttcaggggttgaaacttgaaatgccaatattcaccaagctttagttttttttcaaagagtaatttgcagaggttgtaatgcactatagcctatagcagacttaacaagcactacaatagaagacag

SEQ ID NO: 82379 - DNA, 1709 bp, Zea Mays
aggcgctggctggctagctgacaccgaggagccggggcggaatccgtccgctgcagcacagccgcgcccgggggaaaccgccaaaaccccgtaaaaagtccaggaaaaaacaagcccaaagcgggcgagtgcgcggccgcgggcaagcaaccggccacccacctagctcggctccgctcagcggcagcaccgcaggccgcagcagcacggcatgggcgcaaacactaaaaagaagggagcggccgcgcctccaccccaaacccacctcgcctcctagtcccccccttcgccttctctcccgagtcccatcggagcccggagctctctcgcctcccgcgaggctgtgtggtgaggcgcggacgagatgaacgagcaggggctcggtggtctcggcgggggccgcggggccgtgcaggggcacgggcgggaggcgatggcgctcttgcagcaccagcagcttcaacagcaacggcggcagctggaggaggaggatgaggtgcggcgccagatgttcggcggggtggcggcgttcccggcagcgctgggccacggccagcaggtggactacggggaggacgccggcgggctcggggacagcgacgcgggcgggtcggagcccgagccaccgccggagcggacgcgcggggggtccggcggcggcggcggcaagcggagccgcgctgccgaggtgcacaacctctccgagaagaggaggaggagcaagatcaacgagaagatgaaagcgctgcagagcctgatacccaactccaacaagaccgacaaggcatccatgcttgacgaggccattgagtatctgaagcaactgcagctccaagtgcagatgctgtctatgagaaatggtgtttacttgaaccctccatatttgtctggcacaattgagcctgcacaagcatcacaaatgtttgctgcagttggtgggggcaacattacagcgtcaagctctggggcagtgatgccaccagtaaaccaaagttcaggacttcaagtatttgatccattaaatcctccacgagaccaaccactgtcttttgtattaccaaatgtagacaaaaccattcaagaagctccctttcacttggaatcatcgcagttccaccctcgaccatttcgaatgcctgaatcttctgaggtgaggtagtggcaaagcaccagctaacttcaattcaaggaagagttagtatgccaggaattggtatgaaccccattaggcaagaatcatccactgtaaaagctgatcagtttgatggttgctcacatagcaaagagtgactacgagatatgtgccacaaaatgcatgacaagttcagcttaggaaatggcaaccgatgaggaccgaaggcaagatgacacagttcagtaacccagctgacagcctggcacgcaggcttcccctttattttcctctgttactgcaatagtaacttaaatttttaggcttcccctttattttcctctgttactgcaatagtaacttaattttttttaggcttcacctttcctttttgtttgaaaattagcagggcagtattaattaatagtacaaaaccatgtatcaccaagatttcaggggttgaaacttgaaatgccaatattcaccaagctttagttttttttcaaagagtaatttgcagaggttgtaatgcactatagcctatagcagacttaacaagcactacaatagaagacag

SEQ ID NO: 82380 - DNA, 1652 bp, Zea Mays
aggcgctggctggctagctgacaccgaggagccggggcggaatccgtccgctgcagcacagccgcgcccgggggaaaccgccaaaaccccgtaaaaagtccaggaaaaaacaagcccaaagcgggcgagtgcgcggccgcgggcaagcaaccggccacccacctagctcggctccgctcagcggcagcaccgcaggccgcagcagcacggcatgggcgcaaacactaaaaagaagggagcggccgcgcctccaccccaaacccacctcgcctcctagtcccccccttcgccttctctcccgagtcccatcggagcccggagctctctcgcctcccgcgaggctgtgtggtgaggcgcggacgagatgaacgagcaggggctcggtggtctcggcgggggccgcggggccgtgcaggggcacgggcgggaggcgatggcgctcttgcagcaccagcagcttcaacagcaacggcggcagctggaggaggaggatgaggtgcggcgccagatgttcggcggggtggcggcgttcccggcagcgctgggccacggccagcaggtggactacggggaggacgccggcgggctcggggacagcgacgcgggcgggtcggagcccgagccaccgccggagcggacgcgcggggggtccggcggcggcggcggcaagcggagccgcgctgccgaggtgcacaacctctccgagaagaggaggaggagcaagatcaacgagaagatgaaagcgctgcagagcctgatacccaactccaacaagaccgacaaggcatccatgcttgacgaggccattgagtatctgaagcaactgcagctccaagtgcagatgctgtctatgagaaatggtgtttacttgaaccctccatatttgtctggcacaattgagcctgcacaagcatcacaaatgtttgctgcagttggtgggggcaacattacagcgtcaagctctggggcagtgatgccaccagtaaaccaaaacaaaaccattcaagaagctccctttcacttggaatcatcgcagttccaccctcgaccatttcgaatgcctgaatcttctgagatgatgcttccaggtgaggtagtggcaaagcaccagctaacttcaattcaaggaagagttagtatgccaggaattggtatgaaccccattaggcaagaatcatccactgtaaaagctgatcagtttgatggttgctcacatagcaaagagtgactacgagatatgtgccacaaaatgcatgacaagttcaggacagcttaggaaatggcaaccgatgaggaccgaaggcaagatgacacagttcagtaacccagctgacagcctggcacgcaggcttcccctttattttcctctgttactgcaatagtaacttaaatttttaggcttcccctttattttcctctgttactgcaatagtaacttaattttttttaggcttcacctttcctttttgtttgaaaattagcagggcagtattaattaatagtacaaaaccatgtatcaccaagatttcaggggttgaaacttgaaatgccaatattcaccaagctttagttttttttcaaagagtaatttgcagaggttgtaatgcactatagcctatagcagacttaacaagcactacaatagaagacag

SEQ ID NO: 82381 - DNA, 1639 bp, Zea Mays
aggcgctggctggctagctgacaccgaggagccggggcggaatccgtccgctgcagcacagccgcgcccgggggaaaccgccaaaaccccgtaaaaagtccaggaaaaaacaagcccaaagcgggcgagtgcgcggccgcgggcaagcaaccggccacccacctagctcggctccgctcagcggcagcaccgcaggccgcagcagcacggcatgggcgcaaacactaaaaagaagggagcggccgcgcctccaccccaaacccacctcgcctcctagtcccccccttcgccttctctcccgagtcccatcggagcccggagctctctcgcctcccgcgaggctgtgtggtgaggcgcggacgagatgaacgagcaggggctcggtggtctcggcgggggccgcggggccgtgcaggggcacgggcgggaggcgatggcgctcttgcagcaccagcagcttcaacagcaacggcggcagctggaggaggaggatgaggtgcggcgccagatgttcggcggggtggcggcgttcccggcagcgctgggccacggccagcaggtggactacggggaggacgccggcgggctcggggacagcgacgcgggcgggtcggagcccgagccaccgccggagcggacgcgcggggggtccggcggcggcggcggcaagcggagccgcgctgccgaggtgcacaacctctccgagaagaggaggaggagcaagatcaacgagaagatgaaagcgctgcagagcctgatacccaactccaacaagaccgacaaggcatccatgcttgacgaggccattgagtatctgaagcaactgcagctccaagtgcagatgctgtctatgagaaatggtgtttacttgaaccctccatatttgtctggcacaattgagcctgcacaagcatcacaaatgtttgctgcagttggtgggggcaacattacagcgtcaagctctggggcagtgatgccaccagtaaaccaaaacaaaaccattcaagaagctccctttcacttggaatcatcgcagttccaccctcgaccatttcgaatgcctgaatcttctgaggtgaggtagtggcaaagcaccagctaacttcaattcaaggaagagttagtatgccaggaattggtatgaaccccattaggcaagaatcatccactgtaaaagctgatcagtttgatggttgctcacatagcaaagagtgactacgagatatgtgccacaaaatgcatgacaagttcaggacagcttaggaaatggcaaccgatgaggaccgaaggcaagatgacacagttcagtaacccagctgacagcctggcacgcaggcttcccctttattttcctctgttactgcaatagtaacttaaatttttaggcttcccctttattttcctctgttactgcaatagtaacttaattttttttaggcttcacctttcctttttgtttgaaaattagcagggcagtattaattaatagtacaaaaccatgtatcaccaagatttcaggggttgaaacttgaaatgccaatattcaccaagctttagttttttttcaaagagtaatttgcagaggttgtaatgcactatagcctatagcagacttaacaagcactacaatagaagacag

SEQ ID NO: 82382 - DNA, 1640 bp, Zea Mays
aggcgctggctggctagctgacaccgaggagccggggcggaatccgtccgctgcagcacagccgcgcccgggggaaaccgccaaaaccccgtaaaaagtccaggaaaaaacaagcccaaagcgggcgagtgcgcggccgcgggcaagcaaccggccacccacctagctcggctccgctcagcggcagcaccgcaggccgcagcagcacggcatgggcgcaaacactaaaaagaagggagcggccgcgcctccaccccaaacccacctcgcctcctagtcccccccttcgccttctctcccgagtcccatcggagcccggagctctctcgcctcccgcgaggctgtgtggtgaggcgcggacgagatgaacgagcaggggctcggtggtctcggcgggggccgcggggccgtgcaggggcacgggcgggaggcgatggcgctcttgcagcaccagcagcttcaacagcaacggcggcagctggaggaggaggatgaggtgcggcgccagatgttcggcggggtggcggcgttcccggcagcgctgggccacggccagcaggtggactacggggaggacgccggcgggctcggggacagcgacgcgggcgggtcggagcccgagccaccgccggagcggacgcgcggggggtccggcggcggcggcggcaagcggagccgcgctgccgaggtgcacaacctctccgagaagaggaggaggagcaagatcaacgagaagatgaaagcgctgcagagcctgatacccaactccaacaagaccgacaaggcatccatgcttgacgaggccattgagtatctgaagcaactgcagctccaagtgcaggcagttggtgggggcaacattacagcgtcaagctctggggcagtgatgccaccagtaaaccaaagttcaggacttcaagtatttgatccattaaatcctccacgagaccaaccactgtcttttgtattaccaaatgtagacaaaaccattcaagaagctccctttcacttggaatcatcgcagttccaccctcgaccatttcgaatgcctgaatcttctgagatgatgcttccaggtgaggtagtggcaaagcaccagctaacttcaattcaaggaagagttagtatgccaggaattggtatgaaccccattaggcaagaatcatccactgtaaaagctgatcagtttgatggttgctcacatagcaaagagtgactacgagatatgtgccacaaaatgcatgacaagttcaggacagcttaggaaatggcaaccgatgaggaccgaaggcaagatgacacagttcagtaacccagctgacagcctggcacgcaggcttcccctttattttcctctgttactgcaatagtaacttaaatttttaggcttcccctttattttcctctgttactgcaatagtaacttaattttttttaggcttcacctttcctttttgtttgaaaattagcagggcagtattaattaatagtacaaaaccatgtatcaccaagatttcaggggttgaaacttgaaatgccaatattcaccaagctttagttttttttcaaagagtaatttgcagaggttgtaatgcactatagcctatagcagacttaacaagcactacaatagaagacag

SEQ ID NO: 82383 - DNA, 3166 bp, Zea Mays
atggagaagcggctagcgtacgcggccttgctcccactgctcctcctcacgctccgcatcctccccctgccctccggctcccccaactgcagcggcggcgagggggaaaccccgcccgcgtccaggcacgtggtgcggttcctggagtaccgccgcgcggaggagcaccgggagtacctggacgcggggctccgtgacggcgcccccgcggcggcgtggcgctgggtggagcggcggaaccccgcggccgcgttccctaccgacttcgcggtgctcgagatccgcgacgcgcaccgcgaggccgtcgtggcggcggtgcgggcgctcggccgcgtgcgggacgtgcacgccgacgccacctactcgcgctccgccctttcggcggcgccggatcggtcgcgtcctccccggcgggggaagctgttcaccgccatgtcgttcgagggcgaggaggagggtggcggagagaccggcaattcgtcttctgctgcctgggggcggaagcttcttctgcagagatcacaagttacatccctttttggagctgaacggttatggggaagaggcttcactggcaagaaagtcaaaatggccatttttgacactggtattcgggccgatcatccacattttcgcaatattaaggagcgcacaaattggacaaatgaagacacactaaacgacaaccttgggcatggaacatttgtagcaggagttattgctggccaagatgcagaatgccctggatttgcacctgatactgagatatatgcttttcgagtcttcacagatgctcagatatcttacacatcatggttcttggatgcatttaactacgcgatagctaccggtatggatgttttaaacttgagcatcggtggacctgattacctggatctcccctttgtggaaaaggtctgggagctcacagcaaacaacattattatggtatcagctattggaaatgatgggcctctatatggcacattaaacaacccagctgatcaaagcgatgttattggtgttggtggtattgattacaataaccatatagcttcattttcctctagaggcatgactacgtgggagcttcctcatggttatggtcgtgtgaaacctgatgttgttgcatacagtcgagatataattggatcaaagatcagcacaggctgtaagaccctttcaggcaccagtgtagcaagcccggtggttgctggtgtagtatgtttgcttgttagtgttatacctgaagacaagcggaaattgatcctcaaccctgctgctatgaaacaggcccttgtggagggtgcttctaaactttcaggaccaaacatgtatgaacaaggtgctggcaggcttgatctctggcagtcatatgaaatcttaaaaaattaccaaccacgtgcaagcatatttcctactatgcttgacttcaccgactgtccatatttctggcctttttgtcgtcaacctatgtatgctggagctatgccagtaatcttcaatgctacaatcctgaacgggatgggggtgattggttatgtaaaggatcaacctttatggcaaccttctgaggatattggcaatcttcttagtgttcacttcacctactcagatgtcatctggccctggacgggataccttgctctacatttgcaagttaaagatgagggttctcagttttcaggcataattagtggcaatgttactctgactatttataccccagcagctcatggagaaagcagcccacggagtagtacatgtattcttcacatgaaggtcaaggttgttccaacacctgttaggtcaaaaaggatactgtgggaccaatatcataatattaagtatccttcaggatatgttccaagggattcccttaatgttcataatgatatccttgactggcatggtgaccacttgcacacaaacttccacattctgttcaacatgctaagagatgcagagtactatattgagacacttggatcaccacttacttgctttgatgctagcaattatgggacattgcttatggttgatcttgaggacgaatactttgatgaagagattcagaaacttagggatgatgttatacacaagggacttggtattgctgtttttgctgagtggtaccatgttgatacaatggttaagatgacattctttgatgagaacacccggagttggtggactccaattactgggggtgcaaatattcctgcaattaatgaacttctggcaccatttggcattgctttgggggacaaaattcttactggtgacttctcaatcaatggtgagcagacccactatgcttctggaactgatatagtgcaatttcctgcgggaggtttcttgcatagcttccagctccaagaaaactcaaagacggtgcaagatcacataggaacactggatacagaaagcacccaggggaaaggcaagctctcctcaattcttggagtaatagaagcaggggaagggaggattgcagtgtatggtgattcaaattgtcttgacagtagtcacatggtaacaaactgctattggcttttgagaaaaatattggagttcactggaaacagagtgaaagataatgtccttttctcagaggcagcacagttaaagtttcctgtttttgagaatatccatcatccatcacgtagaacggatgtaaacttttcaacatactcaacagttgttggcaaggaattaatctgccaccaagattcccggtttgaggtttggggaacgaaaggctatggtgtccaaccaataggcacatcaagaaagcttccagagtaccagatgcatgaaagttctagttctcccaatgtaacaatacaaattgctggcagtagacaagataaagttgaaaggcttcaaagaaatctttcgataccaaatgctgctaaatttgatgataaaagagattattttggatttattggtcatgaggaggttgacataggaatgttaatggcaagccaatggatgataccttgcttcgctgccactgcttgccttatgttgtatcttagttgtagagtgcaacaaaaacgccgcagacgaaggaaggggtcggtggctagtgctaatcggctaacaagtatggagatttaatttgcgaaagagatgatggagtcaacggtgtggataatcc

SEQ ID NO: 82384 - DNA, 2608 bp, Zea Mays
gacaagtttgtgttattgttggaaaaattggaggactaattaactttacaatgaaaagttatggtcgtgtgaaacctgatgttgttgcatacagtcgagatataattggatcaaagatcagcacaggctgtaagaccctttcaggcaccagtgtagcaagcccggtggttgctggtgtagtatgtttgcttgttagtgttatacctgaagacaagcggaaattgatcctcaaccctgctgctatgaaacaggcccttgtggagggtgcttctaaactttcaggaccaaacatgtatgaacaaggtgctggcaggcttgatctctggcagtcatatgaaatcttaaaaaattaccaaccacgtgcaagcatatttcctactatgcttgacttcaccgactgtccatatttctggcctttttgtcgtcaacctatgtatgctggagctatgccagtaatcttcaatgctacaatcctgaacgggatgggggtgattggttatgtaaaggatcaacctttatggcaaccttctgaggatattggcaatcttcttagtgttcacttcacctactcagatgtcatctggccctggacgggataccttgctctacatttgcaagttaaagatgagggttctcagttttcaggcataattagtggcaatgttactctgactatttataccccagcagctcatggagaaagcagcccacggagtagtacatgtattcttcacatgaaggtcaaggttgttccaacacctgttaggtcaaaaaggatactgtgggaccaatatcataatattaagtatccttcaggatatgttccaagggattcccttaatgttcataatgatatccttgactggcatggtgaccacttgcacacaaacttccacattctgttcaacatgctaagagatgcagagtactatattgagacacttggatcaccacttacttgctttgatgctagcaattatgggacattgcttatggttgatcttgaggacgaatactttgatgaagagattcagaaacttagggatgatgttatacacaagggacttggtattgctgtttttgctgagtggtaccatgttgatacaatggttaagatgacattctttgatgagaacacccggagttggtggactccaattactgggggtgcaaatattcctgcaattaatgaacttctggcaccatttggcattgctttgggggacaaaattcttactggtgacttctcaatcaatggtgagcagacccactatgcttctggaactgatatagtgcaatttcctgcgggaggtttcttgcatagcttccagctccaagaaaactcaaagacggtgcaagatcacataggaacactggatacagaaagcacccaggggaaaggcaagctctcctcaattcttggagtaatagaagcaggggaagggaggattgcagtgtatggtgattcaaattgtcttgacagtagtcacatggtaacaaactgctattggcttttgagaaaaatattggagttcactggaaacagagtgaaagataatgtccttttctcagaggcagcacagttaaagtttcctgtttttgagaatatccatcatccatcacgtagaacggatgtaaacttttcaacatactcaacagttgttggcaaggaattaatctgccaccaagattcccggtttgaggtttggggaacgaaaggctatggtgtccaaccaataggcacatcaagaaagcttccagagtaccagatgcatgaaagttctagttctcccaatgtaacaatacaaattgctggcagtagacaagataaagttgaaaggcttcaaagaaatctttcgataccaaatgctgctaaatttgatgataaaagagattattttggatttattggtcatgaggaggttgacataggaatgttaatggcaagccaatggatgataccttgcttcgctgccactgcttgccttatgttgtatcttagttgtagagtgcaacaaaaacgccgcagacgaaggaaggggtcggtggctagtgctaatcggctaacaagtatggtataattcgtcattcgcgcggtggtgctgaaaaggtttttttagcgtatctaagtttcaggcctccagccatgatggataaccaggaagcgccatctgcgcagcatgacagaattttagtagccagaaatccctggtagtgaagacacattttaactcggcaactagaggctgaacttgagagaaagctggctcgtcacttctgtggtcacatggaaagcagcttgtcttcccagattcagccattcgtggcatctactgctgttgcttgtagtcgctcacaattttgttcttcgccacacgtagttgtagccacaaaaatcgctgagagccaatatctagggtagaagctagagctagtcatttgtcatctccttggaatatgtgaaggagatttgagcttctctgtagatccatgagcaataaggggcagggggactcggcatgagcttggcaggtacaaaggaggcttaggcttattgggaactttgtaaagtaaattttgtattgttaatttaaaaaaaagaaccagg

SEQ ID NO: 82385 - DNA, 2735 bp, Zea Mays
cctactggtaccagtggtggcttgatcacttcaaattggagggactattgggccaaattcccatactgtaaaaaaaggtctgggagctcacagcaaacaacattattatggtatcagctattggaaatgatgggcctctatatggcacattaaacaacccagctgatcaaagcgatgttattggtgttggtggtattgattacaataaccatatagcttcattttcctctagaggcatgactacgtgggagcttcctcatggttatggtcgtgtgaaacctgatgttgttgcatacagtcgagatataattggatcaaagatcagcacaggctgtaagaccctttcaggcaccagtgtagcaagcccggtggttgctggcccttgtggagggtgcttctaaactttcaggaccaaacatgtatgaacaaggtgctggcaggcttgatctctggcagtcatatgaaatcttaaaaaattaccaaccacgtgcaagcatatttcctactatgcttgacttcaccgactgtccatatttctggcctttttgtcgtcaacctatgtatgctggagctatgccagtaatcttcaatgctacaatcctgaacgggatgggggtgattggttatgtaaaggatcaacctttatggcaaccttctgaggatattggcaatcttcttagtgttcacttcacctactcagatgtcatctggccctggacgggataccttgctctacatttgcaagttaaagatgagggttctcagttttcaggcataattagtggcaatgttactctgactatttataccccagcagctcatggagaaagcagcccacggagtagtacatgtattcttcacatgaaggtcaaggttgttccaacacctgttaggtcaaaaaggatactgtgggaccaatatcataatattaagtatccttcaggatatgttccaagggattcccttaatgttcataatgatatccttgactggcatggtgaccacttgcacacaaacttccacattctgttcaacatgctaagagatgcagagtactatattgagacacttggatcaccacttacttgctttgatgctagcaattatgggacattgcttatggttgatcttgaggacgaatactttgatgaagagattcagaaacttagggatgatgttatacacaagggacttggtattgctgtttttgctgagtggtaccatgttgatacaatggttaagatgacattctttgatgagaacacccggagttggtggactccaattactgggggtgcaaatattcctgcaattaatgaacttctggcaccatttggcattgctttgggggacaaaattcttactggtgacttctcaatcaatggtgagcagacccactatgcttctggaactgatatagtgcaatttcctgcgggaggtttcttgcatagcttccagctccaagaaaactcaaagacggtgcaagatcacataggaacactggatacagaaagcacccaggggaaaggcaagctctcctcaattcttggagtaatagaagcaggggaagggaggattgcagtgtatggtgattcaaattgtcttgacagtagtcacatggtaacaaactgctattggcttttgagaaaaatattggagttcactggaaacagagtgaaagataatgtccttttctcagaggcagcacagttaaagtttcctgtttttgagaatatccatcatccatcacgtagaacggatgtaaacttttcaacatactcaacagttgttggcaaggaattaatctgccaccaagattcccggtttgaggtttggggaacgaaaggctatggtgtccaaccaataggcacatcaagaaagcttccagagtaccagatgcatgaaagttctagttctcccaatgtaacaatacaaattgctggcagtagacaagataaagttgaaaggcttcaaagaaatctttcgataccaaatgctgctaaatttgatgataaaagagattattttggatttattggtcatgaggaggttgacataggaatgttaatggcaagccaatggatgataccttgcttcgctgccactgcttgccttatgttgtatcttagttgtagagtgcaacaaaaacgccgcagacgaaggaaggggtcggtggctagtgctaatcggctaacaagtatggtataattcgtcattcgcgcggtggtgctgaaaaggtttttttagcgtatctaagtttcaggcctccagccatgatggataaccaggaagcgccatctgcgcagcatgacagaattttagtagccagaaatccctggtagtgaagacacattttaactcggcaactagaggctgaacttgagagaaagctggctcgtcacttctgtggtcacatggaaagcagcttgtcttcccagattcagccattcgtggcatctactgctgttgcttgtagtcgctcacaattttgttcttcgccacacgtagttgtagccacaaaaatcgctgagagccaatatctagggtagaagctagagctagtcatttgtcatctccttggaatatgtgaaggagatttgagcttctctgtagatccatgagcaataaggggcagggggactcggcatgagcttggcaggtacaaaggaggcttaggcttattgggaactttgtaaagtaaattttgtattgttaatttaaaaaaaagaaccagg

SEQ ID NO: 82386 - DNA, 3048 bp, Zea Mays
cctgggtcccacatgagaggatccatgaaaaacctggagaaaggagcgcacaaattggacaaatgaagacacactaaacgacaaccttgggcatggaacatttgtagcaggagttattgctggccaagatgcagaatgccctggatttgcacctgatactgagatatatgcttttcgagtcttcacagatgctcagatatcttacacatcatggttcttggatgcatttaactacgcgatagctaccggtatggatgttttaaacttgagcatcggtggacctgattacctggatctcccctttgtggaaaaggtctgggagctcacagcaaacaacattattatggtatcagctattggaaatgatgggcctctatatggcacattaaacaacccagctgatcaaagcgatgttattggtgttggtggtattgattacaataaccatatagcttcattttcctctagaggcatgactacgtgggagcttcctcatggttatggtcgtgtgaaacctgatgttgttgcatacagtcgagatataattggatcaaagatcagcacaggctgtaagaccctttcaggcaccagtgtagcaagcccggtggttgctggtgtagtatgtttgcttgttagtgttatacctgaagacaagcggaaattgatcctcaaccctgctgctatgaaacaggcccttgtggagggtgcttctaaactttcaggaccaaacatgtatgaacaaggtgctggcaggcttgatctctggcagtcatatgaaatcttaaaaaattaccaaccacgtgcaagcatatttcctactatgcttgacttcaccgactgtccatatttctggcctttttgtcgtcaacctatgtatgctggagctatgccagtaatcttcaatgctacaatcctgaacgggatgggggtgattggttatgtaaaggatcaacctttatggcaaccttctgaggatattggcaatcttcttagtgttcacttcacctactcagatgtcatctggccctggacgggataccttgctctacatttgcaagttaaagatgagggttctcagttttcaggcataattagtggcaatgttactctgactatttataccccagcagctcatggagaaagcagcccacggagtagtacatgtattcttcacatgaaggtcaaggttgttccaacacctgttaggtcaaaaaggatactgtgggaccaatatcataatattaagtatccttcaggatatgttccaagggattcccttaatgttcataatgatatccttgactggcatggtgaccacttgcacacaaacttccacattctgttcaacatgctaagagatgcagagtactatattgagacacttggatcaccacttacttgctttgatgctagcaattatgggacattgcttatggttgatcttgaggacgaatactttgatgaagagattcagaaacttagggatgatgttatacacaagggacttggtattgctgtttttgctgagtggtaccatgttgatacaatggttaagatgacattctttgatgagaacacccggagttggtggactccaattactgggggtgcaaatattcctgcaattaatgaacttctggcaccatttggcattgctttgggggacaaaattcttactggtgacttctcaatcaatggtgagcagacccactatgcttctggaactgatatagtgcaatttcctgcgggaggtttcttgcatagcttccagctccaagaaaactcaaagacggtgcaagatcacataggaacactggatacagaaagcacccaggggaaaggcaagctctcctcaattcttggagtaatagaagcaggggaagggaggattgcagtgtatggtgattcaaattgtcttgacagtagtcacatggtaacaaactgctattggcttttgagaaaaatattggagttcactggaaacagagtgaaagataatgtccttttctcagaggcagcacagttaaagtttcctgtttttgagaatatccatcatccatcacgtagaacggatgtaaacttttcaacatactcaacagttgttggcaaggaattaatctgccaccaagattcccggtttgaggtttggggaacgaaaggctatggtgtccaaccaataggcacatcaagaaagcttccagagtaccagatgcatgaaagttctagttctcccaatgtaacaatacaaattgctggcagtagacaagataaagttgaaaggcttcaaagaaatctttcgataccaaatgctgctaaatttgatgataaaagagattattttggatttattggtcatgaggaggttgacataggaatgttaatggcaagccaatggatgataccttgcttcgctgccactgcttgccttatgttgtatcttagttgtagagtgcaacaaaaacgccgcagacgaaggaaggggtcggtggctagtgctaatcggctaacaagtatggtataattcgtcattcgcgcggtggtgctgaaaaggtttttttagcgtatctaagtttcaggcctccagccatgatggataaccaggaagcgccatctgcgcagcatgacagaattttagtagccagaaatccctggtagtgaagacacattttaactcggcaactagaggctgaacttgagagaaagctggctcgtcacttctgtggtcacatggaaagcagcttgtcttcccagattcagccattcgtggcatctactgctgttgcttgtagtcgctcacaattttgttcttcgccacacgtagttgtagccacaaaaatcgctgagagccaatatctagggtagaagctagagctagtcatttgtcatctccttggaatatgtgaaggagatttgagcttctctgtagatccatgagcaataaggggcagggggactcggcatgagcttggcaggtacaaaggaggcttaggcttattgggaactttgtaaagtaaattttgtattgttaatttaaaaaaaagaaccagg

SEQ ID NO: 82387 - DNA, 3557 bp, Zea Mays
ctcctgtctcctcccctgcccgcggtcccgcacccacgcgttgccggcgaccagccgcccatttccggcggctatccatctagccgccgccgcttcccgtgatggagaagcggctagcgtacgcggccttgctcccactgctcctcctcacgctccgcatcctccccctgccctccggctcccccaactgcagcggcggcgagggggaaaccccgcccgcgtccaggcacgtggtgcggttcctggagtaccgccgcgcggaggagcaccgggagtacctggacgcggggctccgtgacggcgcccccgcggcggcgtggcgctgggtggagcggcggaaccccgcggccgcgttccctaccgacttcgcggtgctcgagatccgcgacgcgcaccgcgaggccgtcgtggcggcggtgcgggcgctcggccgcgtgcgggacgtgcacgccgacgccacctactcgcgctccgccctttcggcggcgccggatcggtcgcgtcctccccggcgggggaagctgttcaccgccatgtcgttcgagggcgaggaggagggtggcggagagaccggcaattcgtcttctgctgcctgggggcggaagcttcttctgcagagatcacaagttacatccctttttggagctgaacggttatggggaagaggcttcactggcaagaaagtcaaaatggccatttttgacactggtattcgggccgatcatccacattttcgcaatattaaggagcgcacaaattggacaaatgaagacacactaaacgacaaccttgggcatggaacatttgtagcaggagttattgctggccaagatgcagaatgccctggatttgcacctgatactgagatatatgcttttcgagtcttcacagatgctcaggtctgggagctcacagcaaacaacattattatggtatcagctattggaaatgatgggcctctatatggcacattaaacaacccagctgatcaaagcgatgttattggtgttggtggtattgattacaataaccatatagcttcattttcctctagaggcatgactacgtgggagcttcctcatggttatggtcgtgtgaaacctgatgttgttgcatacagtcgagatataattggatcaaagatcagcacaggctgtaagaccctttcaggcaccagtgtagcaagcccggtggttgctggcccttgtggagggtgcttctaaactttcaggaccaaacatgtatgaacaaggtgctggcaggcttgatctctggcagtcatatgaaatcttaaaaaattaccaaccacgtgcaagcatatttcctactatgcttgacttcaccgactgtccatatttctggcctttttgtcgtcaacctatgtatgctggagctatgccagtaatcttcaatgctacaatcctgaacgggatgggggtgattggttatgtaaaggatcaacctttatggcaaccttctgaggatattggcaatcttcttagtgttcacttcacctactcagatgtcatctggccctggacgggataccttgctctacatttgcaagttaaagatgagggttctcagttttcaggcataattagtggcaatgttactctgactatttataccccagcagctcatggagaaagcagcccacggagtagtacatgtattcttcacatgaaggtcaaggttgttccaacacctgttaggtcaaaaaggatactgtgggaccaatatcataatattaagtatccttcaggatatgttccaagggattcccttaatgttcataatgatatccttgactggcatggtgaccacttgcacacaaacttccacattctgttcaacatgctaagagatgcagagtactatattgagacacttggatcaccacttacttgctttgatgctagcaattatgggacattgcttatggttgatcttgaggacgaatactttgatgaagagattcagaaacttagggatgatgttatacacaagggacttggtattgctgtttttgctgagtggtaccatgttgatacaatggttaagatgacattctttgatgagaacacccggagttggtggactccaattactgggggtgcaaatattcctgcaattaatgaacttctggcaccatttggcattgctttgggggacaaaattcttactggtgacttctcaatcaatggtgagcagacccactatgcttctggaactgatatagtgcaatttcctgcgggaggtttcttgcatagcttccagctccaagaaaactcaaagacggtgcaagatcacataggaacactggatacagaaagcacccaggggaaaggcaagctctcctcaattcttggagtaatagaagcaggggaagggaggattgcagtgtatggtgattcaaattgtcttgacagtagtcacatggtaacaaactgctattggcttttgagaaaaatattggagttcactggaaacagagtgaaagataatgtccttttctcagaggcagcacagttaaagtttcctgtttttgagaatatccatcatccatcacgtagaacggatgtaaacttttcaacatactcaacagttgttggcaaggaattaatctgccaccaagattcccggtttgaggtttggggaacgaaaggctatggtgtccaaccaataggcacatcaagaaagcttccagagtaccagatgcatgaaagttctagttctcccaatgtaacaatacaaattgctggcagtagacaagataaagttgaaaggcttcaaagaaatctttcgataccaaatgctgctaaatttgatgataaaagagattattttggatttattggtcatgaggaggttgacataggaatgttaatggcaagccaatggatgataccttgcttcgctgccactgcttgccttatgttgtatcttagttgtagagtgcaacaaaaacgccgcagacgaaggaaggggtcggtggctagtgctaatcggctaacaagtatggtataattcgtcattcgcgcggtggtgctgaaaaggtttttttagcgtatctaagtttcaggcctccagccatgatggataaccaggaagcgccatctgcgcagcatgacagaattttagtagccagaaatccctggtagtgaagacacattttaactcggcaactagaggctgaacttgagagaaagctggctcgtcacttctgtggtcacatggaaagcagcttgtcttcccagattcagccattcgtggcatctactgctgttgcttgtagtcgctcacaattttgttcttcgccacacgtagttgtagccacaaaaatcgctgagagccaatatctagggtagaagctagagctagtcatttgtcatctccttggaatatgtgaaggagatttgagcttctctgtagatccatgagcaataaggggcagggggactcggcatgagcttggcaggtacaaaggaggcttaggcttattgggaactttgtaaagtaaattttgtattgttaatttaaaaaaaagaaccagg

SEQ ID NO: 82388 - DNA, 3701 bp, Zea Mays
ggagtagttgccgattctgcctctcctgtctcctcccctgcccgcggtcccgcacccacgcgttgccggcgaccagccgcccatttccggcggctatccatctagccgccgccgcttcccgtgatggagaagcggctagcgtacgcggccttgctcccactgctcctcctcacgctccgcatcctccccctgccctccggctcccccaactgcagcggcggcgagggggaaaccccgcccgcgtccaggcacgtggtgcggttcctggagtaccgccgcgcggaggagcaccgggagtacctggacgcggggctccgtgacggcgcccccgcggcggcgtggcgctgggtggagcggcggaaccccgcggccgcgttccctaccgacttcgcggtgctcgagatccgcgacgcgcaccgcgaggccgtcgtggcggcggtgcgggcgctcggccgcgtgcgggacgtgcacgccgacgccacctactcgcgctccgccctttcggcggcgccggatcggtcgcgtcctccccggcgggggaagctgttcaccgccatgtcgttcgagggcgaggaggagggtggcggagagaccggcaattcgtcttctgctgcctgggggcggaagcttcttctgcagagatcacaagttacatccctttttggagctgaacggttatggggaagaggcttcactggcaagaaagtcaaaatggccatttttgacactggtattcgggccgatcatccacattttcgcaatattaaggagcgcacaaattggacaaatgaagacacactaaacgacaaccttgggcatggaacatttgtagcaggagttattgctggccaagatgcagaatgccctggatttgcacctgatactgagatatatgcttttcgagtcttcacagatgctcagtgcagatatcttacacatcatggttcttggatgcatttaactacgcgatagctaccggtatggatgttttaaacttgagcatcggtggacctgattacctggatctcccctttgtggaaaaggtctgggagctcacagcaaacaacattattatggtatcagctattggaaatgatgggcctctatatggcacattaaacaacccagctgatcaaagcgatgttattggtgttggtggtattgattacaataaccatatagcttcattttcctctagaggcatgactacgtgggagcttcctcatggttatggtcgtgtgaaacctgatgttgttgcatacagtcgagatataattggatcaaagatcagcacaggctgtaagaccctttcaggcaccagtgtagcaagcccggtggttgctggcccttgtggagggtgcttctaaactttcaggaccaaacatgtatgaacaaggtgctggcaggcttgatctctggcagtcatatgaaatcttaaaaaattaccaaccacgtgcaagcatatttcctactatgcttgacttcaccgactgtccatatttctggcctttttgtcgtcaacctatgtatgctggagctatgccagtaatcttcaatgctacaatcctgaacgggatgggggtgattggttatgtaaaggatcaacctttatggcaaccttctgaggatattggcaatcttcttagtgttcacttcacctactcagatgtcatctggccctggacgggataccttgctctacatttgcaagttaaagatgagggttctcagttttcaggcataattagtggcaatgttactctgactatttataccccagcagctcatggagaaagcagcccacggagtagtacatgtattcttcacatgaaggtcaaggttgttccaacacctgttaggtcaaaaaggatactgtgggaccaatatcataatattaagtatccttcaggatatgttccaagggattcccttaatgttcataatgatatccttgactggcatggtgaccacttgcacacaaacttccacattctgttcaacatgctaagagatgcagagtactatattgagacacttggatcaccacttacttgctttgatgctagcaattatgggacattgcttatggttgatcttgaggacgaatactttgatgaagagattcagaaacttagggatgatgttatacacaagggacttggtattgctgtttttgctgagtggtaccatgttgatacaatggttaagatgacattctttgatgagaacacccggagttggtggactccaattactgggggtgcaaatattcctgcaattaatgaacttctggcaccatttggcattgctttgggggacaaaattcttactggtgacttctcaatcaatggtgagcagacccactatgcttctggaactgatatagtgcaatttcctgcgggaggtttcttgcatagcttccagctccaagaaaactcaaagacggtgcaagatcacataggaacactggatacagaaagcacccaggggaaaggcaagctctcctcaattcttggagtaatagaagcaggggaagggaggattgcagtgtatggtgattcaaattgtcttgacagtagtcacatggtaacaaactgctattggcttttgagaaaaatattggagttcactggaaacagagtgaaagataatgtccttttctcagaggcagcacagttaaagtttcctgtttttgagaatatccatcatccatcacgtagaacggatgtaaacttttcaacatactcaacagttgttggcaaggaattaatctgccaccaagattcccggtttgaggtttggggaacgaaaggctatggtgtccaaccaataggcacatcaagaaagcttccagagtaccagatgcatgaaagttctagttctcccaatgtaacaatacaaattgctggcagtagacaagataaagttgaaaggcttcaaagaaatctttcgataccaaatgctgctaaatttgatgataaaagagattattttggatttattggtcatgaggaggttgacataggaatgttaatggcaagccaatggatgataccttgcttcgctgccactgcttgccttatgttgtatcttagttgtagagtgcaacaaaaacgccgcagacgaaggaaggggtcggtggctagtgctaatcggctaacaagtatggtataattcgtcattcgcgcggtggtgctgaaaaggtttttttagcgtatctaagtttcaggcctccagccatgatggataaccaggaagcgccatctgcgcagcatgacagaattttagtagccagaaatccctggtagtgaagacacattttaactcggcaactagaggctgaacttgagagaaagctggctcgtcacttctgtggtcacatggaaagcagcttgtcttcccagattcagccattcgtggcatctactgctgttgcttgtagtcgctcacaattttgttcttcgccacacgtagttgtagccacaaaaatcgctgagagccaatatctagggtagaagctagagctagtcatttgtcatctccttggaatatgtgaaggagatttgagcttctctgtagatccatgagcaataaggggcagggggactcggcatgagcttggcaggtacaaaggaggcttaggcttattgggaactttgtaaagtaaattttgtattgttaatttaaaaaaaagaaccagg

SEQ ID NO: 82389 - DNA, 3871 bp, Zea Mays
cgaaaaacgtctccggagtccggagtagttgccgattctgcctctcctgtctcctcccctgcccgcggtcccgcacccacgcgttgccggcgaccagccgcccatttccggcggctatccatctagccgccgccgcttcccgtgatggagaagcggctagcgtacgcggccttgctcccactgctcctcctcacgctccgcatcctccccctgccctccggctcccccaactgcagcggcggcgagggggaaaccccgcccgcgtccaggcacgtggtgcggttcctggagtaccgccgcgcggaggagcaccgggagtacctggacgcggggctccgtgacggcgcccccgcggcggcgtggcgctgggtggagcggcggaaccccgcggccgcgttccctaccgacttcgcggtgctcgagatccgcgacgcgcaccgcgaggccgtcgtggcggcggtgcgggcgctcggccgcgtgcgggacgtgcacgccgacgccacctactcgcgctccgccctttcggcggcgccggatcggtcgcgtcctccccggcgggggaagctgttcaccgccatgtcgttcgagggcgaggaggagggtggcggagagaccggcaattcgtcttctgctgcctgggggcggaagcttcttctgcagagatcacaagttacatccctttttggagctgaacggttatggggaagaggcttcactggcaagaaagtcaaaatggccatttttgacactggtattcgggccgatcatccacattttcgcaatattaaggagcgcacaaattggacaaatgaagacacactaaacgacaaccttgggcatggaacatttgtagcaggagttattgctggccaagatgcagaatgccctggatttgcacctgatactgagatatatgcttttcgagtcttcacagatgctcagatatcttacacatcatggttcttggatgcatttaactacgcgatagctaccggtatggatgttttaaacttgagcatcggtggacctgattacctggatctcccctttgtggaaaaggtctgggagctcacagcaaacaacattattatggtatcagctattggaaatgatgggcctctatatggcacattaaacaacccagctgatcaaagcgatgttattggtgttggtggtattgattacaataaccatatagcttcattttcctctagaggcatgactacgtgggagcttcctcatggttatggtcgtgtgaaacctgatgttgttgcatacagtcgagatataattggatcaaagatcagcacaggctgtaagaccctttcaggcaccagtgtagcaagcccggtggttgctggtgtagcccttgtggagggtgcttctaaactttcaggaccaaacatgtatgaacaaggtgctggcaggcttgatctctggcagtcatatgaaatcttaaaaaattaccaaccacgtgcaagcatatttcctactatgcttgacttcaccgactgtccatatttctggcctttttgtcgtcaacctatgtatgctggagctatgccagtaatcttcaatgctacaatcctgaacgggatgggggtgattggttatgtaaaggatcaacctttatggcaaccttctgaggatattggcaatcttcttagtgttcacttcacctactcagatgtcatctggccctggacgggataccttgctctacatttgcaagttaaagatgagggttctcagttttcaggcataattagtggcaatgttactctgactatttataccccagcagctcatggagaaagcagcccacggagtagtacatgtattcttcacatgaaggtcaaggttgttccaacacctgttaggtcaaaaaggatactgtgggaccaatatcataatattaagtatccttcaggatatgttccaagggattcccttaatgttcataatgatatccttgactggcatggtgaccacttgcacacaaacttccacattctgttcaacatgctaagagatgcagagtactatattgagacacttggatcaccacttacttgctttgatgctagcaattatgggacattgcttatggttgatcttgaggacgaatactttgatgaagagattcagaaacttagggatgatgttatacacaagggacttggtattgctgtttttgctgagtggtaccatgttgatacaatggttaagatgacattctttgatgagaacacccggagttggtggactccaattactgggggtgcaaatattcctgcaattaatgaacttctggcaccatttggcattgctttgggggacaaaattcttactggtgacttctcaatcaatggtgagcagacccactatgcttctggaactgatatagtgcaatttcctgcgggaggtttcttgcatagcttccagctccaagaaaactcaaagacggtgcaagatcacataggaacactggatacagaaagcacccaggggaaaggcaagctctcctcaattcttggagtaatagaagcaggggaagggaggattgcagtgtatggtgattcaaattgtcttgacagtagtcacatggtaacaaactgctattggcttttgagaaaaatattggagttcactggaaacagagtgaaagataatgtccttttctcagaggcagcacagttaaagtttcctgtttttgagaatatccatcatccatcacgtagaacggatgtaaacttttcaacatactcaacagttgttggcaaggaattaatctgccaccaagattcccggtttgaggtttggggaacgaaaggctatggtgtccaaccaataggcacatcaagaaagcttccagagtaccagatgcatgaaagttctagttctcccaatgtaacaatacaaattgctggcagtagacaagataaagttgaaaggcttcaaagaaatctttcgataccaaatgctgctaaatttgatgataaaagagattattttggatttattggtcatgaggaggttgacataggaatgttaatggcaagccaatggatgataccttgcttcgctgccactgcttgccttatgttgtatcttagttgtagagtgcaacaaaaacgccgcagacgaaggaaggggtcggtggctagtgctaatcggctaacaagcctccagccatgatggataaccaggaagcgccatctgcgcagcatgacagaattttagtagccagaaatccctggtagtgaagacacattttaactcggcaactagaggctgaacttgagagaaagctggctcgtcacttctgtggtcacatggaaagcagcttgtcttcccagattcagccattcgtggcatctactgctgttgcttgtagtcgctcacaattttgttcttcgccacacgtagttgtagccacaaaaatcgctgctaagggctagtttgatgaccagagatcacgagaggatccataaatagcaatgggattcctctgacatggatctcctcgtcatccctggccaccaaattagcccttagatcatggagatcggaagggattgagagcaaaattagttcatttctcatcaatctcttccaatctctcccaatcttccgtgatcccctttgtcactaaatcaaccctaagagccaatatctagggtagaagctagagctagtcatttgtcatctccttggaatatgtgaaggagatttgagcttctctgtagatccatgagcaataaggggcagggggactcggcatgagcttggcaggtacaaaggaggcttaggcttattgggaactttgtaaagtaaattttgtattgttaatttaaaaaaaagaaccagg

SEQ ID NO: 82390 - DNA, 1501 bp, Zea Mays
gccccccggcctttctgtgctcgttactgctcgctctcgctctccccttccgcctcttttagtgctgcgctgccgatgcggtgcccagcgagccaggcacggaggaggcgcgtgctctgctccactccacctccccccccccccccccccctgcgccactgacgccgctcgttcgcgcagttttggtcttctggccagcagggcagggggggaacccgcgggagcgaggcgcgcgagcgagcgagcggagggaggaggaggatgatgcacgccaagtcggagtcggacgtgacgagcctggcgtcgtcgcgccgcggtcgccgaagcggggcgttcgcggcggcaccggcggcggcggcggcggctactacgtgcagagcccgtcgcgggagtcgcacgacggcggcggcggcgggtacaagtcgtcgtcgatgcaggccacgccggtgtacaacaacagccccagcgagtcgccgtcgcacccctctacggccgccactcccgctcctcctccgtcagcgcttctccggcggctcgcgggggcggcggcggcgggcgcaaggtgctcaacgacaagggctggcccgagtgcagcgtcatcgaggaggaagggccctacgagggcctcggcgccggggacagcggcctctcccgccgctgccagatcgtgctcggcttcctcaccttcgtcctcctcttcaccgtcttctgcctcgtcatctggggcgccgcccgcccgtacgagcccgaggtcgtcgtcaagagcctggtgatggacgacttctacgctggtgaaggcacagaccacagcggcgttccgaccaaattggtcacgacgaactgttcgctgcacgtatcggtgtacaaccctgccacaatgtttgggatccatgtcacctccggccccatccgtctgatctattcagagatctcaatagcagtcggccaggtactaccagccgaggaagagccaccggacggtgacggcggtgatccacggcgagaaggtgccgctgtacggcgccgggggcggcctgacgctgtccacgagcgcgggcgggggggcggtgcccctgacgctggacttcgacctcacctcccggggctacgtgatcggcaggctcgtgcgggtgacgcacagggcgcacgtgacgtgccccgtcgtcgtggacgccaggaggaccaagcctgtcaggttctccaagaaggcgtgcgccgtgtacaaggcctgagcttgagagctcgtgaaacctgtgatcgaccgagcgttagcaatgcgtgttcttgcaaagatgtagctattgtgttgatggtgaagaacaataagcgcacacgtatggtcttgtcgatatatcgcgctgtaaaggcctgttgttcttgtgtgtgtatccctttttcagggcatgatcgtagagatggaagatgacttaccatgacaattttcctatacctttataacttcaaatttttttattcagggctgttattcttagcagacaaa

SEQ ID NO: 82391 - DNA, 2007 bp, Zea Mays
ctagcctgcagatttttttattggtcgcttattcatattattgagataagataatctatagcttcagtaacatcaacagccaacaaactttgtcaagataacctgctaatatgttgggggttttttggataaaaatatgttcataagactgtcgtagcattgaactgtgaatatagtggcagtgatctgttccaagcttagaaagagcatcgttagtcataagagaatatctttgttctgttactccagatgagaaattgtctcgaatattgcaggatagctacatatcattgcactaaatatatcagattactaaatccacccaccagccatatacagcactagcactactgtaaaacaaagaaaaacagtaaaacacacaaccttaaaccctctacatgataatattattgggaaaataaaagaatggatggtacctctatccagagtataactttaagccacaaaagataattacaatggtaatagttttaagtgaatcatagctaaaaatttaccattcgttcagattcaatacgcttcaaacgctcatcagaagcttccttcttgagtattgcagcttgttctgttgcttttcgaaatttaagaaggttattttctgattggaaatttccctgaaaagacaattaaaatattatcatttagtatagtgcaatttaattggaacattgcatccttcctaaaaatagctttcactttaactccatatgtgaatgttgcccctcggttactatttgtagacctacttaaacttagggcatggcggagtaaaggtaagggcatgaaacaatcaattgtgcattaaaacacattgccatgcaatcaccatttgtgcatcatttagacataagcttgagcacatcagaaacagataaatagaagtatatgtggatggagctgggtgttcgaaaatacaagtgacaaggtacagatttattatcccaatagaggctgtgtaaggtttttaagtgctccttcttaagttgcacgttgctagtaaaagtacagtttctgtgttatccacatgtgttgcacaaaggatttctagccacagtaaaccagaaaagcaagacatgtagtatgcaaaaataatacaaacaagcaatcgtggaaatggaagactcttctgaagagaggaactagacttgccaacatatctttcaagtcctcaagctcaacatcacccccattagccctcttaatgcatgctgcacatcttattcgaccaaaaacaatgtcaatttaggttatctcacgattcaagaagggcggaagagaactggaaagctaccttcttaagccatcaagaacctccagattatttgggtcgtacgtcaaaccctctaggtaagttgccatagcattttcataattttccatcaggaactgaactttagctttacgcacgtagccctttataaaagttggatccagttcaacacatttctctgcatcctcaagaccttgagggaaagctcccagatagatgtggcattgagctctgttgctaaatgcctgaaagatcagtgataagtaacaaaactaattgttacaaccaggagtgcaaaagaaaaaggggccagctccagaacatgcctttacagtgaacaatgaatgccaagtgtgactgattatagatagggaaatttggatccataccattaaaagatcaccactttggatccataccattactatctcacttacatgtgggtccacatgagtcaatgacatgtggggtccatggtatatatctaaagtttggaccttttaatggtatagatccaattgttccttatagataatgttctagttttttaccaatgcaaatctaatttatcagcaaagtttctaatgtcagaaaaagtactagtttactatgggtctggagttaccgtttcttgagaatgaaaatcagaggaatgaccaatatgcttactcttggatcctttgggttcattttcatagctcgtgtgtagtgcgttg

SEQ ID NO: 82392 - DNA, 827 bp, Zea Mays
agacgctggagcgataccgcagctgcagctttgcatccgaagcatcagctccactagaggccgaattaaataattatcaggagtacttgaagttaaagacaagagttgagttcttacaaacaactcagagaaatctacttggtgaggacttgggtccacttagcgtgaaggagttagagcaacttgagaaccaaattgagatctctctcaagcaaatccgatcatcaaagaaccagcagatgctcgaccagctctttgatctcaagcgcaagtgcaggaacaacaactgcaagatgctaacaaagatttaagaatgaagatagaagaaactagtgaagaaaatgtgctgcgactgtctagccaggatattgggtgtagtggatctagtgggcatggtgatgaagccaaccaagaacaccttcaacttgctcttgatccttcgctgcatatagggtatcaagcttacatggaccacctgaacaatgattaagttgcttctttgtgcgctgtgtgctctagtggccatggatcttctatatatgttggacgtaatgcttttgataaatcctctatatataaccatatcggtcctagctttatgcatgctactgtatgtactaaactaagaagccctacgacttctgttgaggaagaatgttctgacgatcatgactttcttgctaaataataactactgtatctcattttgaattgatcgtctactgaagagccatgcttttgtgagtacttagcaactaatatgtgataacgctctctgatcatgtgattagtgccttgttacacatttataaggtgtttggtttgag

SEQ ID NO: 82393 - DNA, 887 bp, Zea Mays
aagcacaggagacctccgtcgtcgctgtgttctctctctacgcaggccgatggacagcatctacaagacgctggagcgataccgcagctgcagctttgcatccgaagcatcagctccactagaggccgaattaaataattatcaggagtacttgaagttaaagacaagagttgagttcttacaaacaactcagagaaatctacttggtgaggacttgggtccacttagcgtgaaggagttagagcaacttgagaaccaaattgagatctctctcaagcaaatccgatcatcaaagaaccagcagatgctcgaccagctctttgatctcaagcgcaaggaacaacaactgcaagatgctaacaaagatttaagaatgaagatagaagaaactagtgaagaaaatgtgctgcgactgtctagccaggatattgggtgtagtggatctagtgggcatggtgatgaagccaaccaagaacaccttcaacttgctcttgatccttcgctgcatatagggtatcaagcttacatggaccacctgaacaatgattaagttgcttctttgtgcgctgtgtgctctagtggccatggatcttctatatatgttggacgtaatgcttttgataaatcctctatatataaccatatcggtcctagctttatgcatgctactgtatgtactaaactaagaagccctacgacttctgttgaggaagaatgttctgacgatcatgactttcttgctaaataataactactgtatctcattttgaattgatcgtctactgaagagccatgcttttgtgagtacttagcaactaatatgtgataacgctctctgatcatgtgattagtgccttgttacacatttataaggtgtttggtttgag

SEQ ID NO: 82394 - DNA, 920 bp, Zea Mays
ctcgcagcagcggcacgcgtgacgcgtgcgagcgagaggacggcgtccagaaaacagccgctgccacgtgggccatcccagaccatgcagcatctacaagacgctggagcgataccgcagctgcagctttgcatccgaagcatcagctccactagaggccgaattaaataattatcaggagtacttgaagttaaagacaagagttgagttcttacaaacaactcagagaaatctacttggtgaggacttgggtccacttagcgtgaaggagttagagcaacttgagaaccaaattgagatctctctcaagcaaatccgatcatcaaagaaccagcagatgctcgaccagctctttgatctcaagcgcaaggaacaacaactgcaagatgctaacaaagatttaagaatgaagatagaagaaactagtgaagaaaatgtgctgcgactgtctagccaggatattgggtgtagtggatctagtgggcatggtgatgaagccaaccaagaacaccttcaacttgctcttgatccttcgctgcatatagggtatcaagcttacatggaccacctgaacaatgattaagttgcttctttgtgcgctgtgtgctctagtggccatggatcttctatatatgttggacgtaatgcttttgataaatcctctatatataaccatatcggtcctagctttatgcatgctactgtatgtactaaactaagaagccctacgacttctgttgaggaagaatgttctgacgatcatgactttcttgctaaataataactactgtatctcattttgaattgatcgtctactgaagagccatgcttttgtgagtacttagcaactaatatgtgataacgctctctgatcatgtgattagtgccttgttacacatttataaggtgtttggtttgag

SEQ ID NO: 82395 - DNA, 386 bp, Zea Mays
ctctctctacgcaggccgatggacaggtgaacagagaccggccggaaggggagaggacgggagaaagagagagactttcactgtaaacagacagacttgcgttgcgagagaggagacggagagtcagagaccgagagagggacgatagaaggcataggagctaggagcgatgaccgtacgcgcatatactaggagcagcaaattaaaggcatatataggcaaatagtagtagtagcgagtagcgacgggcgagagagaaagcagtgctactgctacgactactccttagctcgtacccgggtagaaagtgacgagagagagagagaaagggggagagagatcttgatctagttctagtaaactgctagcagtgaacagggcggtgg

SEQ ID NO: 82396 - DNA, 555 bp, Zea Mays
aaggattcactactagtaagctcttctgcaaaatgagtccttgattattgcttagccttaccttgactccctctagccagcatacccttgagagtcttttctttagtcgggtaagtcttgctgagtaattgcgtactcagggttttattccctgttgtttttcaggtcatagttttgtgctgctgatggtggtgttaagtgccggtgggctcgaccttcttataagtttaaccgaactatcttctccctcggatcccttcgagtcactggccgaccccgaagcaaaaaaggaagatgaaattactaagatggccgaagctattatggacgaagctgttactcgactactaaacgaggctgcagaagcagttttaaaagaagaatggctattattgtaaaaacatttggaatattaatgtaatatttgctgaacaaagtgtgtaatattttgtagttttgaatgtaatatataaactgtttgtaatttaattctttacgatgcatgaaactttacgtacatatcgtttttgagccttcggcgaaaaaacaccttcc

SEQ ID NO: 82397 - DNA, 372 bp, Zea Mays
tcgtcaagcggacatcgtctaacaaacactaacgtagtgttattccagccgaactatcttctccctcggatcccttcgagtcactggccgaccccgaagcaaaaaaggaagatgaaattactaagatggccgaagctattatggacgaagctgttactcgactactaaacgaggctgcagaagcagttttaaaagaagaatggctattattgtaaaaacatttggaatattaatgtaatatttgctgaacaaagtgtgtaatattttgtagttttgaatgtaatatataaactgtttgtaatttaattctttacgatgcatgaaactttacgtacatatcgtttttgagccttcggcgaaaaaacaccttcc

SEQ ID NO: 82398 - DNA, 1822 bp, Zea Mays
cgaaccgaagggacaatcgagcagagtctagactcgagaccaaccttgacctcccggatctctctcccacccacgccttgtcgccgccgtcttctgctgcactgcagcgatggcctcccccgacctgctcttcaatctttggaacctcttctacctgggcgcctatcaggcaaccattaacatcgacgtcccgggcctcgacgccgctgccgccgctgagcgcgacgccatcgtcttccgctcctacatcgccctcggctcctaccagctagagaagaatactcgcagggctagcaagaggaggcctatggagataagcacgaaagtgcggccaccgaaattgagggaggtgatacaggttcccaaaaaggttggaagggatccaagatttgagcctgcttatggatttgttgacaaagaaggctgtaagcttgatgaattcttgacacttatcgatttggttggtatgcagagactccaaaaaatgattaagaaatctaaggacctagatgccattggagaaatgaagagtcgtgtcacatggattaacgttgaatcggaaatcttgcgtgagcatatcaagaaagagagggaggcagcaaaggctggaaaacgaccatactatctgaagaagcctgaatttcgcgaaaggaagctgatgaacaagtacaatgagctcaaggaagaatgcctccaaagatcatcggttcatgccgtaccgacgctcggcaacaacgagctgcgcggccgcctccccgccggcctctccggcctccgcgacctgcagtacctgatcttggagaacaaccccatgggcggcgtcccgctgccgcccgagctgggcaacatccccaggctccaggagctccggctggccaactccggctactcgggccccataccggacacgttcggcctcctgtccagcctcaccacgctgtcgctggagaacaacaacctcaccgggcggatcccgccggggctcagccgtctcaagcgcatgtaccacctcaacctgagcaagaacgggctggacggcgtcgtccctttcgacgccgcgttcctcaggcggctcggccggaacctggacctgagcggcaacccggggctgtgcgtcaccgaccgggccgtcatgccgggcgtgggcgtcggagtctgcggcgacgacgtcgtcgactgcgaacggtccgccgccgcggagagctcggtcgtcgggagagtggtcaggggagaggccggcagggcgcaggcgcgccgccgagcaggggcggctccggtcgcgctcgtcgagcaggggagcagaggcggctccgtcgagcaggagcgcaggggcgactccgccgagcaggggcgcaggggcgcaggggcggctctggtgaccgtcgcgctcgcgcaaggacgcaggggcgcagccgcgcaggccgcaggggctgctccggtcgcggtcacgctggagctgggggcctcctggccgcctgggaggctgagacggcagacggacggggacgggacacggccacacgggacgggagcaagaggactcggcgttttagggtttctaggcaacagggcaagtcggcaatggcaagacctaaagctaaatggaaatgggccgcgccttaggcccattcgccatggacaagtgcgctgccggcctgccgctgccgaggccgtggaggcagccatttcgggccttttcgtgcctattaacgggccatttcggatctgtttaaacgggtcgggctcgtgcccgcccgtgggcctcggcgtcggccaaaacacggcccgatgcatcgggcctggccggcccgacccaaaataa

SEQ ID NO: 82399 - DNA, 667 bp, Zea Mays
ctcgttgctaaacatacggaaactggagaaaacatatgcaagcatccaagggccagagaacatattctcgcagagctcaccaagatcgccaaggacaagaagctgaaaggctttgaggccataaaggctgtccatctcgaccctctgccgtttgacatcgagcgcgacctcatcaccccgacgtacaagaagaaacggccgcagatgctcaaacactaccagggagtaatcgacgcgctctacaagggcatgaagtgagacggcacgtttgcagagtcgcaaggggtactgttgtgaattgtgatgcacatatttgtctatatgttgtttcagtatctgtggtgtgtggagtcactcggaaggttgtgtattgttgtattgagataaggggaatataaataaaataaaaattagtttgggtacgcaacgcgcggtggagagcgtgcgcacaggctttttgagctggacagtttgtattgaaattacataagcgatcagacaacgttaagcgctaggcactgggctgaccaagattaactcagctgagggtattaaatatctctctagtcaaaattgaatagaagacgatttaatccctatcaatcctctttatcaagacggacagatatgtttgtttgattttaatctgtattggtttctactgttt

SEQ ID NO: 82400 - DNA, 1418 bp, Zea Mays
ggacagcgaacgcgaccaaaccaagccatggcagccaaccccaaccactgcctccgccgcctcgcctcagctctctcccacggtccccggcctccgactcctcccgcgtccctcctcttcccccgcctcgcgctctccagctccggcccctccacgggcccgacgccgccgccgccggatgccgtaaggaagggggagggagaggaagcggcggaagccagggccgccgaagccgaagccgaagcggggaaggaggaggagcatgaggacgacggcggcgcgcacgtgagcaaggccaccggcgaggtcggcggcccgcgggggcccgagcccacgaggtacggtgactgggagcgcgccggccgctgctccgatttctgaaccgccgctggccgcgaggtgaggccgtcagcgtcagcacggaacctgtggatgtggttccgtatcgtactgttggatttgtctgtcgtgtgctagtagtgtgcctgttgtcacctgtgcaaagggcggcgttaaatttgcgttttgcttcgtcttctggggaataaacagagttgacagtactcggctcaaaaagttcagatcgactcagttgttgttgttttttttttttgccttgatttttcatctcgctcagctcgagtgagcaggttctgttgttaggttgcctgatcttggttatcaccggacgtaatgaaacaatggaacgcagtgcacacatcattgtgacttcttagaattccgcacaagcaaaggatgaaagttccttcttccctggttcccggtttggagttgcgaattgggattactgtttgtagcgttgtttcagatcgaggctatttgtagcgctgtttcagattggggaaccgaaggctgttgatagtagatgcgatagaggaccagatgctgtatgtagtgttctttaatttggatgattcatcagatgttatttagctatctgcaatggcaaatcttggatgtttggatatgtaacaaccgggtaaagctgtacccttgacactgtcaatacgtcttccaaaaaggctcgaggaggacctggctgatcaggggcgaacctatccattttaggggtgcatcatcacctaaaaaacacagaactagtagttataataagtaaatgttgaccttatatacacttctatttaaaattcactctgcgaacggtacatttcacagtgtaaaatagtggtttagataaccatataagtaaactactggacacaataagtgtgtttggttcaggtttctaaaccgattcgttgcgaaaaatctaaaaccttaaccaaaatgggcataacagcataatagattcttgaaaatctatggatttctttagttcaatttagaatggtctcctacctttttgaaaatctatagatttctctacttcaatttag

SEQ ID NO: 82401 - DNA, 1540 bp, Zea Mays
cgggcgcgacgcaaaaagctttgttctcagcggaagggcctcagcctcacgggggcgaggccgcgaggcgaggctataaaacgctgccccacccaagccaaccgcctcgtcgttccatccagctctcccagcgcgctgctcgactcgactcgacttcctctgcaacgcgtgtccggtgtaggctgagagagtgagtgagaggcgagatgaggagcgggcggctggcggtggcggtggcggtggctctggcgtgggcgttcgcggcgtcggcggcggcggcggcgcagaagtacaatgccatcttcaacttcggcgactccatcaccgacaccgggaacctctgcaccaacgggaggccgtcgcagatcaccttcacgcagccgccctacggcgagacctacttcggcacgccgacgtgccgctgcagcgacggccgcgtcatcccggacttcctctgctccaggttcggcctgccgttcctgccgccgtccaagtccacgacggccgacttcaagaagggcgctaacatggccatcaccggcgccacggccatggacgcgcccttcttccgctcgctcggcctctccgacaagatctggaacaacgggcccatcagcttccagctgcagtggttccagcaggtcacctccgccgtgtgcgggcaggactgcaagagctacctggccaactcgctgttcgtgttcggcgagttcgggggcaacgactacaacgccatgctgttcggcaactacaacgcggaccaggccagcacgtacacgccgcagatcgtgagcgccatcgcggccggcgtggagaagctgctggccatgggcgccacggacgtggtggtgccgggggtgctccccatcggctgcttccccatctacctcaccgtctacggcacctccaacagcgccgactacgacgcgctcggctgcctcaagaagttcaacgacctctccaccaaccacaacgcccagttgcaggcccagatctccgccctccaggccaagtacaagtcggcgcgcatcatgtacgccgacttctactccgccgtctacgacatggtcaagaaccccggcagctacgggttcagctcggtgttccaggcgtgctgcggctcggggggcggcaagtacaactaccagaacagcgcgcggtgcggcatgtcgggcgcgtccgcgtgctccagcccggcgtcgcacctcagctgggacggcatccacctcaccgaggccgcctacaagcagatcaccgacggctggctcaacgggccctactgccgccccgccatcctccacagctaagctaagcgaggggagggcgattaattttttattgttgccatgttatttatacctgtgtttacgttgccgggaaaaaagtgtcccggcagctgcatgcatgtgttgcctcttgtaacttgttatactggtggtcttcatttacaaatcaaatggtatagatttttcatggaaccaaggcatgtggtcggggctttatagagaacttttgcagcaatcactctccaaggtagcct

SEQ ID NO: 82402 - DNA, 1547 bp, Zea Mays
ctgcgctaggcagacgggcgcgacgcaaaaagctttgttctcagcggaagggcctcagcctcacgggggcgaggccgcgaggcgaggctataaaacgctgccccacccaagccaaccgcctcgtcgttccatccagctctcccagcgcgctgctcgactcgactcgacttcctctgcaacgcgtgtccggtgtaggctgagagagtgagtgagaggcgagatgaggagcgggcggctggcggtggcggtggcggtggctctggcgtgggcgttcgcggcgtcggcggcggcggcggcgcagaagtacaatgccatcttcaacttcggcgactccatcaccgacaccgggaacctctgcaccaacgggaggccgtcgcagatcaccttcacgcagccgccctacggcgagacctacttcggcacgccgacgtgccgctgcagcgacggccgcgtcatcccggacttcctctgctccaggttcggcctgccgttcctgccgccgtccaagtccacgacggccgacttcaagaagggcgctaacatggccatcaccggcgccacggccatggacgcgcccttcttccgctcgctcggcctctccgacaagatctggaacaacgggcccatcagcttccagctgcagtggttccagcaggtcacctccgccgtgtgcgggcaggactgcaagagctacctggccaactcgctgttcgtgttcggcgagttcgggggcaacgactacaacgccatgctgttcggcaactacaacgcggaccaggccagcacgtacacgccgcagatcgtgagcgccatcgcggccggcgtggagaagctgctggccatgggcgccacggacgtggtggtgccgggggtgctccccatcggctgcttccccatctacctcaccgtctacggcacctccaacagcgccgactacgacgcgctcggctgcctcaagaagttcaacgacctctccaccaaccacaacgcccagttgcaggcccagatctccgccctccaggccaagtacaagtcggcgcgcatcatgtacgccgacttctactccgccgtctacgacatggtcaagaaccccggcagctacgctcggtgttccaggcgtgctgcggctcggggggcggcaagtacaactaccagaacagcgcgcggtgcggcatgtcgggcgcgtccgcgtgctccagcccggcgtcgcacctcagctgggacggcatccacctcaccgaggccgcctacaagcagatcaccgacggctggctcaacgggccctactgccgccccgccatcctccacagctaagctaagcgaggggagggcgattaattttttattgttgccatgttatttatacctgtgtttacgttgccgggaaaaaagtgtcccggcagctgcatgcatgtgttgcctcttgtaacttgttatactggtggtcttcatttacaaatcaaatggtatagatttttcatggaaccaaggcatgtggtcggggctttatagagaacttttgcagcaatcactctccaaggtagcct

SEQ ID NO: 82403 - DNA, 1506 bp, Zea Mays
cggttcttctttttgttggtttgacgacttctaccccagcctcaaccgctccaagtgctgcgccaagggaatttgcacggagtgcttcctccagatgaagtcgcccacctcgtgcaaaccgacgcagtgtccgtattgcaagacgctgaattacgcagtggagtaccggggcgtgaagaccaaggaggagaagggcatagagcagcttgaggagcagagggtgatcgaggcgcagatcaggatgcggcagcaggaggtacaggacgatgcagagcggatgaagaacaagcggactgcaactttgggtgacgtagtagcatcagcacaggtcgattcttgcaataccgatggtgcatcaactgcagttgcaaacagtccacgaggcaacgatgttctctcgtccgaagtgcagcattctgagttgatatcgaggaattctgaagccttcaaacagatgcggggcaataattttgaggtggatcttgaagaagtaatgcttatggaggcaatttggctctctatacaagatcaagaagctttgggaaatccaggatgtgttagcactacaccgtcatcaattccttcaaggccttttgatgatggtgatatgacaacgaccgctgaagcagcttcttctggtggatttgcttgtgcagtcgcagctttagctgaacagcagcatatgcatggagagtcttctagcgcatcaccttgccaaacaataaggtttggcacccttagcagaccagacagatccactacacaggatctgagtgtagctgggagcagttcttcggactccagagttgaggaaccaccaaccagcaatacacaccgaacaatagaggctgcagagtattctaattctaatgtccagtggtccgaggtggccgaggctgggaccagtattgctgaatctgatggtacagtggaggctggtgttgacaattcatccacttcggctgggtccaacattgattctgttagtgttcctgatagcttcgaggagcagatgatgctggccatggctctctcgttggtcgatgcccgtgctagagcaggttctccggggttagcttggcggtagcatttccttgtaggcccttccactccttatactattcttttcggttgtgctgcgttttgttcctaagtgttccaattgccacgtaaaacatgggggattagatggggagcaggctcaaatttgacgaactgacagtgatacttgtgaatagtgggataaatctgtacatttgaagccagtggtttggctaattttatctcctcttctttcgattcttgaggaagaaattggattctcaggcagatttctgcctacagaagttgtgcctgatgatgttgaaacattgtgtaaatacggaaacgcactcacatttttttcatgtcccggtggtttttcctgcttgctatgtcgaacactgcatatgcatatagcggaatgacatcttataaataaagtttctaaattttccttttgtatcg

SEQ ID NO: 82404 - DNA, 2144 bp, Zea Mays
agcgacgacggcacgagcagaggggccgtcgagccgtcgaggagaaacaccccttttccctttccatttcgtctcgtcccggctcgttgccggcggatagaaatcttctactgacttctcccgtgtcgtgctctctctctgccggcggatagaaatcttctactggctcgctgcgacgcgtccggcctctcctctcctctcctcaccccccccccccccccgcgcgggagcgggtggttgcggtggcggctgaggtttagtcgagggacccggccgaccagcggtcgcgcggcggagccgagggcaaggggatggggaaccaggtcgggggccgacggcggcggcggccgccggtggacgagcgctacacgcgcccgcaggggctgtacccgcacccggacatcgacctcaggaagctccgccgcctcatcctcgaggccaagctcgcgccctgccaccctggcgccgacgacgcgcgcgccgacctcgacgagtgccccatctgcttcctgttctaccccagcctcaaccgctccaagtgctgcgccaagggaatttgcacggagtgcttcctccagatgaagtcgcccacctcgtgcaaaccgacgcagtatcctgactaaactcacttcatttcgaatccagagcctggtgctcttgtcgagcgtgtgtttcgtatttttcgagcgtctctggtgttactaaaccgtgccggttactgccctgttgcaactgcaagtccccttaacttacctcgtaataaggtgtccgtattgcaagacgctgaattacgcagtggagtaccggggcgtgaagaccaaggaggagaagggcatagagcagcttttttgggtaggaggagcagagggtgatcgaggcgcagatcaggatgcggcagcaggaggtacaggacgatgcagagcggatgaagaacaagcggactgcaactttgggtgacgtagtagcatcagcacaggtcgattcttgcaataccgatggtgcatcaactgcagtccacgaggcaacgatgttctctcgtccgaagtgcagcattctgagttgatatcgaggaattctgaagccttcaaacagatgcggggcaataattttgaggtggatcttgaagaagtaatgcttatggaggcaatttggctctctatacaagatcaagaagctttgggaaatccaggatgtgttagcactacaccgtcatcaattccttcaaggccttttgatgatggtgatatgacaacgaccgctgaagcagcttcttctggtggatttgcttgtgcagtcgcagctttagctgaacagcagcatatgcatggagagtcttctagcgcatcaccttgccaaacaataaggtttggcacccttagcagaccagacagatccactacacaggatctgagtgtagctgggagcagttcttcggactccagagttgaggaaccaccaaccagcaatacacaccgaacaatagaggctgcagagtattctaattctaatgtccagtggtccgaggtggccgaggctgggaccagtattgctgaatctgatggtacagtggaggctggtgttgacaattcatccacttcggctgggtccaacattgattctgttagtgttcctgatagcttcgaggagcagatgatgctggccatggctctctcgttggtcgatgcccgtgctagagcaggttctccggggttagcttggcggtagcatttccttgtaggcccttccactccttatactattcttttcggttgtgctgcgttttgttcctaagtgttccaattgccacgtaaaacatgggggattagatggggagcaggctcaaatttgacgaactgacagtgatacttgtgaatagtgggataaatctgtacatttgaagccagtggtttggctaattttatctcctcttctttcgattcttgaggaagaaattggattctcaggcagatttctgcctacagaagttgtgcctgatgatgttgaaacattgtgtaaatacggaaacgcactcacatttttttcatgtcccggtggtttttcctgcttgctatgtcgaacactgcatatgcatatagcggaatgacatcttataaataaagtttctaaattttccttttgtatcg

SEQ ID NO: 82405 - DNA, 1923 bp, Zea Mays
agcgacgacggcacgagcagaggggccgtcgagccgtcgaggagaaacaccccttttccctttccatttcgtctcgtcccggctcgttgccggcggatagaaatcttctactgacttctcccgtgtcgtgctctctctctgccggcggatagaaatcttctactggctcgctgcgacgcgtccggcctctcctctcctctcctcaccccccccccccccccgcgcgggagcgggtggttgcggtggcggctgaggtttagtcgagggacccggccgaccagcggtcgcgcggcggagccgagggcaaggggatggggaaccaggtcgggggccgacggcggcggcggccgccggtggacgagcgctacacgcgcccgcaggggctgtacccgcacccggacatcgacctcaggaagctccgccgcctcatcctcgaggccaagctcgcgccctgccaccctggcgccgacgacgcgcgcgccgacctcgacgagtgccccatctgcttcctgttctaccccagcctcaaccgctccaagtgctgcgccaagggaatttgcacggagtgcttcctccagatgaagtcgcccacctcgtgcaaaccgacgcagtgtccgtattgcaagacgctgaattacgcagtggagtaccggggcgtgaagaccaaggaggagaagggcatagagcagcttgaggagcagagggtgatcgaggcgcagatcaggatgcggcagcaggaggtacaggacgatgcagagcggatgaagaacaagcggactgcaactttgggtgacgtagtagcatcagcacaggtcgattcttgcaataccgatggtgcatcaactgcagttgcaaacagtccacgaggcaacgatgttctctcgtccgaagtgcagcattctgagttgatatcgaggaattctgaagccttcaaacagatgcggatcaagaagctttgggaaatccaggatgtgttagcactacaccgtcatcaattccttcaaggccttttgatgatggtgatatgacaacgaccgctgaagcagcttcttctggtggatttgcttgtgcagtcgcagctttagctgaacagcagcatatgcatggagagtcttctagcgcatcaccttgccaaacaataaggtttggcacccttagcagaccagacagatccactacacaggatctgagtgtagctgggagcagttcttcggactccagagttgaggaaccaccaaccagcaatacacaccgaacaatagaggctgcagagtattctaattctaatgtccagtggtccgaggtggccgaggctgggaccagtattgctgaatctgatggtacagtggaggctggtgttgacaattcatccacttcggctgggtccaacattgattctgttagtgttcctgatagcttcgaggagcagatgatgctggccatggctctctcgttggtcgatgcccgtgctagagcaggttctccggggttagcttggcggtagcatttccttgtaggcccttccactccttatactattcttttcggttgtgctgcgttttgttcctaagtgttccaattgccacgtaaaacatgggggattagatggggagcaggctcaaatttgacgaactgacagtgatacttgtgaatagtgggataaatctgtacatttgaagccagtggtttggctaattttatctcctcttctttcgattcttgaggaagaaattggattctcaggcagatttctgcctacagaagttgtgcctgatgatgttgaaacattgtgtaaatacggaaacgcactcacatttttttcatgtcccggtggtttttcctgcttgctatgtcgaacactgcatatgcatatagcggaatgacatcttataaataaagtttctaaattttccttttgtatcg

SEQ ID NO: 82406 - DNA, 1980 bp, Zea Mays
agcgacgacggcacgagcagaggggccgtcgagccgtcgaggagaaacaccccttttccctttccatttcgtctcgtcccggctcgttgccggcggatagaaatcttctactgacttctcccgtgtcgtgctctctctctgccggcggatagaaatcttctactggctcgctgcgacgcgtccggcctctcctctcctctcctcaccccccccccccccccgcgcgggagcgggtggttgcggtggcggctgaggtttagtcgagggacccggccgaccagcggtcgcgcggcggagccgagggcaaggggatggggaaccaggtcgggggccgacggcggcggcggccgccggtggacgagcgctacacgcgcccgcaggggctgtacccgcacccggacatcgacctcaggaagctccgccgcctcatcctcgaggccaagctcgcgccctgccaccctggcgccgacgacgcgcgcgccgacctcgacgagtgccccatctgcttcctgttctaccccagcctcaaccgctccaagtgctgcgccaagggaatttgcacggagtgcttcctccagatgaagtcgcccacctcgtgcaaaccgacgcagtgtccgtattgcaagacgctgaattacgcagtggagtaccggggcgtgaagaccaaggaggagaagggcatagagcagcttgaggagcagagggtgatcgaggcgcagatcaggatgcggcagcaggaggtacaggacgatgcagagcggatgaagaacaagcggactgcaactttgggtgacgtagtagcatcagcacaggtcgattcttgcaataccgatggtgcatcaactgcagtccacgaggcaacgatgttctctcgtccgaagtgcagcattctgagttgatatcgaggaattctgaagccttcaaacagatgcggggcaataattttgaggtggatcttgaagaagtaatgcttatggaggcaatttggctctctatacaagatcaagaagctttgggaaatccaggatgtgttagcactacaccgtcatcaattccttcaaggccttttgatgatggtgatatgacaacgaccgctgaagcagcttcttctggtggatttgcttgtgcagtcgcagctttagctgaacagcagcatatgcatggagagtcttctagcgcatcaccttgccaaacaataaggtttggcacccttagcagaccagacagatccactacacaggatctgagtgtagctgggagcagttcttcggactccagagttgaggaaccaccaaccagcaatacacaccgaacaatagaggctgcagagtattctaattctaatgtccagtggtccgaggtggccgaggctgggaccagtattgctgaatctgatggtacagtggaggctggtgttgacaattcatccacttcggctgggtccaacattgattctgttagtgttcctgatagcttcgaggagcagatgatgctggccatggctctctcgttggtcgatgcccgtgctagagcaggttctccggggttagcttggcggtagcatttccttgtaggcccttccactccttatactattcttttcggttgtgctgcgttttgttcctaagtgttccaattgccacgtaaaacatgggggattagatggggagcaggctcaaatttgacgaactgacagtgatacttgtgaatagtgggataaatctgtacatttgaagccagtggtttggctaattttatctcctcttctttcgattcttgaggaagaaattggattctcaggcagatttctgcctacagaagttgtgcctgatgatgttgaaacattgtgtaaatacggaaacgcactcacatttttttcatgtcccggtggtttttcctgcttgctatgtcgaacactgcatatgcatatagcggaatgacatcttataaataaagtttctaaattttccttttgtatcg

SEQ ID NO: 82407 - DNA, 1434 bp, Zea Mays
cggcccgcgagaggggatggcgtccacggctcgcccgctccgctcttataacagccgcttcctacgtctctcgcgcatcccttccgagcggaagcggcagcccgtcaggattcaaatctgccggaaacctgtatcttcatccagtatcaaggggaagttctgttgttgtgtgttcggtgatggatacatccaaaagcaagcaaggaccagaacatctccttgttcttgtccatggtatcatggctagccccaaagactggacatatggggaagcagtgctgaagaggcggttgggtgatgattttttcatatatgctagttcaacgaacagctacaccaaaacctttgatgggattgatgttgctggaagaaggttagcaaatgaacttccgtttcttcaaggcctatcaatcctagaaaagcttgctgcgcctttggctcctttaattgttgggcgcaccggtgctcaactcttcctcactgatggtgatcctagcaaggcacctctcctgttacagatggcatccgactgtgatgacaaaaactacatatcagccttggcagcttttaagaaccgtgtcctgtatgccaacgtctcgtacgaccacatggtcggctggcgaacgtcttcactaaggagagagaagaatcttataaagccctcacatcgttcactggatggctataagcacattgtgaatgtggaatactgttcgcccgtgtcatcggagggcccacatttcccttccaaggctgccagagctaaagaagctgcacagcgatcgccaaaccgagaaaataccgaggagtaccaccaaatgatggaggaggagatgctccatggcttgcagaaggttggctggaagaaggtggacgtcaacttccattcgtcattctggccttactctgctcacaacaacatacacgtatgtcttgttcttctggagtgatgtatttttctctctagtttgatccaaattcttctgtattaaagaagagccatccaaattcgtggcatctatgcaggtcaagaacgagtggcttcacaatgctggcgctggtgttatcgcgcacgttgcggacagcatcaagcagcaggagtcacggccatgtcttcctgccaatctatagcagtagcattcagcaatccatttgttcaaattatctgtcgctagcaaataaacccatgaccaaactctgttcgtcagcatccactgagcggcgaaatatttgggactgggacacacaataagctgtgtatcattatcggccgcctaggttttacattgtttgatgtcaattgtcaaatggcatgtgtttcctcatggaacagacgaagcattcgaagttgatataaagacaacctaaattgtcatatatgctaccgatggttcgtacccaatccagcgacgacgtcgatgagatttgggttag

SEQ ID NO: 82408 - DNA, 1914 bp, Zea Mays
cggcccgcgagaggggatggcgtccacggctcgcccgctccgctcttataacagccgcttcctacgtctctcgcgcatcccttccgagcggaagcggcagcccgtcaggattcaaatctgccggaaacctgtatcttcatccagtatcaaggggaagttctgttgttgtgtgttcggtgatggatacatccaaaagcaagcaaggaccagaacatctccttgttcttgtccatggtatcatggctagccccaaagactggacatatggggaagcagtgctgaagaggcggttgggtgatgattttttcatatatgctagttcaacgaacagctacaccaaaacctttgatgggattgatgttgctggaagaaggttagcaaatgaagtacgtcctttgaagtttgtcctagaaaaaaggtcttggaagtggttaacaagatgcccagcttgagaaagatttccttcctagcgcattctctgggtggtttgtttgctagatatgttattgcaatactccactcagtctcagtggaaacaaagaatgcaggacagagtagtgcacttattgttcctacaacaagagggccagcaaaatcgagatgtgcttcaggattaggttctattgctggattgcggccaattaattttattaccttagcaaccccacaccttggggttagagggagaaatcaggtgcatcaccaaaatgtttcggattacgtttacaaaatatactgcacattatccagcaaaggctcgattcctgggaaaacgaactctctatttgttattttgttcattcatgtagattttgaagttgcatggtatgatttttacaagcttggattatatcattgctgaagtggtcaataccaactagcatctataacttttgaggaaaaaacgacgaacttattgggacctgttcctgttagtgctgatcaatttctttgacacatgcttatatgtttttcccccgaattaccagcttccgtttcttcaaggcctatcaatcctagaaaagcttgctgcgcctttggctcctttaattgttgggcgcaccggtgctcaactcttcctcactgatggtgatcctagcaaggcacctctcctgttacagatggcatccgactgtgatgacaaaaactacatatcagccttggcagcttttaagaaccgtgtcctgtatgccaacgtctcgtacgaccacatggtcggctggcgaacgtcttcactaaggagagagaagaatcttataaagccctcacatcgttcactggatggctataagcacattgtgaatgtggaatactgttcgcccgtgtcatcggagggcccacatttcccttccaaggctgccagagctaaagaagctgcacagcgatcgccaaaccgagaaaataccgaggagtaccaccaaatgatggaggaaggttggctggaagaaggtggacgtcaacttccattcgtcattctggccttactctgctcacaacaacatacacgtcaagaacgagtggcttcacaatgctggcgctggtgttatcgcgcacgttgcggacagcatcaagcagcaggagtcacggccatgtcttcctgccaatctatagcagtagcattcagcaatccatttgttcaaattatctgtcgctagcaaataaacccatgaccaaactctgttcgtcagcatccactgagcggcgaaatatttgggactgggacacacaataagctgtgtatcattatcggccgcctaggttttacattgtttgatgtcaattgtcaaatggcatgtgtttcctcatggaacagacgaagcattcgaagttgatataaagacaacctaaattgtcatatatgctaccgatggttcgtacccaatccagcgacgacgtcgatgagatttgggttag

SEQ ID NO: 82409 - DNA, 2039 bp, Zea Mays
cggcccgcgagaggggatggcgtccacggctcgcccgctccgctcttataacagccgcttcctacgtctctcgcgcatcccttccgagcggaagcggcagcccgtcaggttatagctcactcttgatcgcttcctggtttgctaagcgatttgcctctcgtggttcggtgacggatcggaggcgctgcgaattcgaagctggtttctctgggctaagtcgattcggacttacttgttcagtaggtgtagtgtaggcgtgtagctcgatagacgagaagaatatttggcgtcgaagtttcagctaagcaacgagatcaggaagtttcagcaaagctcctggattaaatatttggcatcatagaggattcaaatctgccggaaacctgtatcttcatccagtatcaaggggaagttctgttgttgtgtgttcggtgatggatacatccaaaagcaagcaaggaccagaacatctccttgttcttgtccatggtatcatggctagccccaaagactggacatatggggaagcagtgctgaagaggcggttgggtgatgattttttcatatatgctagttcaacgaacagctacaccaaaacctttgatgggattgatgttgctggaagaaggttagcaaatgaagtcttggaagtggttaacaagatgcccagcttgagaaagatttccttcctagcgcattctctgggtggtttgtttgctagatatgttattgcaatactccactcagtctcagtggaaacaaagaatgcaggacagagtagtgcacttattgttcctacaacaagagggccagcaaaatcgagatgtgcttcaggattaggttctattgctggattgcggccaattaattttattaccttagcaaccccacaccttggggttagagggagaaatcagcttccgtttcttcaaggcctatcaatcctagaaaagcttgctgcgcctttggctcctttaattgttgggcgcaccggtgctcaactcttcctcactgatggtgatcctagcaaggcacctctcctgttacagatggcatccgactgtgatgacaaaaactacatccttggcagcttttaagaaccgtgtcctgtatgccaacgtctcgtacgaccacatggtcggctggcgaacgtcttcactaaggagagagaagaatcttataaagccctcacatcgttcactggatggctataagcacattgtgaatgtggaatactgttcgcccgtgtcatcggagggcccacatttcccttccaaggctgccagagctaaagaagctgcacagcgatcgccaaaccgagaaaataccgaggagtaccaccaaatgatggagggtaagtaccagttttgcagtccacaccggatttgcttcttttttttgaacgaattgtgtgtcactgattcttgaaacagaggagatgctccatggcttgcagaaggttggctggaagaaggtggacgtcaacttccattcgtcattctggccttactctgctcacaacaacatacacgtatgtcttgttcttctggagtgatgtatttttctctctagtttgatccaaattcttctgtattaaagaagagccatccaaattcgtggcatctatgcaggtcaagaacgagtggcttcacaatgctggcgctggtgttatcgcgcacgttgcggacagcatcaagcagcaggagtcacggccatgtcttcctgccaatctatagcagtagcattcagcaatccatttgttcaaattatctgtcgctagcaaataaacccatgaccaaactctgttcgtcagcatccactgagcggcgaaatatttgggactgggacacacaataagctgtgtatcattatcggccgcctaggttttacattgtttgatgtcaattgtcaaatggcatgtgtttcctcatggaacagacgaagcattcgaagttgatataaagacaacctaaattgtcatatatgctaccgatggttcgtacccaatccagcgacgacgtcgatgagatttgggttag

SEQ ID NO: 82410 - DNA, 2274 bp, Zea Mays
cggcccgcgagaggggatggcgtccacggctcgcccgctccgctcttataacagccgcttcctacgtctctcgcgcatcccttccgagcggaagcggcagcccgtcaggttatagctcactcttgatcgcttcctggtttgctaagcgatttgcctctcgtggttcggtgacggatcggaggcgctgcgaattcgaagctggtttctctgggctaagtcgattcggacttacttgttcagtaggtgtagtgtaggcgtgtagctcgatagacgagaagaatatttggcgtcgaagtttcagctaagcaacgagatcaggaagtttcagcaaagctcctggattaaatatttggcatcatagaggattcaaatctgccggaaacctgtatcttcatccagtatcaaggggaagttctgttgttgtgtgttcggtgatggatacatccaaaagcaagcaaggaccagaacatctccttgttcttgtccatggtatcatggctagccccaaagactggacatatggggaagcagtgctgaagaggcggttgggtgatgattttttcatatatggtaaagcatgctagcatttgaattcttcattcactaggttcaatactagtcattatctaaccatttgttctagcttctacagtgccggtttatgaactaaatggatgttaaaaaaagtgtatgcaaacatctttgtctacagctagttcaacgaacagctacaccaaaacctttgatgggattgatgttgctggaagaaggttagcaaatgaagtcttggaagtggttaacaagatgcccagcttgagaaagatttccttcctagcgcattctctgggtggtttgtttgctagatatgttattgcaatactccactcagtctcagtggaaacaaagaatgcaggacagagtagtgcacttattgttcctacaacaagagggccagcaaaatcgagatgtgcttcaggattaggttctattgctggattgcggccaattaattttattaccttagcaaccccacaccttggggttagagggagaaatcaggtgcatcaccaaaatgtttcggattacgtttacaaaatatactgcacattatccagcaaaggctcgattcctgggaaaacgaactctctatttgttattttgttcattcatgtagattttgaagttgcatggtatgatttttacaagcttggattatatcattgctgaagtggtcaataccaactagcatctataacttttgaggaaaaaacgacgaacttattgggacctgttcctgttagtgctgatcaatttctttgacacatgcttatatgtttttcccccgaattaccagcttccgtttcttcaaggcctatcaatcctagaaaagcttgctgcgcctttggctcctttaattgttgggcgcaccggtgctcaactcttcctcactgatggtgatcctagcaaggcacctctcctgttacagatggcatccgactgtgatgacaaaaactacatccttggcagcttttaagaaccgtgtcctgtatgccaacgtctcgtacgaccacatggtcggctggcgaacgtcttcactaaggagagagaagaatcttataaagccctcacatcgttcactggatggctataagcacattgtgaatgtggaatactgttcgcccgtgtcatcggagggcccacatttcccttccaaggctgccagagctaaagaagctgcacagcgatcgccaaaccgagaaaataccgaggagtaccaccaaatgatggaggaaggttggctggaagaaggtggacgtcaacttccattcgtcattctggccttactctgctcacaacaacatacacgtcaagaacgagtggcttcacaatgctggcgctggtgttatcgcgcacgttgcggacagcatcaagcagcaggagtcacggccatgtcttcctgccaatctatagcagtagcattcagcaatccatttgttcaaattatctgtcgctagcaaataaacccatgaccaaactctgttcgtcagcatccactgagcggcgaaatatttgggactgggacacacaataagctgtgtatcattatcggccgcctaggttttacattgtttgatgtcaattgtcaaatggcatgtgtttcctcatggaacagacgaagcattcgaagttgatataaagacaacctaaattgtcatatatgctaccgatggttcgtacccaatccagcgacgacgtcgatgagatttgggttag

SEQ ID NO: 82411 - DNA, 1605 bp, Zea Mays
cggcccgcgagaggggatggcgtccacggctcgcccgctccgctcttataacagccgcttcctacgtctctcgcgcatcccttccgagcggaagcggcagcccgtcaggattcaaatctgccggaaacctgtatcttcatccagtatcaaggggaagttctgttgttgtgtgttcggtgatggatacatccaaaagcaagcaaggaccagaacatctccttgttcttgtccatggtatcatggctagccccaaagactggacatatggggaagcagtgctgaagaggcggttgggtgatgattttttcatatatgctagttcaacgaacagctacaccaaaacctttgatgggattgatgttgctggaagaaggttagcaaatgaagtcttggaagtggttaacaagatgcccagcttgagaaagatttccttcctagcgcattctctgggtggtttgtttgctagatatgttattgcaatactccactcagtctcagtggaaacaaagaatgcaggacagagtagtgcacttattgttcctacaacaagagggccagcaaaatcgagatgtgcttcaggattaggttctattgctggattgcggccaattaattttattaccttagcaaccccacaccttggggttagagggagaaatcagcttccgtttcttcaaggcctatcaatcctagaaaagcttgctgcgcctttggctcctttaattgttgggcgcaccggtgctcaactcttcctcactgatggtgatcctagcaaggcacctctcctgttacagatggcatccgactgtgatgacaaaaactacatccttggcagcttttaagaaccgtgtcctgtatgccaacgtctcgtacgaccacatggtcggctggcgaacgtcttcactaaggagagagaagaatcttataaagccctcacatcgttcactggatggctataagcacattgtgaatgtggaatactgttcgcccgtgtcatcggagggcccacatttcccttccaaggctgccagagctaaagaagctgcacagcgatcgccaaaccgagaaaataccgaggagtaccaccaaatgatggaggaggagatgctccatggcttgcagaaggttggctggaagaaggtggacgtcaacttccattcgtcattctggccttactctgctcacaacaacatacacgtcaagaacgagtggcttcacaatgctggcgctggtgttatcgcgcacgttgcggacagcatcaagcagcaggagtcacggccatgtcttcctgccaatctatagcagtagcattcagcaatccatttgttcaaattatctgtcgctagcaaataaacccatgaccaaactctgttcgtcagcatccactgagcggcgaaatatttgggactgggacacacaataagctgtgtatcattatcggccgcctaggttttacattgtttgatgtcaattgtcaaatggcatgtgtttcctcatggaacagacgaagcattcgaagttgatataaagacaacctaaattgtcatatatgctaccgatggttcgtacccaatccagcgacgacgtcgatgagatttgggttag

SEQ ID NO: 82412 - DNA, 2160 bp, Zea Mays
cggcccgcgagaggggatggcgtccacggctcgcccgctccgctcttataacagccgcttcctacgtctctcgcgcatcccttccgagcggaagcggcagcccgtcaggttatagctcactcttgatcgcttcctggtttgctaagcgatttgcctctcgtggttcggtgacggatcggaggcgctgcgaattcgaagctggtttctctgggctaagtcgattcggacttacttgttcagtaggtgtagtgtaggcgtgtagctcgatagacgagaagaatatttggcgtcgaagtttcagctaagcaacgagatcaggaagtttcagcaaagctcctggattaaatatttggcatcatagaggattcaaatctgccggaaacctgtatcttcatccagtatcaaggggaagttctgttgttgtgtgttcggtgatggatacatccaaaagcaagcaaggaccagaacatctccttgttcttgtccatggtatcatggctagccccaaagactggacatatggggaagcagtgctgaagaggcggttgggtgatgattttttcatatatgctagttcaacgaacagctacaccaaaacctttgatgggattgatgttgctggaagaaggttagcaaatgaagtcttggaagtggttaacaagatgcccagcttgagaaagatttccttcctagcgcattctctgggtggtttgtttgctagatatgttattgcaatactccactcagtctcagtggaaacaaagaatgcaggacagagtagtgcacttattgttcctacaacaagagggccagcaaaatcgagatgtgcttcaggattaggttctattgctggattgcggccaattaattttattaccttagcaaccccacaccttggggttagagggagaaatcaggtgcatcaccaaaatgtttcggattacgtttacaaaatatactgcacattatccagcaaaggctcgattcctgggaaaacgaactctctatttgttattttgttcattcatgtagattttgaagttgcatggtatgatttttacaagcttggattatatcattgctgaagtggtcaataccaactagcatctataacttttgaggaaaaaacgacgaacttattgggacctgttcctgttagtgctgatcaatttctttgacacatgcttatatgtttttcccccgaattaccagcttccgtttcttcaaggcctatcaatcctagaaaagcttgctgcgcctttggctcctttaattgttgggcgcaccggtgctcaactcttcctcactgatggtgatcctagcaaggcacctctcctgttacagatggcatccgactgtgatgacaaaaactacatatcagccttggcagcttttaagaaccgtgtcctgtatgccaacgtctcgtacgaccacatggtcggctggcgaacgtcttcactaaggagagagaagaatcttataaagccctcacatcgttcactggatggctataagcacattgtgaatgtggaatactgttcgcccgtgtcatcggagggcccacatttcccttccaaggctgccagagctaaagaagctgcacagcgatcgccaaaccgagaaaataccgaggagtaccaccaaatgatggaggaggagatgctccatggcttgcagaaggttggctggaagaaggtggacgtcaacttccattcgtcattctggccttactctgctcacaacaacatacacgtcaagaacgagtggcttcacaatgctggcgctggtgttatcgcgcacgttgcggacagcatcaagcagcaggagtcacggccatgtcttcctgccaatctatagcagtagcattcagcaatccatttgttcaaattatctgtcgctagcaaataaacccatgaccaaactctgttcgtcagcatccactgagcggcgaaatatttgggactgggacacacaataagctgtgtatcattatcggccgcctaggttttacattgtttgatgtcaattgtcaaatggcatgtgtttcctcatggaacagacgaagcattcgaagttgatataaagacaacctaaattgtcatatatgctaccgatggttcgtacccaatccagcgacgacgtcgatgagatttgggttag

SEQ ID NO: 82413 - DNA, 2147 bp, Zea Mays
cggcccgcgagaggggatggcgtccacggctcgcccgctccgctcttataacagccgcttcctacgtctctcgcgcatcccttccgagcggaagcggcagcccgtcaggttatagctcactcttgatcgcttcctggtttgctaagcgatttgcctctcgtggttcggtgacggatcggaggcgctgcgaattcgaagctggtttctctgggctaagtcgattcggacttacttgttcagtaggtgtagtgtaggcgtgtagctcgatagacgagaagaatatttggcgtcgaagtttcagctaagcaacgagatcaggaagtttcagcaaagctcctggattaaatatttggcatcatagaggattcaaatctgccggaaacctgtatcttcatccagtatcaaggggaagttctgttgttgtgtgttcggtgatggatacatccaaaagcaagcaaggaccagaacatctccttgttcttgtccatggtatcatggctagccccaaagactggacatatggggaagcagtgctgaagaggcggttgggtgatgattttttcatatatgctagttcaacgaacagctacaccaaaacctttgatgggattgatgttgctggaagaaggtcttggaagtggttaacaagatgcccagcttgagaaagatttccttcctagcgcattctctgggtggtttgtttgctagatatgttattgcaatactccactcagtctcagtggaaacaaagaatgcaggacagagtagtgcacttattgttcctacaacaagagggccagcaaaatcgagatgtgcttcaggattaggttctattgctggattgcggccaattaattttattaccttagcaaccccacaccttggggttagagggagaaatcaggtgcatcaccaaaatgtttcggattacgtttacaaaatatactgcacattatccagcaaaggctcgattcctgggaaaacgaactctctatttgttattttgttcattcatgtagattttgaagttgcatggtatgatttttacaagcttggattatatcattgctgaagtggtcaataccaactagcatctataacttttgaggaaaaaacgacgaacttattgggacctgttcctgttagtgctgatcaatttctttgacacatgcttatatgtttttcccccgaattaccagcttccgtttcttcaaggcctatcaatcctagaaaagcttgctgcgcctttggctcctttaattgttgggcgcaccggtgctcaactcttcctcactgatggtgatcctagcaaggcacctctcctgttacagatggcatccgactgtgatgacaaaaactacatatcagccttggcagcttttaagaaccgtgtcctgtatgccaacgtctcgtacgaccacatggtcggctggcgaacgtcttcactaaggagagagaagaatcttataaagccctcacatcgttcactggatggctataagcacattgtgaatgtggaatactgttcgcccgtgtcatcggagggcccacatttcccttccaaggctgccagagctaaagaagctgcacagcgatcgccaaaccgagaaaataccgaggagtaccaccaaatgatggaggaggagatgctccatggcttgcagaaggttggctggaagaaggtggacgtcaacttccattcgtcattctggccttactctgctcacaacaacatacacgtcaagaacgagtggcttcacaatgctggcgctggtgttatcgcgcacgttgcggacagcatcaagcagcaggagtcacggccatgtcttcctgccaatctatagcagtagcattcagcaatccatttgttcaaattatctgtcgctagcaaataaacccatgaccaaactctgttcgtcagcatccactgagcggcgaaatatttgggactgggacacacaataagctgtgtatcattatcggccgcctaggttttacattgtttgatgtcaattgtcaaatggcatgtgtttcctcatggaacagacgaagcattcgaagttgatataaagacaacctaaattgtcatatatgctaccgatggttcgtacccaatccagcgacgacgtcgatgagatttgggttag

SEQ ID NO: 82414 - DNA, 2155 bp, Zea Mays
cggcccgcgagaggggatggcgtccacggctcgcccgctccgctcttataacagccgcttcctacgtctctcgcgcatcccttccgagcggaagcggcagcccgtcaggttatagctcactcttgatcgcttcctggtttgctaagcgatttgcctctcgtggttcggtgacggatcggaggcgctgcgaattcgaagctggtttctctgggctaagtcgattcggacttacttgttcagtaggtgtagtgtaggcgtgtagctcgatagacgagaagaatatttggcgtcgaagtttcagctaagcaacgagatcaggaagtttcagcaaagctcctggattaaatatttggcatcatagaggattcaaatctgccggaaacctgtatcttcatccagtatcaaggggaagttctgttgttgtgtgttcggtgatggatacatccaaaagcaagcaaggaccagaacatctccttgttcttgtccatggtatcatggctagccccaaagactggacatatggggaagcagtgctgaagaggcggttgggtgatgattttttcatatatgctagttcaacgaacagctacaccaaaacctttgatgggattgatgttgctggaagaaggttagcaaatgaagtcttggaagtggttaacaagatgcccagcttgagaaagatttccttcctagcgcattctctgggtggtttgtttgctagatatgttattgcaatactccactcagtctcagtggaaacaaagaatgcaggacagagtagtgcacttattgttcctacaacaagagggccagcaaaatcgagatgtgcttcaggattaggttctattgctggattgcggccaattaattttattaccttagcaaccccacaccttggggttagagggagaaatcaggtgcatcaccaaaatgtttcggattacgtttacaaaatatactgcacattatccagcaaaggctcgattcctgggaaaacgaactctctatttgttattttgttcattcatgtagattttgaagttgcatggtatgatttttacaagcttggattatatcattgctgaagtggtcaataccaactagcatctataacttttgaggaaaaaacgacgaacttattgggacctgttcctgttagtgctgatcaatttctttgacacatgcttatatgtttttcccccgaattaccagcttccgtttcttcaaggcctatcaatcctagaaaagcttgctgcgcctttggctcctttaattgttgggcgcaccggtgctcaactcttcctcactgatggtgatcctagcaaggcacctctcctgttacagatggcatccgactgtgatgacaaaaactacatccttggcagcttttaagaaccgtgtcctgtatgccaacgtctcgtacgaccacatggtcggctggcgaacgtcttcactaaggagagagaagaatcttataaagccctcacatcgttcactggatggctataagcacattgtgaatgtggaatactgttcgcccgtgtcatcggagggcccacatttcccttccaaggctgccagagctaaagaagctgcacagcgatcgccaaaccgagaaaataccgaggagtaccaccaaatgatggaggaggagatgctccatggcttgcagaaggttggctggaagaaggtggacgtcaacttccattcgtcattctggccttactctgctcacaacaacatacacgtcaagaacgagtggcttcacaatgctggcgctggtgttatcgcgcacgttgcggacagcatcaagcagcaggagtcacggccatgtcttcctgccaatctatagcagtagcattcagcaatccatttgttcaaattatctgtcgctagcaaataaacccatgaccaaactctgttcgtcagcatccactgagcggcgaaatatttgggactgggacacacaataagctgtgtatcattatcggccgcctaggttttacattgtttgatgtcaattgtcaaatggcatgtgtttcctcatggaacagacgaagcattcgaagttgatataaagacaacctaaattgtcatatatgctaccgatggttcgtacccaatccagcgacgacgtcgatgagatttgggttag

SEQ ID NO: 82415 - DNA, 1929 bp, Zea Mays
cggcccgcgagaggggatggcgtccacggctcgcccgctccgctcttataacagccgcttcctacgtctctcgcgcatcccttccgagcggaagcggcagcccgtcaggattcaaatctgccggaaacctgtatcttcatccagtatcaaggggaagttctgttgttgtgtgttcggtgatggatacatccaaaagcaagcaaggaccagaacatctccttgttcttgtccatggtatcatggctagccccaaagactggacatatggggaagcagtgctgaagaggcggttgggtgatgattttttcatatatgtgccggtttatgaactaaatggatgttaaaaaaagtgtatgcaaacatctttgtctacagctagttcaacgaacagctacaccaaaacctttgatgggattgatgttgctggaagaaggtcttggaagtggttaacaagatgcccagcttgagaaagatttccttcctagcgcattctctgggtggtttgtttgctagatatgttattgcaatactccactcagtctcagtggaaacaaagaatgcaggacagagtagtgcacttattgttcctacaacaagagggccagcaaaatcgagatgtgcttcaggattaggttctattgctggattgcggccaattaattttattaccttagcaaccccacaccttggggttagagggagaaatcaggtgcatcaccaaaatgtttcggattacgtttacaaaatatactgcacattatccagcaaaggctcgattcctgggaaaacgaactctctatttgttattttgttcattcatgtagattttgaagttgcatggtatgatttttacaagcttggattatatcattgctgaagtggtcaataccaactagcatctataacttttgaggaaaaaacgacgaacttattgggacctgttcctgttagtgctgatcaatttctttgacacatgcttatatgtttttcccccgaattaccagcttccgtttcttcaaggcctatcaatcctagaaaagcttgctgcgcctttggctcctttaattgttgggcgcaccggtgctcaactcttcctcactgatggtgatcctagcaaggcacctctcctgttacagatggcatccgactgtgatgacaaaaactacatatcagccttggcagcttttaagaaccgtgtcctgtatgccaacgtctcgtacgaccacatggtcggctggcgaacgtcttcactaaggagagagaagaatcttataaagccctcacatcgttcactggatggctataagcacattgtgaatgtggaatactgttcgcccgtgtcatcggagggcccacatttcccttccaaggctgccagagctaaagaagctgcacagcgatcgccaaaccgagaaaataccgaggagtaccaccaaatgatggaggaaggttggctggaagaaggtggacgtcaacttccattcgtcattctggccttactctgctcacaacaacatacacgtcaagaacgagtggcttcacaatgctggcgctggtgttatcgcgcacgttgcggacagcatcaagcagcaggagtcacggccatgtcttcctgccaatctatagcagtagcattcagcaatccatttgttcaaattatctgtcgctagcaaataaacccatgaccaaactctgttcgtcagcatccactgagcggcgaaatatttgggactgggacacacaataagctgtgtatcattatcggccgcctaggttttacattgtttgatgtcaattgtcaaatggcatgtgtttcctcatggaacagacgaagcattcgaagttgatataaagacaacctaaattgtcatatatgctaccgatggttcgtacccaatccagcgacgacgtcgatgagatttgggttag

SEQ ID NO: 82416 - DNA, 1321 bp, Zea Mays
cggcccgcgagaggggatggcgtccacggctcgcccgctccgctcttataacagccgcttcctacgtctctcgcgcatcccttccgagcggaagcggcagcccgtcaggattcaaatctgccggaaacctgtatcttcatccagtatcaaggggaagttctgttgttgtgtgttcggtgatggatacatccaaaagcaagcaaggaccagaacatctccttgttcttgtccatggtatcatggctagccccaaagactggacatatggggaagcagtgctgaagaggcggttgggtgatgattttttcatatatgctagttcaacgaacagctacaccaaaacctttgatgggattgatgttgctggaagaagcttccgtttcttcaaggcctatcaatcctagaaaagcttgctgcgcctttggctcctttaattgttgggcgcaccggtgctcaactcttcctcactgatggtgatcctagcaaggcacctctcctgttacagatggcatccgactgtgatgacaaaaactacatatcagccttggcagcttttaagaaccgtgtcctgtatgccaacgtctcgtacgaccacatggtcggctggcgaacgtcttcactaaggagagagaagaatcttataaagccctcacatcgttcactggatggctataagcacattgtgaatgtggaatactgttcgcccgtgtcatcggagggcccacatttcccttccaaggctgccagagctaaagaagctgcacagcgatcgccaaaccgagaaaataccgaggagtaccaccaaatgatggaggaggagatgctccatggcttgcagaaggttggctggaagaaggtggacgtcaacttccattcgtcattctggccttactctgctcacaacaacatacacgtcaagaacgagtggcttcacaatgctggcgctggtgttatcgcgcacgttgcggacagcatcaagcagcaggagtcacggccatgtcttcctgccaatctatagcagtagcattcagcaatccatttgttcaaattatctgtcgctagcaaataaacccatgaccaaactctgttcgtcagcatccactgagcggcgaaatatttgggactgggacacacaataagctgtgtatcattatcggccgcctaggttttacattgtttgatgtcaattgtcaaatggcatgtgtttcctcatggaacagacgaagcattcgaagttgatataaagacaacctaaattgtcatatatgctaccgatggttcgtacccaatccagcgacgacgtcgatgagatttgggttag

SEQ ID NO: 82417 - DNA, 2192 bp, Zea Mays
cggcccgcgagaggggatggcgtccacggctcgcccgctccgctcttataacagccgcttcctacgtctctcgcgcatcccttccgagcggaagcggcagcccgtcaggttatagctcactcttgatcgcttcctggtttgctaagcgatttgcctctcgtggttcggtgacggatcggaggcgctgcgaattcgaagctggtttctctgggctaagtcgattcggacttacttgttcagtaggtgtagtgtaggcgtgtagctcgatagacgagaagaatatttggcgtcgaagtttcagctaagcaacgagatcaggaagtttcagcaaagctcctggattaaatatttggcatcatagaggattcaaatctgccggaaacctgtatcttcatccagtatcaaggggaagttctgttgttgtgtgttcggtgatggatacatccaaaagcaagcaaggaccagaacatctccttgttcttgtccatggtatcatggctagccccaaagactggacatatggggaagcagtgctgaagaggcggttgggtgatgattttttcatatatgctagttcaacgaacagctacaccaaaacctttgatgggattgatgttgctggaagaaggttagcaaatgaagtacgtcctttgaagtttgtcctagaaaaaaggtcttggaagtggttaacaagatgcccagcttgagaaagatttccttcctagcgcattctctgggtggtttgtttgctagatatgttattgcaatactccactcagtctcagtggaaacaaagaatgcaggacagagtagtgcacttattgttcctacaacaagagggccagcaaaatcgagatgtgcttcaggattaggttctattgctggattgcggccaattaattttattaccttagcaaccccacaccttggggttagagggagaaatcaggtgcatcaccaaaatgtttcggattacgtttacaaaatatactgcacattatccagcaaaggctcgattcctgggaaaacgaactctctatttgttattttgttcattcatgtagattttgaagttgcatggtatgatttttacaagcttggattatatcattgctgaagtggtcaataccaactagcatctataacttttgaggaaaaaacgacgaacttattgggacctgttcctgttagtgctgatcaatttctttgacacatgcttatatgtttttcccccgaattaccagcttccgtttcttcaaggcctatcaatcctagaaaagcttgctgcgcctttggctcctttaattgttgggcgcaccggtgctcaactcttcctcactgatggtgatcctagcaaggcacctctcctgttacagatggcatccgactgtgatgacaaaaactacatatcagccttggcagcttttaagaaccgtgtcctgtatgccaacgtctcgtacgaccacatggtcggctggcgaacgtcttcactaaggagagagaagaatcttataaagccctcacatcgttcactggatggctataagcacattgtgaatgtggaatactgttcgcccgtgtcatcggagggcccacatttcccttccaaggctgccagagctaaagaagctgcacagcgatcgccaaaccgagaaaataccgaggagtaccaccaaatgatggaggaggagatgctccatggcttgcagaaggttggctggaagaaggtggacgtcaacttccattcgtcattctggccttactctgctcacaacaacatacacgtcaagaacgagtggcttcacaatgctggcgctggtgttatcgcgcacgttgcggacagcatcaagcagcaggagtcacggccatgtcttcctgccaatctatagcagtagcattcagcaatccatttgttcaaattatctgtcgctagcaaataaacccatgaccaaactctgttcgtcagcatccactgagcggcgaaatatttgggactgggacacacaataagctgtgtatcattatcggccgcctaggttttacattgtttgatgtcaattgtcaaatggcatgtgtttcctcatggaacagacgaagcattcgaagttgatataaagacaacctaaattgtcatatatgctaccgatggttcgtacccaatccagcgacgacgtcgatgagatttgggttag

SEQ ID NO: 82418 - DNA, 2142 bp, Zea Mays
cggcccgcgagaggggatggcgtccacggctcgcccgctccgctcttataacagccgcttcctacgtctctcgcgcatcccttccgagcggaagcggcagcccgtcaggttatagctcactcttgatcgcttcctggtttgctaagcgatttgcctctcgtggttcggtgacggatcggaggcgctgcgaattcgaagctggtttctctgggctaagtcgattcggacttacttgttcagtaggtgtagtgtaggcgtgtagctcgatagacgagaagaatatttggcgtcgaagtttcagctaagcaacgagatcaggaagtttcagcaaagctcctggattaaatatttggcatcatagaggattcaaatctgccggaaacctgtatcttcatccagtatcaaggggaagttctgttgttgtgtgttcggtgatggatacatccaaaagcaagcaaggaccagaacatctccttgttcttgtccatggtatcatggctagccccaaagactggacatatggggaagcagtgctgaagaggcggttgggtgatgattttttcatatatgctagttcaacgaacagctacaccaaaacctttgatgggattgatgttgctggaagaaggtcttggaagtggttaacaagatgcccagcttgagaaagatttccttcctagcgcattctctgggtggtttgtttgctagatatgttattgcaatactccactcagtctcagtggaaacaaagaatgcaggacagagtagtgcacttattgttcctacaacaagagggccagcaaaatcgagatgtgcttcaggattaggttctattgctggattgcggccaattaattttattaccttagcaaccccacaccttggggttagagggagaaatcaggtgcatcaccaaaatgtttcggattacgtttacaaaatatactgcacattatccagcaaaggctcgattcctgggaaaacgaactctctatttgttattttgttcattcatgtagattttgaagttgcatggtatgatttttacaagcttggattatatcattgctgaagtggtcaataccaactagcatctataacttttgaggaaaaaacgacgaacttattgggacctgttcctgttagtgctgatcaatttctttgacacatgcttatatgtttttcccccgaattaccagcttccgtttcttcaaggcctatcaatcctagaaaagcttgctgcgcctttggctcctttaattgttgggcgcaccggtgctcaactcttcctcactgatggtgatcctagcaaggcacctctcctgttacagatggcatccgactgtgatgacaaaaactacatccttggcagcttttaagaaccgtgtcctgtatgccaacgtctcgtacgaccacatggtcggctggcgaacgtcttcactaaggagagagaagaatcttataaagccctcacatcgttcactggatggctataagcacattgtgaatgtggaatactgttcgcccgtgtcatcggagggcccacatttcccttccaaggctgccagagctaaagaagctgcacagcgatcgccaaaccgagaaaataccgaggagtaccaccaaatgatggaggaggagatgctccatggcttgcagaaggttggctggaagaaggtggacgtcaacttccattcgtcattctggccttactctgctcacaacaacatacacgtcaagaacgagtggcttcacaatgctggcgctggtgttatcgcgcacgttgcggacagcatcaagcagcaggagtcacggccatgtcttcctgccaatctatagcagtagcattcagcaatccatttgttcaaattatctgtcgctagcaaataaacccatgaccaaactctgttcgtcagcatccactgagcggcgaaatatttgggactgggacacacaataagctgtgtatcattatcggccgcctaggttttacattgtttgatgtcaattgtcaaatggcatgtgtttcctcatggaacagacgaagcattcgaagttgatataaagacaacctaaattgtcatatatgctaccgatggttcgtacccaatccagcgacgacgtcgatgagatttgggttag
